(19) United States
(12) Patent Application Publication
(10) Pub. No.: US 2007/0055448 A1
(43) Pub. Date: Mar. 8, 2007

(54) Primary rat hepatocyte toxicity modeling

(75) Inventors: Donna Mendrick, Gaithersburg, MD (US); Mark Porter, Gaithersburg, MD (US); Kory Johnson, Gaithersburg, MD (US); Brandon Higgs, Gaithersburg, MD (US); Arthur Castle, Gaithersburg, MD (US); Michael S. Orr, Gaithersburg, MD (US); Michael Elashoff, Gaithersburg, MD (US)

Correspondence Address: COOLEY GODWARD LLP, THE BROWN BUILDING - 875 15TH STREET, NW, SUITE 800, WASHINGTON, DC, 20005-2221, US

(73) Assignee: Gene Logic Inc., Gaithersburg, MD (US)

(21) Appl. No.: 10/515,373

(22) PCT Filed: Aug. 9, 2004
(86) PCT No.: PCT/US04/25646

§ 371 Date: May 24, 2006

Related U.S. Application Data
(60) Provisional application No. 60/493,007, filed on Aug. 7, 2003.

(51) Int. Cl. G01N 33/50

(52) U.S. Cl. 702/19

(57) ABSTRACT

The present invention is based on the elucidation of the global changes in gene expression and the identification of toxicity markers in tissues or cells exposed to a known toxin. The genes and their encoded proteins may be used as toxicity markers in drug screening and toxicity assays. The invention also includes a database of genes and/or proteins characterized by toxin-induced differential expression.

### RELATED APPLICATIONS

[0001] This application claims priority to U.S. Provisional Application 60/493,007, filed Aug. 7, 2003; which is herein incorporated by reference in its entirety.

[0002] This application is also related to U.S. application Ser. No. 10/357,507, filed Feb. 4, 2003, which is herein incorporated by reference in its entirety.

### SEQUENCE LISTING SUBMISSION ON COMPACT DISC

[0003] The Sequence Listing submitted concurrently herewith on compact disc under 37 C.F.R. §§1.821(c) and 1.821(e) is herein incorporated by reference in its entirety. Four copies of the Sequence Listing, one on each of four compact discs are provided. Copy 1, Copy 2 and Copy 3 are identical. Copies 1, 2 and 3 are also identical to the CRF. Each electronic copy of the Sequence Listing was created on Jul. 6, 2004 with a file size of 4034 KB. The file names are as follows: Copy 1—gene logic 5113 WO 01.txt; Copy 2—gene logic 5113 WO 01.txt; Copy 3—gene logic 5113 WO 01.txt; CRF—gene logic 5113 WO 01.txt.

### BACKGROUND OF THE INVENTION

[0004] The need for methods of assessing the toxic impact of a compound, pharmaceutical agent or environmental pollutant on a cell or living organism has led to the development of procedures which utilize living organisms as biological monitors. The simplest and most convenient of these systems utilize unicellular microorganisms such as yeast and bacteria, since they are most easily maintained and manipulated. Unicellular screening systems also often use easily detectable changes in phenotype to monitor the effect of test compounds on the cell. Unicellular organisms, however, are inadequate models for estimating the potential effects of many compounds on complex multicellular animals, as they do not have the ability to carry out biotransformations to the extent or at levels found in higher organisms.

[0005] The biotransformation of chemical compounds by multicellular organisms is a significant factor in determining the overall toxicity of agents to which they are exposed. Accordingly, multicellular screening systems or screening systems using isolated eukaryotic cells may be preferred or required to detect the toxic effects of compounds. The use of multicellular organisms as toxicology screening tools has been significantly hampered, however, by the lack of convenient screening mechanisms or endpoints, such as those available in yeast or bacterial systems. In addition, previous attempts to produce toxicology prediction systems have failed to provide the necessary modeling data and statistical information to accurately predict toxic responses (e.g., WO 00/12760, WO 00/47761, WO 00/63435, WO 01/32928, WO 01/38579).

### SUMMARY OF THE INVENTION

[0006] The present invention is based on the elucidation of the global changes in gene expression in primary hepatocytes exposed to known toxins, in particular hepatotoxins, as compared to unexposed cells as well as the identification of individual genes that are differentially expressed upon toxin exposure.

[0007] In various aspects, the invention includes methods of predicting at least one toxic effect of a compound, predicting the progression of a toxic effect of a compound, and predicting the hepatoxicity of a compound. The invention also includes methods of identifying agents that modulate the onset or progression of a toxic response. Also provided are methods of predicting the general pathology classes and cellular pathways that a compound modulates in a cell. The invention includes methods of identifying agents that modulate protein activities.

[0008] In a further aspect, the invention provides probes comprising sequences that specifically hybridize to genes in Tables 1-5MMMMM and agent that specifically detect the encoded proteins. Also provided are solid supports comprising at least two of the previously mentioned probes. The invention also includes a computer system that has a database containing information identifying the expression level in a tissue or cell sample exposed to a hepatotoxin of a set of genes comprising at least two genes in Tables 1-5MMMMM.

Tables

[0009] Table 1: provides the GenBank Accession No., SEQ ID NO. and GLGC ID NO. for each gene or nucleic acid marker identified herein.

[0010] Table 2: identifies the metabolic pathways in which the genes of Table 1 function.

[0011] Table 3: provides the human homologues to the rat genes described herein.

[0012] Table 4: defines the model codes referred to in Tables 1, 2, 3 and 5.

[0013] Table 5: discloses the summary statistics for each toxicity model.

### DETAILED DESCRIPTION

[0014] Many biological functions are accomplished by altering the expression of various genes through transcriptional (e.g. through control of initiation, provision of RNA precursors, RNA processing, etc.) and/or translational control. For example, fundamental biological processes such as cell cycle, cell differentiation and cell death are often characterized by the variations in the expression levels of groups of genes.

[0015] Changes in gene expression are also associated with the effects of various chemicals, drugs, toxins, pharmaceutical agents and pollutants on an organism or cells. For example, the lack of sufficient expression of functional tumor suppressor genes and/or the over expression of oncogene/protooncogenes after exposure to an agent could lead to tumorgenesis or hyperplastic growth of cells (Marshall, Cell, 64: 313-326 (1991); Weinberg, Science, 254:1138-1146 (1991)). Thus, changes in the expression levels of particular genes (e.g. oncogenes or tumor suppressors) may serve as signposts for the presence and progression of toxicity or other cellular responses to exposure to a particular compound.

[0016] Monitoring changes in gene expression may also provide certain advantages during drug screening and development. Often drugs are screened for the ability to interact with a major target without regard to other effects the drugs have on cells. These cellular effects may cause toxicity in the whole animal, which prevents the development and clinical use of the potential drug.

[0017] The present inventors have examined primary rat hepatocytes exposed to the known hepatotoxins which induce detrimental liver effects, to identify global and individual changes in gene expression induced by these compounds. These global changes in gene expression, which can be detected by the production of expression profiles, as well as the individual genes, provide useful toxicity markers that can be used to monitor toxicity and/or toxicity progression by a test compound. Expression profiles, as well as the individual markers, may also be used to monitor or detect various disease or physiological states, disease progression, drug efficacy and drug metabolism.

Identification of Toxicity Markers

[0018] To evaluate and identify gene expression changes that are predictive of toxicity, studies using selected compounds with well characterized toxicity have been conducted by the present inventors to catalogue altered gene expression during exposure in vivo and in vitro. In the present study, amiodarone, alpha-naphthylisothiocyante (ANIT), acetaminophen (APAP), AY-25329, bromobenzene, captopril, carbamazepine, carbon tetrachloride, chloroform, chlorpromazine, CI-1000, clofibrate, CPA, dexamethasone, diclofenac, diethylnitrosamine, diflunisal, dimethylnitrosamine (DMN), 17α-ethinylestradiol, gemfibrozil (Lopid®), hydrazine, imipramine (Janimine), indomethacin, lipopolysaccharide, lovastatin (Mevacor®), methotrexate, phenacetin, phenobarbital, tacrine, tamoxifen, tetracycline, thioacetamide, valproate, and Wy-14643 were selected as a known hepatotoxins.

[0019] Amiodarone (Cordarone®) is an anti-arrhythmic agent whose chemical structure contains a benzofuran ring (ring A) coupled to a p-OH-benzene structure substituted with 2 iodines and a diethyl-ethanolamine side chain (ring B). This drug is known to cause damage to the liver and has been shown to adversely effect the mitochondria by uncoupling oxidative phosphorylation and inhibiting beta-oxidation and respiration. Inhibition of respiration decreases ATP and increases production of reactive oxygen species, which in turn cause lipid peroxidation. The steatosis and hepatitis observed following treatment with amiodarone are believed to be due, at least in part, to lipid peroxidation products (Spaniol et al., J Hepatol 35(5):628-636 (2001); Berson et al., Gastroenterology 114:764-774, (1998)).

[0020] Aromatic and aliphatic isothiocyanates are commonly used soil fumigants and pesticides (Shaaya et al., Pesticide Science 44(3):249-253 (1995); Cairns et al., J Assoc Official Analytical Chemists 71(3):547-550 (1988)). These compounds are also environmental hazards, because they remain as toxic residues in plants (Cerny et al., J Agricultural and Food Chemistry 44(12):3835-3839 (1996)) and because they are released from the soil into the surrounding air (Gan et al., J Agricutural and Food Chemistry 46(3):986-990 (1998)).

[0021] Exposure to α-naphthylisothiocyanate (ANIT) has been shown to increase serum levels of total bilirubin, alkaline phosphatase, serum glutamic oxaloacetic transaminase and serum glutamic pyruvic transaminase, while total bile flow was reduced, all of which are indications of severe biliary dysfunction. ANIT also induces jaundice and cholestatis (the condition caused by failure to secrete bile, resulting in plasma accumulation of bile substances, liver cell necrosis and bile duct obstruction) (Tanaka et al., Clinical and Experimental Pharmacology and Physiology 20:543-547 (1993)). ANIT fails to produce extensive necrosis, but was found to produce inflammation and edema in the portal tract of the liver (Maziasa et al., Toxicol Appl Pharmacol 110:365-373 (1991)). ANIT-induced hepatotoxicity may also characterized by cholangiolitic hepatitis and bile duct damage. Acute hepatotoxicity caused by ANIT in rats is manifested as neutrophil-dependent necrosis of bile duct epithelial cells (BDECs) and hepatic parenchymal cells. These changes mirror the cholangiolitic hepatitis found in humans (Hill, Toxicol Sci 47:118-125 (1999)).

[0022] Histological changes include an infiltration of polymorphonuclear neutrophils and elevated number of apoptotic hepatocytes (Calvo et al., J Cell Biochem 80(4):461-470 (2001)). Other known hepatotoxic effects of exposure to ANIT include a damaged antioxidant defense system, decreased activities of superoxide dismutase and catalase (Ohta et al., Toxicology 139(3):265-275 (1999)), and the release of proteases from the infiltrated neutrophils, alanine aminotransferase, cathepsin G, elastase, which mediate hepatocyte killing (Hill et al., Toxicol Appl Pharmacol 148(1):169-175 (1998)).

[0023] Acetominophen (APAP) is a widely used analgesic and antipyretic agent that is an effective substitute for aspirin. Although acetaminophen does not have anti-inflammatory properties, it is preferably given to patients with ulcers or patients in whom prolonged clotting times would not be desirable. It also preferably taken by people who do not tolerate aspirin well.

[0024] Acetominophen is metabolized to N-acetyl-p-benzoquinoneimine (NAPQI) by N-hydroxylation in a cytochrome P450-mediated process. This highly reactive intermediate, which reacts with sulfhydryl groups in glutathione, and in other liver proteins following the depletion of glutathione, can cause centrilobular hepatic necrosis (particularly in zone 3), renal tubular necrosis, and hepatic and renal failure (Goodman and Gilman's The Pharmacological Basis of Therapeutics, Ninth Ed. Hardman et al., eds., pp. 631-633, McGraw-Hill, New York, 1996; Chanda et al., Hepatology 21(2):477-486 (1995)). Less serious side effects include skin rashes (erythemas and urticarias) and allergic reactions.

[0025] Upon treatment of rats with acetaminophen, hepatotoxicity can be observed 24 hours after dosing, as determined by statistically significant elevations of ALT and AST in the serum and by hepatocellular necrosis visualized at the light microscopic level (Hessel et al., Braz J Med Biol Res 29(6):793-796 (1996); Bruck et al., Dig Dis Sci 44(6):1228-1235 (1999)). High, but non-lethal, doses of acetaminophen given to rats also produced elevated levels of genes involved in hepatic acute phase response and liver cell maintenance and repair: arginase, beta-fibrinogen, alpha 1-acid glycoprotein, alpha-tubulin, histone 3, TGF beta and cyclin d. Expression levels of genes regulated by the cell cycle were decreased (Tygstrup et al., J Hepatol 25(2):183-190 (1996); Tygstrup et al., J Hepatol 27(1):156-162 (1997)). In mice, expression levels of genes that encode growth arrest and cell cycle regulatory proteins were increased, along with expression levels of stress-induced genes, transcription factor LRG-21, SOCS-2 (cytokine signaling repressor) and PAI-1 plasminogen activator inhibitor-1) (Reilly et al., Biochem Biophys Res Comm 282(i):321-328 (2001)).

[0026] AY-25329 is a phenothiazine that has been shown to be toxic in liver and in kidney tissue, where it can cause nephrosis. Phenothiazines are a class of psychoactive drugs that are used to treat schizophrenia, paranoia, mania, hyperactivity in children, some forms of senility, and anxiety (http://www.encyclopedia.com/articlesnew/36591.html). Side effects associated with prolonged use of these drugs are reduced blood pressure, Parkinsonism, reduction of motor activity, and visual impairment.

[0027] The present inventors have noted indications of liver and renal effects of AY-25329 by changes in serum chemistry. As early as 6 hours after the first dose, statistically significant increases in serum levels of creatinine, BUN, ALT, triglycerides and cholesterol were observed. Most of these markers of renal and liver dysfunction remained altered throughout the 14 day study period. Light microscopic analysis revealed effects in the liver as early as 6 and 24 hours, as evidenced by an increased number of hepatocytic mitotic figures and decreased glycogen content. Following 14 days of repeated dosing, nephrosis and alterations in the peripheral lobes of the liver and in the cytoplasm of hepatocytes were evident in rats dosed with 250 mg/kg/day of AY-25329.

[0028] Carbamazepine (Tegretol®) is an anti-epieleptic agent. In rats, it has been shown to induce a number of cytochrome P450 enzymes, in particular CYP2B, and the drug may also cause steatohepatitis in humans (Tateishi et al., Chem Biol Interact 117:257-268 (1999); Grieco et al., Eur J Gastroenterol 13(8):973-975 (2001)).

[0029] The pathogenesis of acute carbon tetrachloride (CCl₄)-induced hepatotoxicity follows a well-characterized course in humans and experimental animals resulting in centrilobular necrosis and steatosis, followed by hepatic regeneration and tissue repair. Severity of the hepatocellular injury is also dose-dependent and may be affected by species, age, gender and diet.

[0030] Differences in susceptibility to CCl₄ hepatotoxicity are primarily related to the ability of the animal model to metabolize CCl₄ to reactive intermediates. CCl₄-induced hepatotoxicity is dependent on CCl₄ bioactivation to trichloromethyl free radicals by cytochrome P450 enzymes (CYP2E1), localized primarily in centrizonal hepatocytes. Formation of the free radicals leads to membrane lipid peroxidation and protein denaturation resulting in hepatocellular damage or death.

[0031] The onset of hepatic injury is rapid following acute administration of CCl₄ to male rats. Morphologic studies have shown cytoplasmic accumulation of lipids in hepatocytes within 1 to 3 hours of dosing, and by 5 to 6 hours, focal necrosis and hydropic swelling of hepatocytes are evident. Centrilobular necrosis and inflammatory infiltration peak by 24 to 48 hours post dose. The onset of recovery is also evident within this time frame by increased DNA synthesis and the appearance of mitotic figures. Removal of necrotic debris begins by 48 hours and is usually completed by one week, with full restoration of the liver by 14 days.

[0032] Increases in serum transaminase levels also parallel CCl₄-induced hepatic histopathology. In male Sprague Dawley (SD) rats, alanine aminotrasferase (ALT) and aspartate aminotransferase (AST) levels increase within 3 hours of CCl₄ administration (0.1, 1, 2, 3, 4 mL/kg, ip; 2.5 mL/kg, po) and reach peak levels (approximately 5-10 fold increases) within 48 hours post dose. Significant increases in serum-glutathione s-transferase (-GST) levels have also been detected as early as 2 hours after CCl₄ administration (25 L/kg, po) to male SD rats.

[0033] At the molecular level, induction of the growth-related proto-oncogenes, c-fos and c-jun, is reportedly the earliest event detected in an acute model of CCl₄-induced hepatotoxicity (Schiaffonato et al., Liver 17:183-191 (1997)). Expression of these early-immediate response genes has been detected within 30 minutes of a single dose of CCl₄ to mice (0.05-1.5 mL/kg, ip) and by 1 to 2 hours post dose in rats (2 mL/kg, po; 5 mL/kg, po) (Schiaffonato et al., supra, and Hong et al., Yonsei Medical J 38:167-177 (1997)). Similarly, hepatic c-myc gene expression is increased by 1 hour following an acute dose of CCl₄ to male SD rats (5 mL/kg, po) (Hong et al., supra). Expression of these genes following exposure to CCl₄ is rapid and transient. Peak hepatic mRNA levels for c-fos, c-jun, and c-myc, after acute administration of CCl₄ have been reported at 1 to 2 hours, 3 hours, and 1 hour post dose, respectively.

[0034] The expression of tumor necrosis factor-α (TNF-α) is also increased in the livers of rodents exposed to CCl₄, and TNF-α has been implicated in initiation of the hepatic repair process. Pre-treatment with anti-TNF-α antibodies has been shown to prevent CCl₄-mediated increases in c-jun and c-fos gene expression, whereas administration of TNF-α induced rapid expression of these genes (Bruccoleri et al., Hepatol 25:133-141 (1997)). Up-regulation of transforming growth factor-β (TGF-β) and transforming growth factor receptors (TBRI-III) later in the repair process (24 and 48 hours after CCl₄ administration) suggests that TGF-β may play a role in limiting the regenerative response by induction of apoptosis (Grasl-Kraupp et al., Hepatol 28:717-7126 (1998)).

[0035] Chlorpromazine (Thorazine®) is a central nervous system depressant that is used as a sedative and also as an anti-nausea or anti-itching medication. The mechanism of action is not known. The drug induces canalicular cholestasis, a condition characterized by a decrease in the volume of bile formed and impaired secretion of solutes into bile, resulting in elevated serum levels of bile salts and bilirubin. Chlorpromazine has also been shown to inhibit bile acid uptake and canalicular contractility. Bile plugs can form in the bile ducts and canaliculi. Drug-induced cholestasis is also associated with cell swelling, inflammation and cell death (Casarett and Doull's Toxicology: The Basic Science of Poisons 6th Ed., Klaassen et al. eds., pp. 476-486, McGraw-Hill Medical Pub. Div., New York, 2001).

[0036] CI-1000 (4H-pyrrolo:3,2-d:pyrimidin-4-one, 2-amino-3,5-dihydro-7-(3-thienylmethyl)-monohydrochloride monohydrate) is a compound with anti-inflammatory properties. After treatment with CI-1000, increased serum ALT levels, a standard marker of liver toxicity, were observed in dogs.

[0037] Clofibrate, a halogenated phenoxypropanoic acid derivative (ethyl ester of clofibric acid), is an antilipemic agent. The exact mechanism by which clofibrate lowers serum concentrations of triglycerides and low-density lipoprotein (LDL) cholesterol, as well as raising high-density lipoprotein (HDL) cholesterol is uncertain. The drug has several antilipidemic actions, including activating lipoprotein lipase, which enhances the clearance of triglycerides and very-low-density lipoprotein (VLDL) cholesterol, inhibition of cholesterol and triglyceride biosynthesis, mobilization of cholesterol from tissues, increasing fecal excretion of neutral steroids, decreasing hepatic lipoprotein synthesis and secretion, and decreasing free fatty acid release.

[0038] Clofibrate has a number of effects on the rat liver, including hepatocellular hypertrophy, cellular proliferation, hepatomegaly, induction of CYP450 isozymes, and induction of palmitoyl CoA oxidation. Long term administration of clofibrate causes increased incidence of hepatocellular carcinoma, benign testicular Leydig cell tumors, and pancreatic acinar adenomas in rats. Clofibrate induces proliferation of peroxisomes in rodents and this effect, rather than genotoxic damage, is believed to be the causative event in rodent carcinogenesis (AHFS Drug Information Handbook 2001, McEvoy, ed., pp. 1735-1738; Electronic Physicians' Desk Reference—Atromid-S (clofibrate) at www.pdr.net; Brown and Goldstein, “Drugs used in the treatment of hyperliproteinemias,” in Goodman and Gilman's The Pharmacological Basis of Therapeutics Eighth ed., Goodman et al., eds., pp. 874-896, Pergamon Press, New York, 1990).

[0039] Clofibrate also increases hepatic lipid content and alters its normal composition by significantly increasing levels of phosphatidylcholine and phosphatidyl-ethanolamine (Adinehzadeh et al., Chem Res Toxicol 11(5):428-440 (1998)). A rat study of liver hyperplasia and liver tumors induced by peroxisome proliferators revealed that administration of clofibrate increased levels of copper and altered copper-related gene expression in the neoplastic liver tissues. Down-regulation of the ceruloplasmin gene and of the Wilson's Disease gene (which encodes P-type ATPase), along with up-regulation of the metallothionein gene, were noted in these tissues (Eagon et al., Carcinogenesis 20(6): 1091-1096 (1999)). Clofibrate-induced peroxisome proliferation and carcinogenicity are believed to be rodent-specific, and have not been demonstrated in humans.

[0040] Cyproterone acetate (CPA) is a potent androgen antagonist and has been used to treat acne, male pattern baldness, precocious puberty, and prostatic hyperplasia and carcinoma (Goodman & Gilman's The Pharmacological Basis of Therapeutics 9^{th} ed., p. 1453, J. G. Hardman et al., Eds., McGraw Hill, New York, 1996). Additionally, CPA has been used clinically in hormone replacement therapy to protect the endometrium and decrease menopausal symptoms and the risk of osteoporotic fracture (Schneider, “The role of antiandrogens in hormone replacement therapy,” Climacteric 3 (Suppl. 2): 21-27 (2000)).

[0041] In experiments with rats, CPA was shown to induce unscheduled DNA synthesis in vitro. After a single oral dose, continuous DNA repair activity was observed after 16 hours. CPA also increased the occurrence of S phase cells, which corroborated the mitogenic potential of CPA in rat liver (Kasper et al., Carcinogenesis 17(10): 2271-2274 (1996)). CPA has also been shown to produce cirrhosis in humans (Garty et al., Eur J Pediatr 158(5): 367-370 (1999)).

[0042] Diclofenac, a non-steroidal anti-inflammatory drug, has been frequently administered to patients suffering from rheumatoid arthritis, osteoarthritis, and ankylosing spondylitis. Following oral administration, diclofenac is rapidly absorbed and then metabolized in the liver by cytochrome P450 isozyme of the CYC2C subfamily (Goodman & Gilman's The Pharmacological Basis of Therapeutics 9^{th} ed., p. 637, J. G. Hardman et al., eds., McGraw Hill, New York, 1996). In addition, diclofenac has been applied topically to treat pain due to corneal damage (Jayamanne et al., Eye 11 (Pt. 1): 79-83 (1997); Dornic et al., Am J Ophthalmol 125(5): 719-721 (1998)).

[0043] Although diclofenac has numerous clinical applications, adverse side-effects have been associated with the drug, such as corneal complications, including corneal melts, ulceration, and severe keratopathy (Guidera et al., Ophthalmology 108(5): 936-944 (2001)). Another study investigated 180 cases of patients who had reported adverse reactions to diclofenac to the Food and Drug Administration (Banks et al., Hepatology 22(3): 820-827 (1995)). Of the 180 reported cases, the most common symptom was jaundice (75% of the symptomatic patients). Liver sections were taken and analyzed, and hepatic injury was apparent one month after drug treatment. An additional report showed that a patient developed severe hepatitis five weeks after beginning diclofenac treatment for osteoarthritis (Bhogaraju et al., South Med J 92(7): 711-713 (1999)).

[0044] In one study on diclofenac-treated Wistar rats (Ebong et al., Afr J Med Sci 27(3-4): 243-246 (1998)), diclofenac treatment induced an increase in serum chemistry levels of alanine aminotransferase, aspartate aminotransferase, methaemoglobin, and total and conjugated bilirubin. Additionally, diclofenac enhanced the activity of alkaline phosphatase and 5′nucleotidase. A study on humans revealed elevated levels of hepatic transaminases and serum creatine when compared to the control group (McKenna et al., Scand J Rheumatol 30(1): 11-18 (2001)).

[0045] Diflunisal, a non-steroidal anti-inflammatory drug (NSAID), is a difluorophenyl derivative of salicylic acid (Goodman & Gilman's The Pharmacological Basis of Therapeutics 9^{th} ed., p. 631, J. G. Hardman et al., Eds., McGraw Hill, New York, 1996). It is most frequently used in the treatment of osteoarthritis and musculoskeletal strains. NSAIDs have analgesic, antipyretic and anti-inflammatory actions, however, hepatotoxicity is known to be an adverse side effect of NSAID treatment (Masubuchi et al., J Pharmacol Exp Ther 287:208-213 (1998)). Diflunisal has been shown to be less toxic than other NSAIDs, but it can eventually have deleterious effects on platelet or kidney function (Bergamo et al., Am J Nephrol 9:460-463 (1989)). Other side effects that have been associated with diflunisal treatment are diarrhea, dizziness, drowsiness, gas or heartburn, headache, nausea, vomiting, and insomnia (http://arthritisinsight.com/medical/meds/dolobid.html).

[0046] In a comparative hepatotoxicity study of 18 acidic NSAIDs, diflunisal was shown to increase LDH leakage in rat hepatocytes, a marker for cell injury, when compared to control samples. Additionally, treatment with diflunisal led to decreased intracellular ATP concentrations. In a study comparing the effects of diflunisal and ibuprofen, both drugs appeared to cause abdominal cramping, even during short-term usage. Because the toxic dosages were selected to be below the level at which gastric ulceration occurs, more severe gastrointestinal effects were not detected. But, increased serum levels of creatinine, a sign of renal injury, were also observed (Muncie et al., Clin Ther 11:539-544 (1989)).

[0047] Another model compound, dimethylnitrosamine (DMN), is a known carcinogen and inducer of liver fibrosis and lipid peroxidation. DMN causes oxidative stress in liver cells, which may be the link between chronic liver damage and liver fibrosis. Rats treated with DMN showed diffuse fibronectin deposition, elevated hydroxyproline levels (an indicator of fibrosis), increased levels of collagens, fibrous septa, and impaired oxidative balance. Serum levels of ALT and malondialdehyde (MDA) were increased, while serum levels of SOD were decreased (Vendemiale et al., Toxicol Appl Pharmacol 175(2):130-139 (2001); Liu et al., Zhonghua Gan Zang Bing Za Zhi 9 Suppl:18-20 (2001)). Other studies in rats have noted severe centrilobular congestion and haemorrhagic necrosis several days after a three-day period of DMN administration. Following additional periods of DMN treatment, the rats developed centrilobular necrosis and intense neutrophilic infiltration, which progressed to severe centrilobular necrosis, fiber deposition, focal fatty deposits, bile duct proliferation, bridging necrosis and fibrosis around the central veins (cirrhosis-like symptoms). A decrease in total protein and increase in DNA were also observed (George et al. (2001) Toxicology 156(2-3):129-138).

[0048] 17α-ethinylestradiol, a synthetic estrogen, is a component of oral contraceptives, often combined with the progestational compound norethindrone. It is also used in post-menopausal estrogen replacement therapy (PDR 47^{th} Ed., pp. 2415-2420, Medical Economics Co., Inc., Montvale, N.J., 1993; Goodman & Gilman's The Pharmalogical Basis of Therapeutics 9^{th} Ed., pp. 1419-1422, J. G. Hardman et al. Eds., McGraw Hill, New York, 1996).

[0049] The most frequent adverse effects of 17α-ethinylestradiol usage are increased risks of cardiovascular disease: myocardial infarction, thromboembolism, vascular disease and high blood pressure, and of changes in carbohydrate metabolism, in particular, glucose intolerance and impaired insulin secretion. There is also an increased risk of developing benign hepatic neoplasia. Because this drug decreases the rate of liver metabolism, it is cleared slowly from the liver, and carcinogenic effects, such as tumor growth, may result.

[0050] 17α-ethinylestradiol has been shown to cause a reversible intrahepatic cholestasis in male rats, mainly by reducing the bile-salt-independent fraction of bile flow (BSIF) (Koopen et al., Hepatology 27:537-545 (1998)). Plasma levels of bilirubin, bile salts, aspartate aminotransferase (AST) and alanine aminotransferase (ALT) in this study were not changed. This study also showed that 17α-ethinylestradiol produced a decrease in plasma cholesterol and plasma triglyceride levels, but an increase in the weight of the liver after 3 days of drug administration, along with a decrease in bile flow. Further results from this study are as follows. The activities of the liver enzymes leucine aminopeptidase and alkaline phosphatase initially showed significant increases, but enzyme levels decreased after 3 days. Bilirubin output increased, although glutathione (GSH) output decreased. The increased secretion of bilirubin into the bile without affecting the plasma level suggests that the increased bilirubin production must be related to an increased degradation of heme from heme-containing proteins. Similar results were obtained in another experiment (Bouchard et al., Liver 13:193-202 (1993)) in which the livers were also examined by light and electron microscopy. Daily doses of 17α-ethinylestradiol have been shown to cause cholestasis as well, although, following drug treatment, bile flow rates gradually returned to normal (Hamada et al., Hepatology 21:1455-1464 (1995)). Liver hyperplasia, possibly in response to the effects of tumor promoters, has also been observed (Mayol, Carcinogenesis 13:2381-2388 (1992)).

[0051] The lipid-lowering drug gemfibrozil (Lopid®) is a know peroxisome proliferator in liver tissue, causing both hyperplasia and enlargement of liver cells. Upon exposure to gemfibrozil, hepatocarcinogenesis has been observed in rats and mice, and a decrease in alpha-tocopherol and an increase in DT-diaphorase activity have been observed in rats and hamsters (impaired antioxidant capability). Peroxisome proliferators increase the activities of enzymes involved in peroxisomal beta-oxidation and omega-hydroxylation of fatty acids, which results in oxidative stress (O'Brien et al., Toxicol Sci 60(2):271-278 (2001); Carthew et al., J Appl Toxicol 17(1):47-51 (1997)).

[0052] Hydrazine (NH₂═NH₂), is a component of many industrial chemicals, such as aerospace and airplane fuels, corrosion inhibitors, dyes and photographic chemicals. Its derivatives are used in pharmaceuticals such as hydrazine sulphate, used to treat cachexia in cancer patients, isoniazid, an anti-tuberculosis drug, and hydralazine, an anti-hypertensive. These drugs are metabolized in vivo to produce hydrazine, among other by-products. Consequently, exposure to hydrazine is by direct contact, e.g., among military and airline personnel, or the result of its production in the body, e.g., in patients with cancer or high blood pressure.

[0053] Studies on rat hepatocytes have shown that hydrazine causes a dose-dependent loss of viability, leakage of LDH, depletion of GSH and ATP and a decreased rate of protein synthesis (Delaney et al., Xenobiotica 25(12):1399-1410 (1995)). When administered to rats, hepatotoxic changes, characterized by GSH and ATP depletion and induction of fatty liver (increases in liver weight and triglycerides, with the appearance of fatty droplets, swelling of mitochondria and appearance of microbodies) were also found to be dose-dependent (Jenner et al., Arch Toxicol 68(6):349-357 (1994); Scales et al., J Toxicol Environ Health 10(6):941-953 (1982)). The hepatoxicity, as well as renal toxicity, associated with hydrazine exposure has been linked to free radical damage resulting from oxidative metabolism by cytochrome P4502E1 (CYP2E1), which catalyzes the conjugation of free radicals with reduced glutathione. Although exposure to hydrazine and several hydrazine derivatives increased enzyme levels in kidney tissue, increased enzyme levels were not detected in liver tissue (Runge-Morris et al., Drug Metab Dispos 24(7):734-737 (1996)).

[0054] The mutagenic and hepatocarcinogenic effects of hydrazine were examined in hamster livers. In vivo, hydrazine reacts with formaldehyde to form formaldehyde hydrazone (CH₂═N—NH₂), an alkylating intermediate that methylates guanine in DNA. Upon treatment with hydrazine, liver DNA showed the presence of methylated guanine, DNA adducts and the impairment of maintenance methylation (impaired methylation of deoxycytosine). Hepatic adenomas and carcinomas also developed in a dose-dependent manner and could be correlated with decreased maintenance methylation (FitzGerald et al., Carcinogenesis 17(12):2703-2709 (1996)).

[0055] Imipramine, a dibenzazepine derivative, is a tricyclic anti-depressant agent commonly used for the treatment of major depression. Experiments in rats have shown that the drug induces cytochrome P450-mediated formation of reactive metabolites, which cause acute cell injury. Decreased levels of glutathione and protein thiols, as well as lactate dehydrogenase leakage, all standard measures of liver toxicity, were also noted (Masubuchi et al., Arch Toxicol 73(3):147-151 (1999). On rare occasions, imipramine has induced cholestasis and hepatitis in humans (Moskovitz et al., J Clin Psychiatry 43(4):165-066 (1982); Horst et al., Gastroenterology 79(3):550-544 (1980)).

[0056] Indomethacin is a non-steroidal antiinflammatory, antipyretic and analgesic drug commonly used to treat rheumatoid arthritis, osteoarthritis, ankylosing spondylitis, gout and a type of severe, chronic cluster headache characterized by many daily occurrences and jabbing pain. This drug acts as a potent inhibitor of prostaglandin synthesis; it inhibits the cyclooxygenase enzyme necessary for the conversion of arachidonic acid to prostaglandins (PDR 47^{th} Ed., Medical Economics Co., Inc., Montvale, N.J., 1993; Goodman & Gilman's The Pharmalogical Basis of Therapeutics 9^{th} Ed., J. G. Hardman et al. eds., pp. 1074-1075, 1089-1095, McGraw Hill, New York, 1996; Cecil Textbook of Medicine, 20^{th} Ed., part XII, pp. 772-773, 805-808, J. C. Bennett and F. Plum Eds., W. B. Saunders Co., Philadelphia, 1996).

[0057] The most frequent adverse effects of indomethacin treatment are gastrointestinal disturbances, usually mild dyspepsia, although more severe conditions, such as bleeding, ulcers and perforations can occur. Hepatic involvement is uncommon, although some fatal cases of hepatitis and jaundice have been reported. Renal toxicity can also result, particularly after long-term administration. Renal papillary necrosis has been observed in rats, and interstitial nephritis with hematuria, proteinuria and nephrotic syndrome have been reported in humans. Patients suffering from renal dysfunction risk developing a reduction in renal blood flow, because renal prostaglandins play an important role in renal perfusion.

[0058] In rats, although indomethacin produces more adverse effects in the gastrointestinal tract than in the liver, it has been shown to induce changes in hepatocytic cytochrome P450. In one study, no widespread changes in the liver were observed, but a mild, focal, centrilobular response was noted. Serum levels of albumin and total protein were significantly reduced, while the serum level of urea was increased. No changes in creatinine or aspartate aminotransferase (AST) levels were observed (Falzon et al., Br J exp Path 66:527-534 (1985)). In another rat study, a single dose of indomethacin was shown to reduce liver and renal microsomal enzymes, including CYP450, and cause lesions in the GI tract (Fracasso et al., Agents Actions 31:313-316 (1990)).

[0059] LPS (lipopolysaccharide) is an endotoxin released by gram-negative bacteria upon breakage or rupture of the cells that induces an acute inflammatory response in mammals and that can cause septic shock. LPS is also a research tool used to initiate liver injury in rats through an inflammatory mechanism. Typically, the membrane components of LPS are lipid-A, KDO (2-keto-3-deoxy-octulosonic acid), core polysaccharides and O-antigen polysaccharides, the polysaccharide units differing from one bacterium to another (Zinsser Microbiology 20th Ed., Joklik et al., eds., pp. 82-87, Appleton & Lange, Norwalk, Conn., 1992).

[0060] Primary rat hepatocytes derived from liver parenchymal cells and sinusoidal cells of rats that have been exposed to LPS in vivo can directly respond to LPS in cell culture. Numerous effects of LPS-induced endotoxemia can be detected, including elevated levels of nitric oxide synthetase (NOS) with increased nitric oxide and nitrite production, cellular hypertrophy, vacuolization, chromosomal emargination, cytoplasmic DNA fragmentation and necrosis (Pittner et al., Biochem Biophys Res Commun 185(1):430-435 (1992); Laskin et al., Hepatology 22(1):223-234 (1995); Wang et al., Am J Physiol 269(2 Pt 1):G297-304 (1995)). Other studies have indicated that the presence of Kupffer cells with primary rat hepatocytes is essential for the induction of hepatocyte apoptosis by LPS (Hamada et al., J Hepatol 30(5):807-818 (1999)).

[0061] Exposure of rats or primary hepatocytes to LPS induces the expression of a number of acute-phase proteins in the liver. Recent evidence has indicated that rat hepatocytes express soluble CD14 protein, and LPS is capable of markedly increasing levels of CD14 at both the gene expression and protein expression levels (Liu et al., Infect Immun 66(11):5089-5098 (1998)). Soluble CD14 is believed to be a critical LPS recognition protein required for the activation of a variety of cells to toxic levels of LPS, even in endothelial and epithelial cells (Pugin et al., Proc Natl Acad Sci USA 90(7):2744-2748 (1993)). Another key component of the LPS recognition system is lipopolysaccharide-binding protein (LBP), which binds to LPS. The LPS-LBP complex interacts with the CD14 receptor, inducing LPS sensitive genes. LBP can be induced in hepatocytes isolated from rats that have not been primed with LPS, indicating that this key regulatory pathway is intact in primary rat hepatocytes (Wan et al., Infect Immun 63(7):2435-2442 (1995)).

[0062] Lovastatin (Mevacor®) is a cholesterol-lowering agent belonging to a class of compounds, the statins, that are potent inhibitors of HMG-CoA reductase. This enzyme catalyzes the conversion of HMG-CoA to mevalonate, the rate-controlling enzyme in cholesterol biosynthesis. HMG-CoA reductase inhibitors block the production of cholesterol in the liver leading to a reduction of LDL particles in the plasma. Lovastatin has additional effects on lipid metabolism, including depletion of intracellular pools of sterols and increased synthesis of LDL receptors, leading to enhanced removal of LDL and LDL precursors from plasma. Upon treatment with lovastatin, plasma levels of VLDL, IDL and triglycerides also decrease. Oral doses of lovastatin are extensively absorbed by the liver, and the drug is excreted primarily via the liver; less than 13% of its metabolites are excreted in the urine (Goodman and Gilman's The Pharmacological Basis of Therapeutics, Ninth Ed, Hardman et al., eds., pp. 884-888, McGraw-Hill, New York, 1996).

[0063] The most frequent side effects are liver damage, characterized by elevated levels of hepatic transaminases (e.g., AST and ALT), creatinine phosphokinase and alkaline phosphatase, and myopathy, characterized by muscle pain and destruction of skeletal muscle cells. Cases of drug-induced hepatitis, accompanied by jaundice and elevated levels of liver enzymes, have also been reported, although the symptoms were reversible following withdrawal of the drug (Huchzermeyer et al., Deutsch Med Wochenschr 120(8):252-256 (1995); Heuer et al., Med Klin 95(11):642-644 (2000)). Histologic examination of affected liver tissue showed centrilobular necrosis, centrilobular cholestasis, and infiltrates with mononuclear and polymorphonuclear cells, including eosinophils (Grimbert et al., Dig Dis Sci 39(9):2032-2033 (1994)).

[0064] Experiments by the present inventors have found that when rats were dosed with lovastatin, at 9 or 90 mg/kg twice a day, no effects were noted in liver tissue after 6 or after 24 hours. After 14 days of treatment at the higher dosage, however, liver cells showed abnormal vacuolization of the cytoplasm. Hepatoxicity data from other studies of laboratory animals treated with lovastatin have not been widely reported. Therefore, in order to establish a more sensitive model for examining the changes in liver tissue caused by lovastatin, as well as to have a means of examining changes in expression level of individual genes as a result of exposure to lovastatin, experiments in cultured hepatocytes were undertaken.

[0065] Methotrexate is a widely used antineoplastic drug that is also frequently prescribed for the treatment of psoriasis (a disease characterized by abnormal proliferation of epidermal cells), juvenile lymphoblastic leukemia, rheumatoid arthritis, and a number of other cancerous diseases, such as leukemic meningitis and choriocarcinoma. Although generally not metabolized, at high dosages, metabolites such as 7-hydroxy-methotrexate, a nephrotoxin, do accumulate. Methotrexate polyglutamates are retained in the kidneys for weeks and in the liver for months ((Goodman and Gilman's The Pharmacological Basis of Therapeutics Ninth Ed., Hardman et al., eds., pp. 1243-1247, McGraw-Hill, New York, 1996).

[0066] Methotrexate acts to prevent DNA synthesis and cell replication by inhibiting the rate-limiting enzyme in purine and thymidine synthesis, dihydrofolate reductase (DHFR) (Goodman and Gilman's, supra; Schwartz et al., Proc Nat Acad Sci USA 89(2):594-598 (1992)). It also acts as an suppressant of cell-mediated immune responses. The biochemical toxicology of methotrexate has been well characterized in man, where long-term administration produces hepatic fibrosis or cirrhosis, especially in heavy drinkers, which is linked to persistent, mild-to-moderate, increases in serum transaminases, alkaline phosphatases and bilirubin (Reynolds et al., South Med J 79(5):536-539 (1986); Tolman et al., J Rheumatol 12 (Suppl 12):29-34 (1985)). Methotrexate is a rather long-acting, rapidly reversible DHFR inhibitor, despite its high affinity for the target enzymes in many cell types, which may be due to the formation of methotrexate polyglutamates that reduce the ability of DHFR to pass through cell membranes. The toxic effects of methotrexate may be due to the depletion of tetrahydrofolate cofactors that are required for purine and thymidylate synthesis (methylation reactions in hepatic 1-carbon metabolism) and to the inhibition of folate-dependent enzymes involved in the metabolism of purines and thymidylate, the inhibition caused by the accumulation of methotrexate polyglutamates and dihydrofolate polyglutamates.

[0067] The mechanism of methotrexate-induced hepatotoxicity is not yet fully elucidated, partly because the pathological changes in humans are rather difficult to reproduce in animal models, although experiments in rats have shown that, in a dose-dependent fashion, methotrexate produces liver damage ranging from focal to confluent necrosis of zone 3 hepatocytes, with early stage fibrosis (Hall et al., Hepatology 14(5):906-10 (1991)). Other studies in rats have demonstrated that treatment with methotrexate produces intrahepatocytic fat deposits, along with fatty accumulations in hepatocytes that range from fine droplets to large vacuoles. The areas of necrosis showed signs of the hypoxia associated with congestive failure, as well as anemic infarcts, fibrotic foci of the collapse type, atrophy of the hepatic cords, and hemosiderosis (Custer et al., J Natl Cancer Inst 58(4):1011-1015 (1977)). Hepatotoxicity probably involves interference with triglyceride and other lipid biosynthetic pathways in the liver. For example, studies on rats have shown that methotrexate inhibits the biosynthesis of lipotropic substances such as methionine and choline through its interference with hepatic 1-carbon metabolism. The drug also inhibits the activity of vitamin B12, another lipotropic factor (Tuma et al., Biochem Pharmacol 24:1327-1331 (1975) and impairs RNA and protein synthesis, triglyceride secretion and total triglyceride esterification (Deboyser et al., Toxic in Vitro 6(2):129-132 (1992).

[0068] Methotrexate does not appear to be cytotoxic to cultured primary hepatocytes following short-term exposures (up to 3.5 hr), but significant effects on HepG2 growth curves have been observed at low concentrations during the course of 7-day exposures (Wu et al., Proc Natl Acad Sci USA 80(10):3078-3080 (1983)). Additionally, it has been demonstrated that methotrexate increases hepatic glycogenolysis, oxygen consumption and calcium efflux and decreases glutathione levels (Yamamoto et al., Biochem Pharmacol 44(4):761-767, (1992); de Oliveira et al., Res Commun Chem Pathol Pharmacol 53(2):173-181 (1986); Lindenthal et al., Eur J Pharmacol 228(5-6):289-298 (1993)). Experiments on cultured rat hepatocytes have shown that methotrexate also inhibits the activity of hepatic N-acetyltransferase 2 (NAT2), although the drug has only a slight inhibitory effect on rat NAT1, enzymes that catalyze the acetylation of a variety of therapeutic arylamines (Zaher et al., Toxicol in Vitro 11:271-283 (1997)).

[0069] Phenobarbital, a barbiturate, is used as an anti-epileptic, sedative or hypnotic drug and can also be used to treat neuroses with related tension states, such as hypertension, coronary artery disease, gastrointestinal disturbances and preoperative apprehension. Phenobarbital is also found in medications to treat insomnia and headaches (Remington: The Science and Practice of Pharmacy, 19th Ed., A. R. Gennaro ed., pp. 1164-1165, Mack Publishing Co., Easton, Pa., 1995).

[0070] Phenobarbital induces a variety of drug metabolizing enzymes such as cytochrome P450 oxidoreductase, aldehyde dehydrogenases, UDP-glucuronyltransferase, GSTs, epoxide hydrolase, and an assortment of cytochrome P450 monooxygenases (Waxman et al., Biochem J 1281(Pt 3):577-592 (1992); Kaplowitz et al., Biochem J 146(2):351-356 (1975); Tank et al., Biochem Pharmacol 35(24):4563-4569 (1986). The induction of liver enzymes is usually accompanied by liver enlargement, proliferation of smooth endoplasmic reticulum, and tumor promotion (Waxman et al., supra; Rice et al., Carcinogenesis 15(2):395-402 (1994); Nims et al., Carcinogenesis 8(1):67-71, (1987). Incidences of cholestasis and hepatocellular injury have also been found (Selim et al., Hepatology 29(5):1347-1351 (1999); Gut et al., Environ Health Perspect 104(Suppl 6):1211-1218 (1999)). Phenobarbital has been classified as nongenotoxic hepatocarcinogen as it induces liver tumors in rodents but lacks detectable signs of genotoxicity using short term in vivo or in vitro assays (Whysner et al., Pharmacol Ther 71(1-2): 153-191 (1996)).

[0071] The effects of phenobarbital on phospholipid metabolism in rat liver have been studied. In one study, phenobarbital, administered intraperitonially (i.p.), was found to cause an increase in the microsomal phosphatidylcholine content. Additionally, levels of glycerophosphate acyltransferase (GAT), phosphatidate cytidylyltransferase (PCT), phosphatidate phosphohydrolase (PPH) and choline phosphotransferase (CPT) were significantly increased (Hoshi et al., Chem Pharm Bull 38:3446-3448 (1990)).

[0072] Tacrine (1,2,3,4-tetrahydro-9-aminoacridine-hydrochloride), a strong acetylcholinesterase (AChE) inhibitor, is used in the treatment of mild to moderate cases Alzheimer's dimentias. Alzheimer's patients have synaptic loss, neuronal atrophy and degeneration of cholinergic nuclei in the forebrain, which are associated with reduced oxidative metabolism of glucose and decreased levels of ATP and acetyl CoA. Administration of AChE inhibitors, such as tacrine, is designed to increase cholinergic activity to combat this loss (Weinstock, Neurodegeneration 4(4):349-356 (1995)). The effect seen in the patients is a reversal of the cognitive and functional decline, but the drug does not appear to change the neurodegenerative process (Goodman & Gilman's The Pharmacological Basis of Therapeutics 9^{th} Ed., Hardman et al. eds., p. 174, McGraw Hill, New York, 1996).

[0073] Hepatotoxicty caused by tacrine is typically reversible, although cases of severe hepatotoxicity have been seen (Blackard et al., J Clin Gastroenterol 26:57-59 (1998)). The toxicity is characterized by decreased levels of protein synthesis and the release of lactate dehydrogenase, as well as by increased transaminase levels and decreased levels of ATP, glycogen and glutathione. The decrease in protein synthesis may represent a signal leading to cell death (Lagadic-Gossmann et al., Cell Biol Toxicol 14(5):361-373 (1998)).

[0074] Preclinical studies have failed to detect adverse hepatic events, although tacrine displayed cytotoxicity to human hepatoma cell lines and primary rat hepatocytes (Viau et al., Drug Chem Toxicol 16:227-239 (1993)). While hepatotoxicity has been found in humans, in vivo rat studies have not shown a correlation between tacrine exposure and hepatotoxicity, and the mechanism of action is not completely understood. An in vitro study comparing the reaction of human and rat liver microsomal preparations to tacrine showed that the two species reacted differently to the drug, suggesting that the rat may not be the best model for monitoring tacrine-induced elevations in liver marker enzymes (Woolf et al., Drug Metab Dispos 21:874-882 (1993)).

[0075] While tacrine does not reveal classic signs of hepatotoxicity in rats, gene expression changes due to tacrine administration can be used to predict that the drug will be a liver toxin in humans. This suggests that toxicogenomics might be able to detect drugs that prove to be toxic in the clinic even when classical but more crude measures in preclinical screening fail to detect toxicity.

[0076] Tamoxifen is a nonsteroidal anti-estrogen used for breast cancer in males and females. Tamoxifen has been associated with changes in liver enzyme levels, disruption of mitochondrial metabolism and, occasionally, with a spectrum of more severe liver abnormalities including fatty liver, cholestasis, hepatic necrosis and NASH (nonalcoholic steatohepatitis) (Duthie et al., Xenobiotica 25(10):1151-1164 (1995); Cardoso et al., Toxicol Appl Pharmacol 176(3):145-152 (2001); Pinol et al., Gastroenterol Hepatol 23(2):57-61 (2000); and Farrell, Semin Liver Dis 22(2):185-194 (2002)). A few of these serious cases included fatalities. A few cases of liver cancer have also been reported. Additionally, studies in mice and rats have shown that tamoxifen significantly alters the activities of liver enzymes and can induce hepatic carcinomas (Caballero et al., Int J Biochem Cell Biol 33(7):681-690 (2001); Guzelian, Semin Oncol 24(1 Suppl 1):S1-105-121 (1997)).

[0077] Tetracycline is a broad spectrum antibiotic whose main mechanism of action is the inhibition of bacterial protein synthesis. Hepatic toxicity, principally steatosis, has been observed in patients receiving high doses of tetracycline. In rats and dogs, exposure to tetracycline has been shown to increase levels of total lipids and triglycerides in liver cells due to inhibition of mitochondrial lipid metabolism and beta-oxidation (Lewis et al., Am J Dig Dis 12:429-438, (1967); Amacher et al., Fundam Appl Toxicol 40(2):256-263 (1997).

[0078] Valproate (n-dipropylacetic acid, Depakene®) is routinely used to treat several types of epileptic seizures—absence seizures, myoclonic seizures and tonic-clonic seizures. Most other anti-epileptics are effective against only one type. Valproate acts on neurons to inhibit the sustained repetitive firing caused by depolarization of cortical or spinal cord neurons, and a prolonged recovery of inactivated voltage-activated Na⁺ channels follows. The drug also acts by reducing the low-threshold Ca²⁺ current and its multiple mechanisms contribute to its use in multiple types of seizures. Although valproate does not affect neuronal responses to GABA, it does increase the activity of the GABA synthetic enzyme, glutamic acid decarboxylase, and it inhibits enzymes that degrade GABA, GABA transaminase and succinic semialdehyde dehydrogenase (Goodman and Gilman's The Pharmacological Basis of Therapeutics. 9th Ed., Hardman et al., eds., pp. 462, 476 and 477, McGraw-Hill, New York, 1996).

[0079] The most common side effects are gastrointestinal symptoms, including anorexia, nausea and vomiting. Effects on the CNS include sedation, ataxia and tremor. Rash, hair loss, increased appetite and teratogenic effects have also been observed (Briggs et al., A Reference Guide to Fetal and Neonatal Risk, Drugs in Pregnancy and Lactation, 4th ed. p. 869, Williams & Wilkins, Baltimore, 1994). With respect to liver toxicity, valproate produces elevated levels of hepatic enzymes in about 40% of patients, which may be an asymptomatic condition, and elevated levels of hepatic lipids. Fulminant hepatitis, microvesicular steatosis (fatty degeneration), hepatocyte necrosis and hepatic failure can also result. It is believed that hepatoxicity is caused by an accumulation of unsaturated metabolites of valproate, in particular 4-en-valproate, which is structurally similar to two known hepatotoxins, 4-en-pentanoate and methylenecyclopropylacetic acid (Eadie et al., Med Toxicol Adverse Drug Exp 3(2):85-106 (1988)).

[0080] In a study on rats, microvesicular steatosis caused by valproate was found to be accompanied by myeloid bodies, lipid vacuoles and mitochondrial abnormalities (Kesterson et al., Hepatology 4(6):1143-1152 (1984)). Experiments on cultured rat hepatocytes have shown that valproate produces a dose-dependent leakage of lactic acid dehydrogenase and increased amounts of acyl-CoA esters, compounds that interfere with the beta-oxidation of fatty acids (Vance et al., Epilepsia 35(5):1016-1022 (1994)). Administration of valproate to rats has also been shown to cause enhanced excretion of dicarboxylic acids, a sign of impaired mitochondrial beta-oxidation. Other metabolic effects include hypoglycemia, hyperammonemia, decreased levels of beta-hydroxybutyrate and carnitine and decreased activities of acyl-CoA dehydrogenases, enzymes involved in fatty acid oxidation. mRNA levels of genes involved in fatty acid oxidation, however, such as the short-, medium- and long-chain acyl-CoA dehydrogenases, were found to have increased (Kibayashi et al., Pediatr Int 41(1):52-60 (1999)).

[0081] Wy-14643, a tumor-inducing compound that acts in the liver, has been used to study the genetic profile of cells during the various stages of carcinogenic development, with a view toward developing strategies for detecting, diagnosing and treating cancers Rockett et al., Toxicology 144(1-3):13-29 (2000)). In contrast to other carcinogens, Wy-14643 does not mutate DNA directly. Instead, it acts on the peroxisome proliferator activated receptor-alpha (PPARalpha), as well as on other signaling pathways that regulate growth (Johnson et al., J Steroid Biochem Mol Biol 77(1):59-71 (2001)). The effect is elevated and sustained cell replication, accompanied by a decrease in apoptosis (Rusyn et al., Carcinogenesis 21(12):2141-2145 (2000)). These authors (Rusyn et al.) noted an increase in the expression of enzymes that repair DNA by base excision, but no increased expression of enzymes that do not repair oxidative damage to DNA. In a study on rodents, Johnson et al. noted that Wy-14643 inhibited liver-X-receptor-mediated transcription in a dose-dependent manner, as well as de novo sterol synthesis.

[0082] In experiments with mouse liver cells (Peters et al., Carcinogenesis 19(11):1989-1994 (1998)), exposure to Wy-14643 produced increased levels of acyl CoA oxidase and proteins involved in cell proliferation: CDK-1, 2 and 4, PCNA and c-myc. Elevated levels may be caused by accelerated transcription that is mediated directly or indirectly by PPARalpha. It is likely that the carcinogenic properties of peroxisome proliferators are due to the PPARalpha-dependent changes in levels of cell cycle regulatory proteins.

[0083] Another study on rodents (Keller et al., Biochim Biophys Acta 1102(2):237-244 (1992)) showed that Wy-14643 was capable of uncoupling oxidative phosphorylation in rat liver mitochondria. Rates of urea synthesis from ammonia and bile flow, two energy-dependent processes, were reduced, indicating that the energy supply for these processes was disrupted as a result of cellular exposure to the toxin. Wy-14643 has also been shown to activate nuclear factor kappaB, NADPH oxidase and superoxide production in Kupffer cells (Rusyn et al., Cancer Res 60(17):4798-4803 (2000)). NADPH oxidase is known to induce mitogens, which cause proliferation of liver cells.

[0084] Chloroform (CHCl₃) is an obsolete anesthetic that was abandoned due to its hepatotoxicity. The pathogenesis of acute CHCl₃-induced hepatotoxicity follows a well-characterized course in humans and experimental animals resulting in centrilobular necrosis and steatosis, followed by hepatic regeneration and tissue repair. Severity of the hepatocellular injury is dose-dependent and may be affected by the animal species, strain, age, gender, diet, vehicle and/or route of administration (Lilly et al. (1997) Fund Appl Toxicol 40:101-110 and Raymond et al. (1997) J Toxicol Environ Health 52:463-476).

[0085] Differences in susceptibility to CHCl₃ toxicity are considered related to differential metabolism. CHCl₃-induced hepatotoxicity is primarily mediated by formation of reactive species, such as phosgene and trichloromethyl free radicals, by cytochrome P450 enzymes (CYP2E1). CHCl₃ hepatotoxicity is also increased by exposure to agents that induce cytochrome P450 (i.e., ethanol, phenobarbital), and deplete hepatic glutathione (GSH). Formation of the free radicals leads to membrane lipid peroxidation and protein denaturation resulting in hepatocellular damage or death.

[0086] Chronic administration of CHCl₃ to rodents induces an increased incidence of hepatic and renal carcinomas by a nongenotoxic-cytotoxic mode of action. Carcinogenicity of CHCl₃ is considered secondary to chemically-induced cytotoxicity with subsequent compensatory cell proliferation, rather than to direct interaction of CHCl₃ or its metabolites with DNA.

[0087] The onset of hepatic toxicity is rapid following acute administration of CHCl₃ to male rats. Morphologic studies have shown cytoplasmic accumulation of lipids in hepatocytes within 1 to 3 hours of dosing, and by 5 to 6 hours, focal necrosis and hydropic swelling of hepatocytes are evident. Centrilobular necrosis and inflammatory infiltration peak by 24 to 48 hours post dose. The onset of recovery is also evident within this time frame by increased DNA synthesis and the appearance of mitotic figures. Removal of necrotic debris begins by 48 hours and is usually completed by one week, with full restoration of the liver by 14 days.

[0088] In studies on rats and mice, significant changes in clinical parameters included increased levels of BUN and serum creatinine and decreased levels of phosphatidyl-ethanolamine and tissue glutathione (GSH). There is a strong correlation between the formation of the phospholipid adducts, GSH depletion and liver toxicity (Di Consiglio et al. (2001) Toxicology 159(1-2):43-53). Experiments on mice have shown that exposure to chloroform also increases the liver weight:body weight ratio and the proliferating cell Nuclear antigen-labeling index. Decreased levels of 5-methylcytosine and of the methylated c-myc gene (associated with increased carcinogenic activity) were also found (Coffin et al. (2000) Toxicol Sci 58(2):243-252). Other studies on mice have noted that elevated levels of the P450 cytochromes, such as P450 2E1 and CYP2A5, are involved in cytotoxic metabolic conversions (Constan et al. (1999) Toxicol Appl Pharmacol 160(2):120-126; Camus-Randon et al. (1996) Toxicol Appl Pharmacol 138(1):140-148).

[0089] Studies of chloroform poisoning in humans have noted hepatocellular necrosis characterized by decreased levels of serum biomarkers (AST, ALT, alkaline phosphatase and lactate dehydrogenase) and increased levels of markers of hepatocellular regeneration (alpha-fetoprotein, retinol-binding protein, gamma-glutamyl transferase and des-gamma-carboxyprothrombin) (Horn et al. (1999) Am J Clin Pathol 112(3):351-357).

[0090] At the molecular level, CHCl₃-induced changes in mRNA levels of 2 known genes, MUSTI21(a mouse primary response gene induced by growth factors and tumor promoters) and MUSMRNAH (a gene highly homologous to a gene isolated from a prostate carcinoma cell line), and 2 novel genes (MUSFRA and MUSFRB) have been identified by differential display in regenerating mouse liver (Kegelmeyer et al. (1997) Molecul Carcin 20:288-297). These genes have been postulated to play a role in hepatic regeneration or possibly CHCl₃-induced hepatocarcinogenesis.

[0091] Thioacetamide's only significant commercial use is as a replacement for hydrogen sulfide in qualitative analyses (IARC, Vol. 7, 1974). It has also been used as a fungicide, an organic solvent in the leather, textile and paper industries, as an accelerator in the vulcanization of buna rubber, and as a stabilizer of motor fuel. The primary routes of human exposure are inhalation and skin contact with products in which thioacetamide was used as a solvent (9th Report on Carcinogens, U.S. Dept. of Health and Human Services, Public Health Service, National Toxicology Program, http://ehp.niehs.nih.gov/roc/toc9.html). Thioacetamide is metabolized to a nonionic electrophile, leading to oxidative stress and other injurious events; both cytochrome P4502E1 and the flavin-containing monooxygenase system have been implicated in this bioactivation (R. Snyder & L. S. Andrews, Toxic Effects of Solvents and Vapors, in Casarett & Doull's Toxicology: The Basic Science of Poisons, Klaasen, ed., p. 737, McGraw-Hill, New York, 1996; Smith et al. (1983) Toxicol Appl Pharmacol 70:467-479; Jurima-Romet et al. (1993) Biochem Pharmacol 14:46(12):2163-2170).

[0092] In exposed rats, thioacetamide was shown to accumulate in the liver and kidney, resulting in elevated levels of serum total bilirubin, aspartate aminotransferase, alanine aminotransferase, BUN, creatinine and TNFα. Impaired clearance of the toxin and increased secretion of TNFα are related to the progression of toxic effects in the liver and kidney (Nakatani et al. (2001) Liver 21(1):64-70). Additional histological changes in kidney tissue include glomerular tuft collapse and interstitial haemorrhage (Caballero et al. (2001) Gut 48(1):34-40).

[0093] In the liver, low acute doses of thioacetamide induce apoptosis, while high acute doses induce necrosis (Casarett & Doull's Toxicology, supra). Long term exposure induces cirrhosis and tumors (Risteli et al. (1976) Biochem J 158:361-367). The acute liver injury is characterized by severe perivenous necrosis, immediately followed by hepatocellular regeneration and this necrosis. Nitric oxide synthase activity and nitric oxide release are thought to play a role in the pathophysiological mechanisms that trigger liver regeneration following thioacetamide exposure (Ala-Kokko et al. (1987) Biochem J 244:75-79). Exposure to thioacetamide also decreases levels of antioxidants, such as SOD, glutathione peroxidase and uric acid. It also increases apoptosis, along with caspase-3 activity, and has been observed to affect hepatic nitrogen metabolism. Rates of urea production and excretion were decreased, as well as glutamate dehydrogenase activity and glutamine synthetase activity. Mitogenic activity and DNA synthesis, however, were observed to increase (Abul et al. (2002) Anat Histo Embryol 31(2):66-71; Hayami et al. (1999) Biochem Pharmacol 58(12):1941-1943; Masumi et al. (1999) Toxicology 135(1):21-31; Maier et al. (1991) Arch Toxicol 65(6):454-464).

[0094] Captopril is an angiotensin-converting enzyme (ACE) inhibitor and antioxidant used to treat heart failure and hypertension. It has been associated with cholestasis, as well as with idiosyncratic hepatotoxicity. This pathology may be caused by the formation of reactive metabolites by cytochrome P450 isozymes, which can then cause direct or immune-mediated toxicity. Cytotoxic effects may also be produced, however, independently of cytochrome P450 metabolism. The metabolism of captopril involves endogenous thiols which may be depleted at high doses. One study in mice has shown that, following intraperitoneal administration of captopril, dose-dependent depletion of hepatic glutathione, increased serum transaminase (SGPT) levels and hepatic necrosis were observed. The hepatic necrosis observed was either subcapsular or parenchymal in distribution (Jurima-Romet et al. (1993) Biochem Pharmacol 46(12):2163-2170; Helliwell et al. (1985) Br J Exp Pathol 66(1):67-78).

[0095] DEN (diethylnitrosamine) is a nitrosamine derivative with alkylating, carcinogenic, and mutagenic properties. It is well recognized as causing hepatic carcinomas (Bodake et al. (2002) Indian J Exp Biol 40(3):245-251).

[0096] The cytotoxic properties of dopamine, a catecholamine which oxidizes fairly readily in vivo, arise from its oxidation products. Oxidation by monoamine oxidases yields H₂O₂, a cytotoxic metabolite, while oxidation by metal ions produces highly reactive quinones and oxygen anion radicals. Abnormal dopamine storage and release may cause mitochondrial damage and may decrease the mitochondrial reductive capacity in cells. Dopamine oxidation products have also been shown to produce mitochondrial swelling and an increase in the mitochondrial membrane potential (Boada et al. (2000) Biochem Biophys Res Comm 268(3):916-920).

[0097] Phenacetin, an analgesic used to treat headache and joint pain, is now banned in the U.S. because of links to anemia and kidney disease (http://ask.elibrary.com). In the liver, phenacetin has been shown to produce tumors and centrilobular necrosis, although it is probably not genotoxic (Nakanishi et al. (1982) Int J Cancer 29(4):439-444; Calder et al. (1981) Pathology 13(4):757-762; De Flora et al. (1985) Toxicol Environ Health 16(3-4): 355-377).

[0098] Sodium chloride, when present at excessive levels in the liver, may increase levels of bile salts and cause obstructive jaundice and cytoxicity (Morgan et al. (1998) Ren Fail 20(3):441-450).

Toxicity Identification, Prediction and Modeling

[0099] The genes and gene expression information, as well as the portfolios and subsets of the genes provided in Tables 1-5MMMMM may be used to predict or identify at least one toxic effect, including the hepatotoxicity of a test or unknown compound. As used, herein, at least one toxic effect includes, but is not limited to, a detrimental change in the physiological status of a cell or organism. The response may be, but is not required to be, associated with a particular pathology, such as tissue necrosis. Accordingly, the toxic effect includes effects at the molecular and cellular level. Hepatotoxicity is an effect as used herein and includes, but is not limited to, genotoxic and non-genotoxic carcinogenesis, cholestasis, hepatitis, liver enlargement, inflammation, necrosis, necrosis with steatosis, peroxisome proliferation, steatosis, and steatosis with hepatitis. In addition, hepatoxicity includes the effect of direct-acting agents (such as metformin, rosiglitazone and dexamethasone), which are pharmaceuticals that act in the liver, but are not considered overtly toxic to the human liver. Exposure to these agents results in altered gene expression profiles. As used herein, a gene expression profile comprises any quantitative representation of the expression of at least one mRNA species in a cell sample or population and includes profiles made by various methods such as differential display, PCR, hybridization analysis, etc.

[0100] As used herein, a “general toxicity model” refers to a model that is not limited to a specific pathology or mechanism. This category classifies compounds by their ability to induce toxicity in one or more species, including humans. Compounds that only cause toxicity in the rat are excluded by this definition.

[0101] As used herein, a “necrosis model” refers to a model based on pathology observed in multiple species defined by general cell death via non-energy dependent swelling. See Spraycar, M., ed. Stedman's Medical Dictionary. 26 ed. 1995, Williams & Wilkins: Baltimore.

[0102] As used herein, a “steatosis model,” also referred to as an “adiposis model,” is defined by the accumulation of fat in cell vacuoles as observed in multiple species.

[0103] As used herein, a “macrovesicular steatosis model” is a form of general steatosis (see above), defined by fatty cells that each contain one (or very few) large vesicle that displaces the nucleus as observed in multiple species.

[0104] As used herein, a “microvesicular steatosis model” is a form of general steatosis (see above), defined by fatty cells that each contain numerous small vesicles that do not displace the nucleus as observed in multiple species.

[0105] As used herein, a “cholestasis model” refers to a pathology that results from an impairment in bile flow as observed in multiple species. See Cotran, R. S., V. Kumar, and T. Collins, eds. Pathologic Basis of Disease. 6 ed. 1999, W. B. Saunders Company: Philadelphia.

[0106] As used herein, a “hepatitis model” refers to injury to the liver associated with an influx of acute or chronic inflammatory cells. The pathology is difficult to identify in rats, but is well documented and easily identified in mice and humans. See Fromenty, B., A. Berson, and D. Pessayre, Microvesicular steatosis and steatohepatitis: role of mitochondrial dysfunction and lipid peroxidation. J Hepatol, 1997. 26 Suppl 1: p. 13-22.

[0107] As used herein, a “carcinogenicity model” refers to the capability for induction of tumors in humans or animal models.

[0108] As used herein, a “genotoxic carcinogenicity model” refers to a mechanism by which compounds damage DNA and initiate a cascade of events that lead to tumor formation as observed in multiple species.

[0109] As used herein, a “non-genotoxic carcinogenicity model” refers to a mechanism by which compounds cause tumor formation in the absence of DNA damage as observed in multiple species.

[0110] As used herein, a “rat-specific non-genotoxic carcinogenicity model” refers to a mechanism by which compounds cause tumor formation in the absence of DNA damage. In this case, there is a subset of compounds that only cause this type of tumor formation in a rodent.

[0111] As used herein, a “peroxisome proliferation model” refers to a pathology or mechanism evidenced by an increase in the number of peroxisomes within cells. Humans are refractory to the development of this phenotype.

[0112] As used herein, an “inducer/liver enlargement model” refers to a pathology evidenced by an increase in liver size in general. The liver can increase in size due to either hypertrophy, an increase in size of the cells, or hyperplasia, an increase in cell number as observed in multiple species.

[0113] As used herein, a “human-specific model” refers not to a specific pathology or mechanism, but rather classifies compounds by their absence of toxicity in animal models, but presence of adverse events in human patients

[0114] In general, assays to predict the toxicity or hepatotoxicity of a test agent (or compound or multi-component composition) comprise the steps of exposing a cell population to the test compound, assaying or measuring the level of relative or absolute gene expression of one or more of the genes in Tables 5A-5MMMMM and comparing the identified expression level(s) to the expression levels disclosed in the Tables and database(s) disclosed herein. Assays may include the measurement of the expression levels of about 2, 3, 4, 5, 6, 7, 8, 9, 10, 15, 20, 25, 30, 50, 75, 100, 200, 300, 400, 500, 1000 or more genes from Tables 5A-5MMMMM to create multi-gene expression profiles. In some embodiments, all or substantially all of the genes of Tables 5A-5MMMMM may be used to predict toxicity, etc. In other embodiments, the genes or subsets of the genes for each individual toxin model, for instance, the genes of Table 5A, may be used. An “adequate amount” of the data of Tables 5A-5MMMMM refers to an amount of information that allows toxicity identification or prediction (typically 2 or more genes). “Substantially” or nearly all of the data in the tables refers to at least about 80% of the data for an individual model.

[0115] In the methods of the invention, the gene expression level for a gene or genes induced by the test agent, compound or compositions may be comparable to the levels found in the Tables or databases disclosed herein if the expression level varies within a factor of about 2, about 1.5 or about 1.0 fold. In some cases, the expression levels are comparable if the agent induces a change in the expression of a gene in the same direction (e.g., up or down) as a reference toxin. “Comparing” may comprise determining the relationship of the database information to the sample gene expression profile with or without application of an algorithm to the results, differences or similarities between the two.

[0116] The cell population that is exposed to the test agent, compound or composition may be exposed in vitro or in vivo. For instance, cultured or freshly isolated hepatocytes, in particular rat hepatocytes, may be exposed to the agent under standard laboratory and cell culture conditions. In another assay format, in vivo exposure may be accomplished by administration of the agent to a living animal, for instance a laboratory rat.

[0117] Cultured or freshly isolated hepatocytes may be prepared by any method known in the art. Cells may be cultured or not. For instance, freshly isolated hepatocytes may be seeded into Matrigel™ coated flasks or wells, allowed to acclimate and then exposed to a test agent, compound or composition.

[0118] Procedures for designing and conducting toxicity tests in in vitro and in vivo systems are well known, and are described in many texts on the subject, such as Loomis et al., Loomis's Esstentials of Toxicology 4th Ed., Academic Press, New York, 1996; Echobichon, The Basics of Toxicity Testing, CRC Press, Boca Raton, 1992; Frazier, editor, In Vitro Toxicity Testing, Marcel Dekker, New York, 1992; and the like.

[0119] In in vitro toxicity testing, two groups of test organisms are usually employed: One group serves as a control and the other group receives the test compound in a single dose (for acute toxicity tests) or a regimen of doses (for prolonged or chronic toxicity tests). Because, in some cases, the extraction of tissue as called for in the methods of the invention requires sacrificing the test animal, both the control group and the group receiving compound must be large enough to permit removal of animals for sampling tissues, if it is desired to observe the dynamics of gene expression through the duration of an experiment.

[0120] In setting up a toxicity study, extensive guidance is provided in the literature for selecting the appropriate test organism for the compound being tested, route of administration. dose ranges, and the like. Water, physiological saline (0.9% NaCl in water) or culture medium containing 0.2% DMSO are the solutes of choice for the test compound since these solvents permit administration by a variety of routes. When this is not possible because of solubility limitations, vegetable oils such as corn oil or organic solvents such as propylene glycol may be used.

[0121] Regardless of the route of administration, the volume required to administer a given dose is limited by the size of the animal that is used. It is desirable to keep the volume of each dose uniform within and between groups of animals. When rats or mice are used, the volume administered by the oral route generally should not exceed about 0.005 ml per gram of animal. Even when aqueous or physiological saline solutions are used for parenteral injection the volumes that are tolerated are limited, although such solutions are ordinarily thought of as being innocuous. The intravenous LD₅₀ of distilled water in the mouse is approximately 0.044 ml per gram and that of isotonic saline is 0.068 ml per gram of mouse. In some instances, the route of administration to the test animal should be the same as, or as similar as possible to, the route of administration of the compound to man for therapeutic purposes.

[0122] When a compound is to be administered by inhalation, special techniques for generating test atmospheres are necessary. The methods usually involve aerosolization or nebulization of fluids containing the compound. If the agent to be tested is a fluid that has an appreciable vapor pressure, it may be administered by passing air through the solution under controlled temperature conditions. Under these conditions, dose is estimated from the volume of air inhaled per unit time, the temperature of the solution, and the vapor pressure of the agent involved. Gases are metered from reservoirs. When particles of a solution are to be administered, unless the particle size is less than about 2 μm the particles will not reach the terminal alveolar sacs in the lungs. A variety of apparatuses and chambers are available to perform studies for detecting effects of irritant or other toxic endpoints when they are administered by inhalation. The preferred method of administering an agent to animals is via the oral route, either by intubation or by incorporating the agent in the feed.

[0123] When the agent is exposed to cells in vitro or in cell culture, the cell population to be exposed to the agent may be divided into two or more subpopulations, for instance, by dividing the population into two or more identical aliquots. In some preferred embodiments of the methods of the invention, the cells to be exposed to the agent are derived from liver tissue. For instance, cultured or freshly isolated rat hepatocytes may be used.

[0124] The methods of the invention may be used generally to predict at least one toxic response, and, as described in the Examples, may be used to predict the likelihood that a compound or test agent will induce various specific liver pathologies, such as genotoxic and non-genotoxic carcinogenesis, cholestasis, direct action toxicity, hepatitis, liver enlargement, inflammation, necrosis, necrosis with steatosis, peroxisome proliferation, steatosis, steatosis with hepatitis, or other pathologies associated with at least one of the toxins herein described. The methods of the invention may also be used to determine the similarity of a toxic response to one or more individual compounds. In addition, the methods of the invention may be used to predict or elucidate the potential cellular pathways influenced, induced or modulated by the compound or test agent due to the similarity of the expression profile compared to the profile induced by a known toxin (see the tables listed in the column “Model Code” in Table 2). Further, the link between a specific liver pathology that is the result of exposure to a toxin and a specific gene expression profile allows for distinction of the genes in Tables 5A-5MMMMM as markers of liver toxicity.

Diagnostic Uses for the Toxicity Markers

[0125] As described above, the genes and gene expression information or portfolios of the genes with their expression information as provided in Tables 5A-5MMMMM may be used as diagnostic markers for the prediction or identification of the physiological state of tissue or cell sample that has been exposed to a compound or to identify or predict the toxic effects of a compound or agent. For instance, a tissue sample such as a sample of peripheral blood cells or some other easily obtainable tissue sample may be assayed by any of the methods described above, and the expression levels from a gene or genes from Tables 5A-5MMMMM may be compared to the expression levels found in tissues or cells exposed to the toxins described herein. These methods may result in the diagnosis of a physiological state in the cell or may be used to identify the potential toxicity of a compound, for instance a new or unknown compound or agent. The comparison of expression data, as well as available sequence or other information may be done by researcher or diagnostician or may be done with the aid of a computer and databases as described below.

[0126] In another format, the levels of a gene(s) of Tables 5A-5MMMMM, its encoded protein(s), or any metabolite produced by the encoded protein may be monitored or detected in a sample, such as a bodily tissue or fluid sample to identify or diagnose a physiological state of an organism. Such samples may include any tissue or fluid sample, including urine, blood and easily obtainable cells such as peripheral lymphocytes.

Use of the Markers for Monitoring Toxicity Progression

[0127] As described above, the genes and gene expression information provided in Tables 5A-5MMMMM may also be used as markers for the monitoring of toxicity progression, such as that found after initial exposure to a drug, drug candidate, toxin, pollutant, etc. For instance, a tissue or cell sample may be assayed by any of the methods described above, and the expression levels from a gene or genes from Tables 5A-5MMMMM may be compared to the expression levels found in tissue or cells exposed to the hepatotoxins described herein. The comparison of the expression data, as well as available sequence or other information may be done by researcher or diagnostician or may be done with the aid of a computer and databases.

Use of the Toxicity Markers for Drug Screening

[0128] According to the present invention, the genes identified in Tables 5A-5MMMMM may be used as markers or drug targets to evaluate the effects of a candidate drug, chemical compound or other agent on a cell or tissue sample. The genes may also be used as drug targets to screen for agents that modulate their expression and/or activity. In various formats, a candidate drug or agent can be screened for the ability to simulate the transcription or expression of a given marker or markers or to down-regulate or counteract the transcription or expression of a marker or markers. According to the present invention, one can also compare the specificity of a drug's effects by looking at the number of markers which the drug induces and comparing them. More specific drugs will have less transcriptional targets. Similar sets of markers identified for two drugs may indicate a similarity of effects. As used herein, an agent is said to modulate the expression of a nucleic acid of the invention if it is capable of up- or down-regulating expression of the nucleic acid in a cell.

[0129] Assays to monitor the expression of a marker or markers as defined in Tables 5A-5MMMMM may utilize any available means of monitoring for changes in the expression level of the nucleic acids of the invention.

[0130] In one assay format, microarrays containing probes to one, two or more genes from Tables 5A-5MMMMM may be used to directly monitor or detect changes in gene expression in the treated or exposed cell. Cell lines, tissues or other samples are first exposed to a test agent and in some instances, a known toxin, and the detected expression levels of one or more, or preferably 2 or more of the genes of Tables 5A-5MMMMM are compared to the expression levels of those same genes exposed to a known toxin alone. Compounds that modulate the expression patterns of the known toxin(s) would be expected to modulate potential toxic physiological effects in vivo. The genes in Tables 5A-5MMMMM are particularly appropriate marks in these assays as they are differentially expressed in cells upon exposure to a known hepatotoxin.

[0131] In another format, cell lines that contain reporter gene fusions between the open reading frame and/or the transcriptional regulatory regions of a gene in Tables 5A-5MMMMM and any assayable fusion partner may be prepared. Numerous assayable fusion partners are known and readily available including the firefly luciferase gene and the gene encoding chloramphenicol acetyltransferase (Alam et al., Anal Biochem 188:245-254 (1990)). Cell lines containing the reporter gene fusions are then exposed to the agent to be tested under appropriate conditions and time. Differential expression of the reporter gene between samples exposed to the agent and control samples identifies agents which modulate the expression of the nucleic acid.

[0132] Additional assay formats may be used to monitor the ability of the agent to modulate the expression of a gene identified in Tables 5A-5MMMMM. For instance, as described above, mRNA expression may be monitored directly by hybridization of probes to the nucleic acids of the invention. Cell lines are exposed to the agent to be tested under appropriate conditions and time and total RNA or mRNA is isolated by standard procedures such those disclosed in Sambrook et al. (Molecular Cloning: A Laboratory Manual, 3d Ed., Cold Spring Harbor Laboratory Press, Cold Spring Harbor, N.Y., 2001).

[0133] In another assay format, cells or cell lines are first identified which express the gene products of the invention physiologically. Cell and/or cell lines so identified would be expected to comprise the necessary cellular machinery such that the fidelity of modulation of the transcriptional apparatus is maintained with regard to exogenous contact of agent with appropriate surface transduction mechanisms and/or the cytosolic cascades. Further, such cells or cell lines may be transduced or transfected with an expression vehicle (e.g., a plasmid or viral vector) construct comprising an operable non-translated 5′-promoter containing end of the structural gene encoding the gene products of Tables 5A-5MMMMM fused to one or more antigenic fragments or other detectable markers, which are peculiar to the instant gene products, wherein said fragments are under the transcriptional control of said promoter and are expressed as polypeptides whose molecular weight can be distinguished from the naturally occurring polypeptides or may further comprise an immunologically distinct or other detectable tag. Such a process is well known in the art (see Sambrook et al., supra).

[0134] Cells or cell lines transduced or transfected as outlined above are then contacted with agents under appropriate conditions; for example, the agent comprises a pharmaceutically acceptable excipient and is contacted with cells comprised in an aqueous physiological buffer such as phosphate buffered saline (PBS) at physiological pH, Eagles balanced salt solution (BSS) at physiological pH, PBS or BSS comprising serum or conditioned media comprising PBS or BSS and/or serum incubated at 37° C. Said conditions may be modulated as deemed necessary by one of skill in the art. Subsequent to contacting the cells with the agent, said cells are disrupted and the polypeptides of the lysate are fractionated such that a polypeptide fraction is pooled and contacted with an antibody to be further processed by immunological assay (e.g., ELISA, immunoprecipitation or Western blot). The pool of proteins isolated from the agent-contacted sample is then compared with the control samples (no exposure and exposure to a known toxin) where only the excipient is contacted with the cells and an increase or decrease in the immunologically generated signal from the agent-contacted sample compared to the control is used to distinguish the effectiveness and/or toxic effects of the agent.

[0135] Another embodiment of the present invention provides methods for identifying agents that modulate at least one activity of a protein(s) encoded by the genes in Tables 5A-5MMMMM. Such methods or assays may utilize any means of monitoring or detecting the desired activity.

[0136] In one format, the relative amounts of a protein (Tables 5A-5MMMMM) between a cell population that has been exposed to the agent to be tested compared to an un-exposed control cell population and a cell population exposed to a known toxin may be assayed. In this format, probes such as specific antibodies are used to monitor the differential expression of the protein in the different cell populations. Cell lines or populations are exposed to the agent to be tested under appropriate conditions and time. Cellular lysates may be prepared from the exposed cell line or population and a control, unexposed cell line or population. The cellular lysates are then analyzed with the probe, such as a specific antibody.

[0137] Agents that are assayed in the above methods can be randomly selected or rationally selected or designed. As used herein, an agent is said to be randomly selected when the agent is chosen randomly without considering the specific sequences involved in the association of the a protein of the invention alone or with its associated substrates, binding partners, etc. An example of randomly selected agents is the use a chemical library or a peptide combinatorial library, or a growth broth of an organism.

[0138] As used herein, an agent is said to be rationally selected or designed when the agent is chosen on a nonrandom basis which takes into account the sequence of the target site and/or its conformation in connection with the agent's action. Agents can be rationally selected or rationally designed by utilizing the peptide sequences that make up these sites. For example, a rationally selected peptide agent can be a peptide whose amino acid sequence is identical to or a derivative of any functional consensus site.

[0139] The agents of the present invention can be, as examples, peptides, small molecules, vitamin derivatives, as well as carbohydrates. Dominant negative proteins, DNAs encoding these proteins, antibodies to these proteins, peptide fragments of these proteins or mimics of these proteins may be introduced into cells to affect function. “Mimic” used herein refers to the modification of a region or several regions of a peptide molecule to provide a structure chemically different from the parent peptide but topographically and functionally similar to the parent peptide (see G. A. Grant in: Molecular Biology and Biotechnology, Meyers, ed., pp. 659-664, VCH Publishers, New York, 1995). A skilled artisan can readily recognize that there is no limit as to the structural nature of the agents of the present invention.

Nucleic Acid Assay Formats

[0140] The genes identified as being differentially expressed upon exposure to a known hepatotoxin (Tables 5A-5MMMMM) may be used in a variety of nucleic acid detection assays to detect or quantititate the expression level of a gene or multiple genes in a given sample. The genes described in Tables 5A-5MMMMM may also be used in combination with one or more additional genes whose differential expression is associate with toxicity in a cell or tissue. In preferred embodiments, the genes in Tables 5A-5MMMMM may be combined with one or more of the genes described in related U.S. application Ser. No. 10/357,507, filed Apr. 4, 2003, which is incorporated by reference on page 1 of this application.

[0141] Any assay format to detect gene expression may be used. For example, traditional Northern blotting, dot or slot blot, nuclease protection, primer directed amplification, RT-PCR, semi- or quantitative PCR, branched-chain DNA, quantitative nuclease protection assay (High Throughput Genomics, Inc., Tucson, Ariz.) and differential display methods may be used for detecting gene expression levels. Those methods are useful for some embodiments of the invention. In cases where smaller numbers of genes are detected, amplification based assays may be most efficient. Methods and assays of the invention, however, may be most efficiently designed with hybridization-based methods for detecting the expression of a large number of genes.

[0142] Any hybridization assay format may be used, including solution-based and solid support-based assay formats. Solid supports containing oligonucleotide probes for differentially expressed genes of the invention can be filters, polyvinyl chloride dishes, particles, beads, microparticles or silicon or glass based chips, etc. Such chips, wafers and hybridization methods are widely available, for example, those disclosed by Beattie (WO 95/11755).

[0143] Any solid surface to which oligonucleotides can be bound, either directly or indirectly, either covalently or non-covalently, can be used. A preferred solid support is a high density array or DNA chip or a set of beads. These contain a particular oligonucleotide probe in a predetermined location on the array or on an individual bead. Each predetermined location may contain more than one molecule of the probe, but each molecule within the predetermined location has an identical sequence. Such predetermined locations are termed features. There may be, for example, from 2, 10, 100, 1000 to 10,000, 100,000 or 400,000 or more of such features on a single solid support. The solid support, or the area within which the probes are attached may be on the order of about a square centimeter. Probes corresponding to the genes of Tables 5A-5MMMMM or from the related applications described above may be attached to single or multiple solid support structures, e.g., the probes may be attached to a single chip or to multiple chips to comprise a chip set.

[0144] Oligonucleotide probe arrays for expression monitoring can be made and used according to any techniques known in the art (see for example, Lockhart et al., Nat Biotechnol 14:1675-1680 (1996); McGall et al., Proc Nat Acad Sci USA 93:13555-13460 (1996)). Such probe arrays may contain at least two or more oligonucleotides that are complementary to or hybridize to two or more of the genes described in Tables 5A-5MMMMM. For instance, such arrays may contain oligonucleotides that are complementary or hybridize to at least about 2, 3, 4, 5, 6, 7, 8, 9, 10, 20, 30, 50, 70, 100, 200, 500 or 1,000 or more the genes described herein (assays or methods of the invention may also assay the expression levels for these same numbers of genes/proteins). Preferred arrays contain all or nearly all of the genes listed in Tables 5A-5MMMMM, or individually, the gene sets of Tables 5A-5MMMMM. In a preferred embodiment, arrays are constructed that contain oligonucleotides to detect all or nearly all of the genes in any one of or all of Tables 5A-5MMMMM on a single solid support substrate, such as a chip.

[0145] The sequences of the expression marker genes of Tables 5A-5MMMMM are in the public databases. Table 1 provides the GenBank Accession Number, SEQ ID NO: and GLGC ID No. (Gene Logic reference no.) for each of the sequences (see www.ncbi.nlm.nih.gov/), while Table 3 provides identification information for the human homologues of the genes of Tables 1 and 5A-5MMMMM. Table 2 identifies the metabolic pathways in which the genes of Tables 1 and 5A-5MMMMM are believed to function. Table 4 defines the model codes used in Tables 1, 2, 3 and 5A-5MMMMM. The sequences of the genes in GenBank are expressly herein incorporated by reference in their entirety as of the filing date of this application, as are related sequences, for instance, sequences from the same gene of different lengths, variant sequences, polymorphic sequences, the encoded amino acid sequences, genomic sequences of the genes and related sequences from different species, including the human counterparts, where appropriate. These sequences may be used in the methods of the invention or may be used to produce the probes and arrays of the invention. In some embodiments, the genes in Tables 5A-5MMMMM that correspond to the genes or fragments previously associated with a toxic response may be excluded from the Tables.

[0146] As described above, in addition to the sequences of the GenBank Accession Nos. and GLGC ID Nos. disclosed in the Tables 5A-5MMMMM, sequences such as naturally occurring variant or polymorphic sequences may be used in the methods and compositions of the invention. For instance, expression levels of various allelic or homologous forms of a gene disclosed in the Tables 5A-5MMMMM may be assayed. Any and all nucleotide variations that do not alter the functional activity of a gene listed in the Tables 5A-5MMMMM, including all naturally occurring allelic variants of the genes herein disclosed, may be used in the methods and to make the compositions (e.g., arrays) of the invention.

[0147] Probes based on the sequences of the genes described above may be prepared by any commonly available method. Oligonucleotide probes for screening or assaying a tissue or cell sample are preferably of sufficient length to specifically hybridize only to appropriate, complementary genes or transcripts. Typically the oligonucleotide probes will be at least about 10, 12, 14, 16, 18, 20 or 25 nucleotides in length. In some cases, longer probes of at least 30, 40, or 50 nucleotides will be desirable.

[0148] As used herein, oligonucleotide sequences that are complementary to one or more of the genes described in Tables 5A-5MMMMM refer to oligonucleotides that are capable of hybridizing under stringent conditions to at least part of the nucleotide sequences of said genes. Such hybridizable oligonucleotides will typically exhibit at least about 75% sequence identity at the nucleotide level to said genes, preferably about 80% or 85% sequence identity or more preferably about 90% or 95% or more sequence identity to said genes.

[0149] “Bind(s) substantially” refers to complementary hybridization between a probe nucleic acid and a target nucleic acid and embraces minor mismatches that can be accommodated by reducing the stringency of the hybridization media to achieve the desired detection of the target polynucleotide sequence.

[0150] The terms “background” or “background signal intensity” refer to hybridization signals resulting from non-specific binding, or other interactions, between the labeled target nucleic acids and components of the oligonucleotide array (e.g., the oligonucleotide probes, control probes, the array substrate, etc.). Background signals may also be produced by intrinsic fluorescence of the array components themselves. A single background signal can be calculated for the entire array, or a different background signal may be calculated for each target nucleic acid. In a preferred embodiment, background is calculated as the average hybridization signal intensity for the lowest 5% to 10% of the probes in the array, or, where a different background signal is calculated for each target gene, for the lowest 5% to 10% of the probes for each gene. Of course, one of skill in the art will appreciate that where the probes to a particular gene hybridize well and thus appear to be specifically binding to a target sequence, they should not be used in a background signal calculation. Alternatively, background may be calculated as the average hybridization signal intensity produced by hybridization to probes that are not complementary to any sequence found in the sample (e.g. probes directed to nucleic acids of the opposite sense or to genes not found in the sample such as bacterial genes where the sample is mammalian nucleic acids). Background can also be calculated as the average signal intensity produced by regions of the array that lack any probes at all.

[0151] The phrase “hybridizing specifically to” refers to the binding, duplexing, or hybridizing of a molecule substantially to or only to a particular nucleotide sequence or sequences under stringent conditions when that sequence is present in a complex mixture (e.g., total cellular) DNA or RNA.

[0152] Assays and methods of the invention may utilize available formats to simultaneously screen at least about 100, about 1000, about 10,000 or about 1,000,000 different nucleic acid hybridizations.

[0153] As used herein a “probe” is defined as a nucleic acid, capable of binding to a target nucleic acid of complementary sequence through one or more types of chemical bonds, usually through complementary base pairing, usually through hydrogen bond formation. As used herein, a probe may include natural (i.e., A, G, U, C, or T) or modified bases (7-deazaguanosine, inosine, etc.). In addition, the bases in probes may be joined by a linkage other than a phosphodiester bond, so long as it does not interfere with hybridization. Thus, probes may be peptide nucleic acids in which the constituent bases are joined by peptide bonds rather than phosphodiester linkages.

[0154] The term “perfect match probe” refers to a probe that has a sequence that is perfectly complementary to a particular target sequence. The test probe is typically perfectly complementary to a portion (subsequence) of the target sequence. The perfect match (PM) probe can be a “test probe”, a “normalization control” probe, an expression level control probe and the like. A perfect match control or perfect match probe is, however, distinguished from a “mismatch control” or “mismatch probe.”

[0155] The terms “mismatch control” or “mismatch probe” refer to a probe whose sequence is deliberately selected not to be perfectly complementary to a particular target sequence. For each mismatch (MM) control in a high-density array there typically exists a corresponding perfect match (PM) probe that is perfectly complementary to the same particular target sequence. The mismatch may comprise one or more bases.

[0156] While the mismatch(s) may be located anywhere in the mismatch probe, terminal mismatches are less desirable as a terminal mismatch is less likely to prevent hybridization of the target sequence. In a particularly preferred embodiment, the mismatch is located at or near the center of the probe such that the mismatch is most likely to destabilize the duplex with the target sequence under the test hybridization conditions.

[0157] The term “stringent conditions” refers to conditions under which a probe will hybridize to its target subsequence, but with only insubstantial hybridization to other sequences or to other sequences such that the difference may be identified. Stringent conditions are sequence-dependent and will be different in different circumstances. Longer sequences hybridize specifically at higher temperatures. Generally, stringent conditions are selected to be about 5° C. lower than the thermal melting point (Tm) for the specific sequence at a defined ionic strength and pH.

[0158] Typically, stringent conditions will be those in which the salt concentration is at least about 0.01 to 1.0 M Na⁺ ion concentration (or other salts) at pH 7.0 to 8.3 and the temperature is at least about 30° C. for short probes (e.g., 10 to 50 nucleotides). Stringent conditions may also be achieved with the addition of destabilizing agents such as formamide.

[0159] The “percentage of sequence identity” or “sequence identity” is determined by comparing two optimally aligned sequences or subsequences over a comparison window or span, wherein the portion of the polynucleotide sequence in the comparison window may optionally comprise additions or deletions (i.e., gaps) as compared to the reference sequence (which does not comprise additions or deletions) for optimal alignment of the two sequences. The percentage is calculated by determining the number of positions at which the identical submit (e.g. nucleic acid base or amino acid residue) occurs in both sequences to yield the number of matched positions, dividing the number of matched positions by the total number of positions in the window of comparison and multiplying the result by 100 to yield the percentage of sequence identity. Percentage sequence identity when calculated using the programs GAP or BESTFIT (see below) is calculated using default gap weights.

Probe Design

[0160] One of skill in the art will appreciate that an enormous number of array designs are suitable for the practice of this invention. An array will typically include a number of test probes that specifically hybridize to the sequences of interest. Probes may be produced from any region of the genes identified in the Tables and the attached representative sequence listing. In instances where the gene reference in the Tables is an EST, probes may be designed from that sequence or from other regions of the corresponding full-length transcript that may be available in any of the sequence databases, such as those herein described. See WO 99/32660 for methods of producing probes for a given gene or genes. In addition, any available software may be used to produce specific probe sequences, including, for instance, software available from Molecular Biology Insights (Cascade, Colo.), Olympus Optical Co. (Japan) and Biosoft International (Palo Alto, Calif.). In a preferred embodiment, the array will also include one or more control probes.

[0161] Arrays of the invention include “test probes.” Test probes may be oligonucleotides that range from about 5 to about 500, or about 7 to about 50 nucleotides, more preferably from about 10 to about 40 nucleotides and most preferably from about 15 to about 35 nucleotides in length. In other particularly preferred embodiments, the probes are 20 or 25 nucleotides in length. In another preferred embodiment, test probes are double or single strand DNA sequences. DNA sequences are isolated or cloned from natural sources or amplified from natural sources using native nucleic acid as templates. These probes have sequences complementary to particular subsequences of the genes whose expression they are designed to detect. Thus, the test probes are capable of specifically hybridizing to the target nucleic acid they are to detect.

[0162] In addition to test probes that bind the target nucleic acid(s) of interest, arrays of the invention can contain a number of control probes. The control probes may fall into three categories referred to herein as 1) normalization controls; 2) expression level controls; and 3) mismatch controls.

[0163] Normalization controls are oligonucleotide or other nucleic acid probes that are complementary to labeled reference oligonucleotides or other nucleic acid sequences that are added to the nucleic acid sample to be screened. The signals obtained from the normalization controls after hybridization provide a control for variations in hybridization conditions, label intensity, “reading” efficiency and other factors that may cause the signal of a perfect hybridization to vary between arrays. In a preferred embodiment, signals (e.g., fluorescence intensity) read from all other probes in the array are divided by the signal (e.g., fluorescence intensity) from the control probes thereby normalizing the measurements.

[0164] Virtually any probe may serve as a normalization control. However, it is recognized that hybridization efficiency varies with base composition and probe length. Preferred normalization probes are selected to reflect the average length of the other probes present in the array, however, they can be selected to cover a range of lengths. The normalization control(s) can also be selected to reflect the (average) base composition of the other probes in the array, however in a preferred embodiment, only one or a few probes are used and they are selected such that they hybridize well (i.e., no secondary structure) and do not match any target-specific probes.

[0165] Expression level controls are probes that hybridize specifically with constitutively expressed genes in the biological sample. Virtually any constitutively expressed gene provides a suitable target for expression level controls. Typically expression level control probes have sequences complementary to subsequences of constitutively expressed “housekeeping genes” including, but not limited to the β-actin gene, the glyceraldehyde-3-phosphate dehydrogenase (GADPH) gene, the transferrin receptor gene and the like.

[0166] Mismatch controls may also be provided for the probes to the target genes, for expression level controls or for normalization controls. Mismatch controls are oligonucleotide probes or other nucleic acid probes identical to their corresponding test or control probes except for the presence of one or more mismatched bases. A mismatched base is a base selected so that it is not complementary to the corresponding base in the target sequence to which the probe would otherwise specifically hybridize. One or more mismatches are selected such that under appropriate hybridization conditions (e.g., stringent conditions) the test or control probe would be expected to hybridize with its target sequence, but the mismatch probe would not hybridize (or would hybridize to a significantly lesser extent) Preferred mismatch probes contain a central mismatch. Thus, for example, where a probe is a 20 mer, a corresponding mismatch probe will have the identical sequence except for a single base mismatch (e.g., substituting a G, a C or a T for an A) at any of positions 6 through 14 (the central mismatch).

[0167] Mismatch probes thus provide a control for non-specific binding or cross hybridization to a nucleic acid in the sample other than the target to which the probe is directed. For example, if the target is present the perfect match probes should be consistently brighter than the mismatch probes. In addition, if all central mismatches are present, the mismatch probes can be used to detect a mutation, for instance, a mutation of a gene in the accompanying Tables 5A-5MMMMM. The difference in intensity between the perfect match and the mismatch probe provides a good measure of the concentration of the hybridized material.

Nucleic Acid Samples

[0168] Cell or tissue samples may be exposed to the test agent in vitro or in vivo. When cultured cells or tissues are used, appropriate mammalian liver extracts may also be added with the test agent to evaluate agents that may require biotransformation to exhibit toxicity. In a preferred format, primary isolates of animal or human hepatocytes which already express the appropriate complement of drug-metabolizing enzymes may be exposed to the test agent without the addition of mammalian liver extracts.

[0169] The genes which are assayed according to the present invention are typically in the form of mRNA or reverse transcribed mRNA. The genes may be cloned or not. The genes may be amplified or not. The cloning and/or amplification do not appear to bias the representation of genes within a population. In some assays, it may be preferable, however, to use polyA+RNA as a source, as it can be used with less processing steps.

[0170] As is apparent to one of ordinary skill in the art, nucleic acid samples used in the methods and assays of the invention may be prepared by any available method or process. Methods of isolating total mRNA are well known to those of skill in the art. For example, methods of isolation and purification of nucleic acids are described in detail in Chapter 3 of Laboratory Techniques in Biochemistry and Molecular Biology Vol. 24, Hybridization With Nucleic Acid Probes: Theory and Nucleic Acid Probes, P. Tijssen, Ed., Elsevier Press, New York, 1993. Such samples include RNA samples, but also include cDNA synthesized from a mRNA sample isolated from a cell or tissue of interest. Such samples also include DNA amplified from the cDNA, and cRNA transcribed from the amplified DNA. One of skill in the art would appreciate that it is desirable to inhibit or destroy RNase present in homogenates before homogenates are used.

[0171] Biological samples may be of any biological tissue or fluid or cells from any organism as well as cells raised in vitro, such as cell lines and tissue culture cells. Frequently the sample will be a tissue or cell sample that has been exposed to a compound, agent, drug, pharmaceutical composition, potential environmental pollutant or other composition. In some formats, the sample will be a “clinical sample” which is a sample derived from a patient. Typical clinical samples include, but are not limited to, sputum, blood, blood-cells (e.g., white cells), tissue or fine needle biopsy samples, urine, peritoneal fluid, and pleural fluid, or cells therefrom.

[0172] Biological samples may also include sections of tissues, such as frozen sections or formalin fixed sections taken for histological purposes.

Forming Nucleic Acid Arrays

[0173] Methods of forming high density arrays of oligonucleotides with a minimal number of synthetic steps are known. The oligonucleotide analogue array can be synthesized on a single or on multiple solid substrates by a variety of methods, including, but not limited to, light-directed chemical coupling, and mechanically directed coupling (see Pirrung, U.S. Pat. No. 5,143,854).

[0174] In brief, the light-directed combinatorial synthesis of oligonucleotide arrays on a glass surface proceeds using automated phosphoramidite chemistry and chip masking techniques. In one specific implementation, a glass surface is derivatized with a silane reagent containing a functional group, e.g., a hydroxyl or amine group blocked by a photolabile protecting group. Photolysis through a photolithogaphic mask is used selectively to expose functional groups which are then ready to react with incoming 5′ photoprotected nucleoside phosphoramidites. The phosphoramidites react only with those sites which are illuminated (and thus exposed by removal of the photolabile blocking group). Thus, the phosphoramidites only add to those areas selectively exposed from the preceding step. These steps are repeated until the desired array of sequences have been synthesized on the solid surface. Combinatorial synthesis of different oligonucleotide analogues at different locations on the array is determined by the pattern of illumination during synthesis and the order of addition of coupling reagents.

[0175] In addition to the foregoing, additional methods which can be used to generate an array of oligonucleotides on a single substrate are described in PCT Publication Nos. WO 93/09668 and WO 01/23614. High density nucleic acid arrays can also be fabricated by depositing pre-made or natural nucleic acids in predetermined positions. Synthesized or natural nucleic acids are deposited on specific locations of a substrate by light directed targeting and oligonucleotide directed targeting. Another embodiment uses a dispenser that moves from region to region to deposit nucleic acids in specific spots.

[0176] Other “array” formats may also be used in the methods of the invention. For instance, bead arrays, such as those available from Illumina® (San Diego, Calif.) are commercially available and easily customizable.

Hybridization

[0177] Nucleic acid hybridization simply involves contacting a probe and target nucleic acid under conditions where the probe and its complementary target can form stable hybrid duplexes through complementary base pairing. See WO 99/32660. The nucleic acids that do not form hybrid duplexes are then washed away leaving the hybridized nucleic acids to be detected, typically through detection of an attached detectable label. It is generally recognized that nucleic acids are denatured by increasing the temperature or decreasing the salt concentration of the buffer containing the nucleic acids. Under low stringency conditions (e.g., low temperature and/or high salt) hybrid duplexes (e.g., DNA:DNA, RNA:RNA, or RNA:DNA) will form even where the annealed sequences are not perfectly complementary. Thus, specificity of hybridization is reduced at lower stringency. Conversely, at higher stringency (e.g., higher temperature or lower salt) successful hybridization tolerates fewer mismatches. One of skill in the art will appreciate that hybridization conditions may be selected to provide any degree of stringency.

[0178] In a preferred embodiment, hybridization is performed at low stringency, in this case in 6×SSPET at 37° C. (0.005% Triton X-100), to ensure hybridization and then subsequent washes are performed at higher stringency (e.g., I×SSPET at 37° C.) to eliminate mismatched hybrid duplexes. Successive washes may be performed at increasingly higher stringency (e.g., down to as low as 0.25×SSPET at 37° C. to 50° C.) until a desired level of hybridization specificity is obtained. Stringency can also be increased by addition of agents such as formamide. Hybridization specificity may be evaluated by comparison of hybridization to the test probes with hybridization to the various controls that can be present (e.g., expression level control, normalization control, mismatch controls, etc.).

[0179] In general, there is a tradeoff between hybridization specificity (stringency) and signal intensity. Thus, in a preferred embodiment, the wash is performed at the highest stringency that produces consistent results and that provides a signal intensity greater than approximately 10% of the background intensity. Thus, in a preferred embodiment, the hybridized array may be washed at successively higher stringency solutions and read between each wash. Analysis of the data sets thus produced will reveal a wash stringency above which the hybridization pattern is not appreciably altered and which provides adequate signal for the particular oligonucleotide probes of interest.

Signal Detection

[0180] The hybridized nucleic acids are typically detected by detecting one or more labels attached to the sample nucleic acids. The labels may be incorporated by any of a number of means well known to those of skill in the art. See WO 99/32660.

Computer Systems and Databases

[0181] The present invention includes computer systems comprising databases containing sequence information, for instance, for the genes of Tables 5A-5MMMMM, as well as gene expression information from tissue or cells exposed to various standard toxins, such as those herein described (see Tables 5A-5MMMMM. Databases may also contain information associated with a given sequence or tissue sample such as descriptive information about the gene associated with the sequence information (see Tables 1, 2 and 3), or descriptive information concerning the clinical status of the tissue sample, or the animal from which the sample was derived. The database may be designed to include different parts, for instance a sequence database and a gene expression database. Methods for the configuration and construction of such databases and computer-readable media to which such databases are saved are widely available, for instance, see U.S. Pat. No. 5,953,727, which is herein incorporated by reference in its entirety.

[0182] The databases of the invention may be linked to an outside or external database such as GenBank (www.nbi.nlm.nih.gov/entrez.index.html); KEGG (www.genome.ad.jp/kegg); SPAD (www.grt.kyushu-u.ac/jp/spad/index.html); HUGO (www.gene.ucl.ac.uk/hugo); Swiss-Prot (www.expasy.ch.sprot); Prosite (www.expasy.ch/tools/scnpsit1.html); OMIM (www.ncbi.nlm.nih.gov/omim); LocusLink (www.ncbi.nlm.nih.gov/LocusLink/); RefSeq (www.ncbi.nlm.nih.gov/LocusLink/refseq.html) and GDB (www.gdb.org). In a preferred embodiment, as described in Tables 1-5, the external database is GenBank and the associated databases maintained by the National Center for Biotechnology Information (NCBI) (www.ncbi.nlm.nih.gov).

[0183] Any appropriate computer platform, user interface, software etc. may be used to perform the necessary comparisons between sequence information, gene expression information and any other information in the database or information provided as an input. For example, a large number of computer workstations are available from a variety of manufacturers, such has those available from Silicon Graphics. Client/server environments, database servers and networks are also widely available and appropriate platforms for the databases of the invention.

[0184] In one embodiment, computer systems of the invention comprise software that allows a user to calculate an expression value and standard deviation value, such as the values described in Table 5 and in the Examples. In another embodiment, the computer system comprises software that enables the user to compare expression data or expression profiles from a cell or tissue sample(s) exposed to test agent, compound or composition to a gene expression data or expression profiles from cell or tissue samples exposed to a known toxin(s). In another preferred embodiment, computer systems of the invention comprise software that enables the user to compare test data as described above to a toxicology database of gene expression information (such as the information of one or more of Tables 1-5). A preferred database is the ToxExpress® database (Gene Logic, Inc, Gaithersburg, Md.). This comparison may result, for instance, in the prediction of at least one toxic response or effect as herein described.

[0185] The databases of the invention may be used to produce, among other things, electronic Northerns that allow the user to determine the cell type or tissue in which a given gene is expressed and to allow determination of the abundance or expression level of a given gene in a particular tissue or cell.

[0186] The databases of the invention may also be used to present information identifying the expression level in a tissue or cell of a set of genes comprising one or more of the genes in Tables 5A-5MMMMM, comprising the step of comparing the expression level of at least one gene in Tables 5A-5MMMMM in a cell or tissue exposed to a test agent to the level of expression of the gene in the database. Such methods may be used to predict the toxic potential of a given compound by comparing the level of expression of a gene or genes in Tables 5A-5MMMMM from a tissue or cell sample exposed to the test agent to the expression levels found in a control tissue or cell samples exposed to a standard toxin or hepatotoxin such as those herein described. Such methods may also be used in the drug or agent screening assays as described herein.

Kits

[0187] The invention further includes kits combining, in different combinations, high-density oligonucleotide arrays, reagents for use with the arrays, protein reagents encoded by the genes of the Tables, signal detection and array-processing instruments, gene expression databases and analysis and database management software described above. The kits may be used, for example, to predict or model the toxic response of a test compound, to monitor the progression of hepatic disease states, to identify genes that show promise as new drug targets and to screen known and newly designed drugs as discussed above.

[0188] The databases packaged with the kits are a compilation of expression patterns from human or laboratory animal genes and gene fragments (corresponding to the genes of Tables 5A-5MMMMM). In particular, the database software and packaged information that may contain the databases saved to a computer-readable medium include the expression results of Tables 5A-5MMMMM that can be used to predict toxicity of a test agent by comparing the expression levels of the genes of Tables 5A-5MMMMM induced by the test agent to the expression levels presented in Tables 5A-5MMMMM. In another format, database and software information may be provided in a remote electronic format, such as a website, the address of which may be packaged in the kit.

[0189] The kits may used in the pharmaceutical industry, where the need for early drug testing is strong due to the high costs associated with drug development, but where bioinformatics, in particular gene expression informatics, is still lacking. These kits will reduce the costs, time and risks associated with traditional new drug screening using cell cultures and laboratory animals. The results of large-scale drug screening of pre-grouped patient populations, pharmacogenomics testing, can also be applied to select drugs with greater efficacy and fewer side-effects. The kits may also be used by smaller biotechnology companies and research institutes who do not have the facilities for performing such large-scale testing themselves.

[0190] Databases and software designed for use with use with microarrays is discussed in Balaban et al., U.S. Pat. No. 6,229,911, a computer-implemented method for managing information, stored as indexed tables, collected from small or large numbers of microarrays, and U.S. Pat. No. 6,185,561, a computer-based method with data mining capability for collecting gene expression level data, adding additional attributes and reformatting the data to produce answers to various queries. Chee et al., U.S. Pat. No. 5,974,164, discloses a software-based method for identifying mutations in a nucleic acid sequence based on differences in probe fluorescence intensities between wild type and mutant sequences that hybridize to reference sequences.

Protein Assays

[0191] As discussed above, the assays and methods of toxicity identification, prediction and modeling may comprise the step of determining the level of a gene identified herein by identifying the level or amount of the encoded protein and/or the level of protein activity, for instance, enzymatic activity. These assays or methods may comprise the step of preparing a protein expression profile by methods known in the art. As used herein, protein expression profiles comprise any qualitative or quantitative representation of the expression (including absence or presence) of a protein in a cell or tissue sample and includes profiles created be any available method, including one or two-dimensional electrophoresis, antibody or other protein probe-bases assays, enzymatic assays, etc.

[0192] The sequences of the expression marker genes of Tables 5A-5MMMMM are in the public databases. Table 1 provides the GenBank Accession Number, SEQ ID NO: and GLGC ID No. (Gene Logic reference no.) for each of the sequences (see www.ncbi.nlm.nih.gov/), while Table 3 provides identification information for the human homologues of the genes of Tables 1 and 5A-5MMMMM. Table 2 identifies the metabolic pathways in which the genes of Tables 1 and 5A-5MMMMM are believed to function. Table 4 defines the model codes used in Tables 1, 2, 3 and 5A-5MMMMM. The sequences of the genes in GenBank are expressly herein incorporated by reference in their entirety as of the filing date of this application, as are related sequences, for instance, sequences from the same gene of different lengths, variant sequences, polymorphic sequences, amino acid sequences, genomic sequences of the genes and related sequences from different species, including the human counterparts, where appropriate.

[0193] The amino acid sequences of proteins encoded by the nucleic acid molecules described above are also readily determinable in the public databases, such as GenBank. For instance, SEQ ID NO: 3241 (table 1, page 66) corresponds to GenBank Acc. No. NM_{—}080767 (rat proteosome subunit, beta type 8). Entry of the GenBank accession number into the Entrez Nucleotide database available at the NCBI website identifies Accession No. NP_{—}542945 as the encoded amino acid sequence of the rat proteosome subunit, beta type 8. As such, the amino acid sequences available in GenBank for each nucleic acid molecule identified herein are also herein incorporated by reference in their entirety.

[0194] In some instances, proteins encoded by the nucleic acid molecules described in Tables 5A-5MMMMM may be screened for the presence of a signal sequence to identify those proteins that are secreted. These secreted proteins are a subset of preferred protein markers that may be assayed in methods of the invention.

[0195] Protein levels or activity may be identified, assayed or detected by any available technology, including but not limited to, ELISA assays, protein based arrays and tag arrays, such as those available from Affymetrix, Inc. (Santa Clara, Calif.) and Illumina, Inc. (San Diego, Calif.), mass spectroscopy, one and two-dimensional electrophoresis, Western blotting, Multiple Reaction Monitoring (MRM) technology, assays to detect enzyme or other protein activity, assays that detect metabolites associated with the activity of a gene/protein, immunohistochemistry and in situ staining, cell sorting or flow cytometry methods and immunocytochemistry.

[0196] When antibody-based methods are used to identify, assay or detect a protein marker of the invention, specific antibodies may be purchased from commercial sources, such as BioCompare (S. San Francisco, Calif.). Antibodies may also be prepared or isolated using commonly available techniques and the amino acid sequences of the protein markers.

[0197] Without further description, it is believed that one of ordinary skill in the art can, using the preceding description and the following illustrative examples, make and utilize the compounds of the present invention and practice the claimed methods. The following working examples therefore, specifically point out the preferred embodiments of the present invention, and are not to be construed as limiting in any way the remainder of the disclosure.

### EXAMPLES

### Example 1

### Identification of Toxicity Markers in Rat Hepatocytes

[0198] To evaluate their toxicity, the hepatotoxins described in Tables 4 and 5 and control vehicle compositions are administered to cultures of primary rat hepatocytes from male Sprague-Dawley rats at various time points using administration diluents, protocols and dosing regimes as previously described in the art and in the prior applications discussed above. Negative control compounds may be acyclovir, chloropheniramine maleate, clenbuterol, dexamethasone, diphenhydramine chloride, gentamicin, metformin, rosiglitazone, streptomycin, sulfadiazine and vancomycin. Identification of toxicity markers is performed by microarray analysis and the AlamarBlue® assay is used as a classical measure of cytotoxicity.

[0199] The source of the primary rat hepatocytes is Sprague Dawley Outbred CD® Rats (CRL:CD®[SD] IGS BR, Charles River Laboratories). Hepatocyte cultures are obtained in 24-well matrigel coated plates for the AlamarBlue® assay (175,000 cells/cm²) or in T-75 cm² matrigel coated flasks for RNA isolation for microarray analysis (187,000 cells/cm²). Primary rat hepatocytes are received the day after the cells were removed from the animals. After arrival, the cells, the cells are incubated overnight (˜15 hrs) before the toxin is added to the cultures. The vehicle used in the toxicity experiments is HIM culture medium (Hepatocyte Incubation Medium, In Vitro Technologies Cat. No. Z90009) containing 0.2% DMSO (Sigma Cat. No. D-5879). Toxin or vehicle is administered to hepatocyte cultures as follows. For each treatment, i.e., vehicle alone, vehicle+toxin at low dose, or vehicle+toxin at high dose, cells are harvested after 3, 6 and 24-hour incubations with the toxin solution or with the vehicle.

[0200] The AlamarBlue® assay is performed as follows, using only the 24-hour time point samples.
[0201] 1. Primary rat hepatocyte cultures are prepared as described above in a matrigel-coated plates at 175,000 cells/cm².
[0202] 2. The culture medium (HIM) is removed from each well and replaced with 500 μl of fresh HIM following arrival of the cells, and the cells are incubated overnight (approximately 15 hrs) at 37° C., 5% CO₂.
[0203] 3. The next day, the HIM is removed and 500 μl of the medium containing either vehicle or a dose of toxin is added.
[0204] 4. Lysis solution is used as a negative control. 450 μl medium+50 μl 9% Triton X100 are added to each of 3 wells containing cells, for a final Triton concentration of 1%.
[0205] 5. The cells in all wells are incubated for 24 hours at 37° C., 5% CO₂.
[0206] 6. HIM medium is removed, and a solution containing 500 μl of fresh HIM medium+50 μl AlamarBlue (BioSource International, Inc., Cat. No. DAL1100) is added to each well.
[0207] 7. The cells are incubated at 37° C., 5% CO₂ for 2 hours.
[0208] 8. 100 μl medium is removed from each well of the 24-well plate and added to a well of a 96-well plate. The fluorescence is measured using 544 nm as the excitation and 590 nm as the emission on a Molecular Devices, SpectraMax Gemini, Softmax pro 2.6.1. Alternatively, two absorbance readings can be measured for the oxidized (600 nm) and the reduced (570 nm) form of AlamarBlue®. After obtaining absorbance readings, results are calculated according to the manufacturer's protocol provided in the product description.
[0209] 9. The data are evaluated to determine whether or not the toxin reduced cell viability. If so, the dose of the toxin that reduced cell viability by ˜10-20% is determined.
   Collection of RNA from Rat Hepatocytes

[0210] More than 10⁷ cells are typically prepared for each sample. RNA is collected at 3, 6 and 24 hours following addition of the toxin according to the following procedure.

[0211] The medium from the flasks is discarded, and the cells are washed once with 20 ml of warm (37° C.) RPMI-1640+10 mM HEPES medium (Life Technologies, Cat. No. 22400-089). 12 ml of Trizol (Life Technologies, Cat. No. 15596-018) is placed immediately into each T-75 flask. Each flask contained ˜10-20 million cells. The contents of each flask are mixed vigorously for one minute with a vortex mixer and then aspirated up and down 5 times with a pipette. The contents of each flask (˜12 ml each) is collected into a 50 ml conical polypropylene tissue culture tube (Falcon), snap frozen in liquid nitrogen and stored at ≦−86° C.

[0212] Microarray sample preparation is conducted with minor modifications, following the protocols set forth in the Affymetrix GeneChip® Expression Analysis Manual. Frozen cells are ground to a powder using a Spex Certiprep 6800 Freezer Mill. Total RNA is extracted with Trizol (GibcoBRL) utilizing the manufacturer's protocol. The total RNA yield for each sample is 200-500 μg per 300 mg cells. mRNA is isolated using the Oligotex mRNA Midi kit (Qiagen) followed by ethanol precipitation. Double stranded cDNA is generated from mRNA using the SuperScript Choice system (GibcoBRL). First strand cDNA synthesis is primed with a T7-(dT24) oligonucleotide. The cDNA is phenol-chloroform extracted and ethanol precipitated to a final concentration of 1 μg/ml. From 2 μg of cDNA, cRNA is synthesized using Ambion's T7 MegaScript in vitro Transcription Kit.

[0213] To biotin label the cRNA, nucleotides Bio-11-CTP and Bio-16-UTP (Enzo Diagnostics) are added to the reaction. Following a 37° C. incubation for six hours, impurities are removed from the labeled cRNA following the RNeasy Mini kit protocol (Qiagen). cRNA is fragmented (fragmentation buffer consisting of 200 mM Tris-acetate, pH 8.1, 500 mM KOAc, 150 mM MgOAc) for thirty-five minutes at 94° C. Following the Affymetrix protocol, 55 μg of fragmented cRNA is hybridized on the Affymetrix rat array set for twenty-four hours at 60 rpm in a 45° C. hybridization oven. The chips are washed and stained with Streptavidin Phycoerythrin (SAPE) (Molecular Probes) in Affymetrix fluidics stations. To amplify staining, SAPE solution is added twice with an anti-streptavidin biotinylated antibody (Vector Laboratories) staining step in between. Hybridization to the probe arrays is detected by fluorometric scanning (Hewlett Packard Gene Array Scanner). Data is analyzed using Affymetrix GeneChip® version 3.0 and Expression Data Mining Tool (EDMT) software (version 1.0), S-Plus, and the GeneExpress® software system.

[0214] Table 1 discloses those genes that are differentially expressed upon exposure to the named toxins with their corresponding SEQ ID NOS:, GenBank Accession or RefSeq ID Nos., GLGC ID Nos. (internal Gene Logic identification nos.), gene names and Unigene Sequence Cluster titles. The metabolic pathways in which the genes of Table 1 function are indicated in Table 2, and the corresponding human homologues are given in Table 3. The model codes, identified in Table 4, represent the various toxicity or liver pathology states associated with differential expression of each gene, as well as the individual toxin types associated with differential expression of each gene.

[0215] Tables 5A-5MMMMM disclose the summary statistics for each of the comparisons performed. The “best” model/compound contains genes that, in part, are also found in application Ser. No. 10/357,507, filed Feb. 4, 2003, which is herein incorporated by reference. The alternative model/compound comprises only those genes or markers newly identified herein. Each of these tables contains a set of predictive genes and creates a model for predicting the hepatoxicity of an unknown, i.e., untested compound. Each gene is identified by its Gene Logic identification number (Row Name) and can be cross-referenced to a gene name and representative SEQ ID NO. in Table 1. For each comparison of gene expression levels between samples in the toxicity group (“Tox” samples, i.e., samples affected by exposure to a specific toxin) and samples in the non-toxicity group (“Non-tox” samples, i.e., samples not affected by exposure to that same specific toxin), the group mean for Tox samples is the mean signal intensity, as normalized for the various chip parameters that are being assayed. The Non-tox mean represents the mean signal intensity, as normalized for the various chip parameters that are being assayed, in samples other than those treated with the high dose of the specific toxin (control samples). These samples are treated with a low dose of the specific toxin, or with vehicle alone, or with a different toxin. Tox samples are obtained from treated cells processed at the timepoint(s) indicated in the tables, while Non-tox samples were obtained from control cells processed at all time points in the experiments. For individual genes, an increase in the Tox group mean compared to the Non-tox group mean indicates up-regulation upon exposure to a toxin. Conversely, a decrease in the Tox group mean compared to the Non-tox group mean indicates down-regulation.

[0216] The mean values are derived from Average Difference (AveDiff) values for a particular gene, averaged across the corresponding samples. Each individual Average Difference value is calculated by integrating the intensity information from multiple probe pairs that are tiled for a particular fragment. The normalization multiplies each expression intensity for a given experiment (chip) by a global scaling factor. The intent of this normalization is to make comparisons of individual genes between chips possible. The scaling factor is calculated as follows:

1. From all the unnormalized expression values in the experiment, delete the largest 2% and smallest 2% of the values. That is, if the experiment yields 10,000 expression values, order the values and delete the smallest 200 and the largest 200.

2. Compute the trimmed mean, which is equal to the mean of the remaining values.

3. Compute the scale factor SF=100/(trimmed mean)

[0217] The value of 100 used here is the standard target value used. Some AveDiff values may be negative due to the general noise involved in nucleic acid hybridization experiments. Although many conclusions can be made corresponding to a negative value on the GeneChip platform, it is difficult to assess the meaning behind the negative value for individual fragments. Our observations show that, although negative values are observed at times within the predictive gene set, these values reflect a real biological phenomenon that is highly reproducible across all the samples from which the measurement was taken. For this reason, those genes that exhibit a negative value are included in the predictive set. It should be noted that other platforms of gene expression measurement may be able to resolve the negative numbers for the corresponding genes. The predictive ability of each of those genes should extend across platforms, however. Each mean value is accompanied by the standard deviation for the mean.

[0218] The linear discriminant analysis score (discriminant score), as disclosed in the tables, measures the ability of each gene to predict whether or not a sample is toxic. The discriminant score is calculated by the following steps:

Calculation of a Discriminant Score

[0219] Let Xᵢ represent the AveDiff values for a given gene across the Group 1 samples, i=1 . . . n.

[0220] Let Yᵢ represent the AveDiff values for a given gene across the Group 2 samples, i=1 . . . t.

[0221] The calculations proceed as follows:

[0222] Calculate mean and standard deviation for Xᵢ's and Yᵢ's, and denote these by m_{X}, m_{Y}, s_{X}, s_{Y}.

[0223] For all Xᵢ's and Yᵢ's, evaluate the function f(z)=((1/s_{Y})*exp(−0.5*((z−m_{Y})/s_{Y})²))/(((1/s_{Y})*exp(−0.5*((z−m_{Y})/s_{Y})²))+((1/s_{X})*exp(−0.5*((z−m_{X})/s_{X})²))).

[0224] The number of correct predictions, say P, is then the number of Yᵢ's such that f(Yᵢ)>0.5 plus the number of Xᵢ's such that f(Xᵢ)<0.5.

[0225] The discriminant score is then P/(n+t).

[0226] Linear discriminant analysis uses both the individual measurements of each gene and the calculated measurements of all combinations of genes to classify samples. For each gene, a weight is derived from the mean and standard deviation of the Tox and Non-tox sample groups. Every gene is multiplied by a weight and the sum of these values results in a collective discriminate score. This discriminant score is then compared against collective centroids of the Tox and Non-tox groups. These centroids are the average of all tox and nontox samples respectively. Therefore, each gene contributes to the overall prediction. This contribution is dependent on weights that are large positive or negative numbers if the relative distances between the Tox and Non-tox samples for that gene are large and small numbers if the relative distances are small. The discriminant score for each unknown sample and centroid values can be used to calculate a probability between zero and one as to the group in which the unknown sample belongs.

### Example 2

### General Toxicity Modeling

[0227] Samples were selected for grouping into Tox and Non-tox groups by examining each study individually with Principal Components Analysis (PCA) to determine which treatments had an observable response. Only sample groups where confidence of the tox-responding or non-tox-responding status (expression level affected by exposure to a specific toxin or expression level not affected by exposure to a specific toxin, respectively) was established were included in building a general toxicity prediction model.

[0228] Linear discriminant models were generated to describe Tox and Non-tox samples. The top discriminant genes and/or EST's were used to determine toxicity by calculating each gene's contribution with homo and heteroscedastic treatment of variance and inclusion or exclusion of mutual information between genes. Prediction of samples within the database exceeded 80% true positives with a false positive rate of less than 5%. It was determined that combinations of genes and/or EST's generally provided a better prediction than individual genes and that the more genes and/or EST used, the better the prediction. Although the preferred embodiment includes fifty or more genes, many pairings or larger combinations of genes and/or EST can work better than individual genes. All combinations of two or more genes from the selected list could be used to predict toxicity. These combinations could be selected by pairing in an agglomerate, divisive, or random approach. Further, as yet undetermined genes and/or EST's could be combined with individual or a set of genes and/or EST's described here to increase predictive ability. However, the genes and/or EST's described here would contribute most of the predictive ability to any such undetermined combinations.

[0229] Other variations on the above method can provide adequate predictive ability. These include selective inclusion of components via agglomerate, divisive, or random approaches or extraction of loading and combining them in agglomerate, divisive, or random approaches. Also the use of composite variables in logistic regression to determine classification of samples can also be accomplished with linear discriminate analysis, neural or Bayesian networks, or other forms of regression and classification based on categorical or continual dependent and independent variables.

### Example 3

### Modeling Methods

[0230] The above modeling methods provide broad approaches of combining the expression of genes to predict sample toxicity. One could also provide no weight in a simple voting method or determine weights in a supervised or unsupervised method using agglomerate, divisive, or random approaches. All or selected combinations of genes may be combined in ordered, agglomerate, or divisive, supervised or unsupervised clustering algorithms with unknown samples for classification. Any form of correlation matrix may also be used to classify unknown samples. The spread of the group distribution and discriminate score alone provide enough information to enable a skilled person to generate all of the above types of models with accuracy that can exceed the discriminate ability of individual genes. Some examples of methods that could be used individually or in combination after transformation of data types include but are not limited to: Discriminant Analysis, Multiple Discriminant Analysis, logistic regression, multiple regression analysis, linear regression analysis, conjoint analysis, canonical correlation, hierarchical cluster analysis, k-means cluster analysis, self-organizing maps, multidimensional scaling, structural equation modeling, support vector machine determined boundaries, factor analysis, neural networks, bayesian classifications, and resampling methods.

### Example 4

### Grouping of Individual Compound and Pathology Classes

[0231] Samples were grouped into individual pathology classes based on known toxicological responses and observed clinical chemical and pathology measurements or into observable toxicity produced by a compound (Tables 5A-5MMMMM). The top 10, 25, 50, 100 genes based on individual discriminate scores are used in a model to ensure that a combination of genes provided a better prediction than individual genes. As described above, all combinations of two or more genes from this list could potentially provide better prediction than individual genes when selected in any order or by ordered, agglomerate, divisive, or random approaches. In addition, combining these genes with other genes could provide better predictive ability, but most of this predictive ability would come from the genes listed herein.

[0232] A sample may be considered a Tox sample if it scores positive in any pathological or individual compound class represented here, or in any modeling method mentioned under general toxicology models, based on a combination of the sample's time point and dosage group in a study using an individual compound (with known or potentially toxic properties) by comparisons obtainable from the data. The pathological groupings and early and late phase models are preferred examples of all obtainable combinations of sample time and dose points. Most logical groupings with one or more genes and one or more sample dose and time points should produce better predictions of general toxicity, pathological specific toxicity, or similarity to a known toxin than individual genes.

[0233] Although the present invention has been described in detail with reference to examples above, it is understood that various modifications can be made without departing from the spirit of the invention. Accordingly, the invention is limited only by the following claims. All cited patents, patent applications and publications referred to in this application are herein incorporated by reference in their entirety.

LENGTHY TABLE REFERENCED HERE
US20070055448A1-20070308-T00001
Please refer to the end of the specification for access instructions.

LENGTHY TABLE REFERENCED HERE
US20070055448A1-20070308-T00002
Please refer to the end of the specification for access instructions.

LENGTHY TABLE REFERENCED HERE
US20070055448A1-20070308-T00003
Please refer to the end of the specification for access instructions.

LENGTHY TABLE REFERENCED HERE
US20070055448A1-20070308-T00004
Please refer to the end of the specification for access instructions.

LENGTHY TABLE REFERENCED HERE
US20070055448A1-20070308-T00005
Please refer to the end of the specification for access instructions.

LENGTHY TABLE REFERENCED HERE
US20070055448A1-20070308-T00006
Please refer to the end of the specification for access instructions.

LENGTHY TABLE REFERENCED HERE
US20070055448A1-20070308-T00007
Please refer to the end of the specification for access instructions.

LENGTHY TABLE REFERENCED HERE
US20070055448A1-20070308-T00008
Please refer to the end of the specification for access instructions.

LENGTHY TABLE REFERENCED HERE
US20070055448A1-20070308-T00009
Please refer to the end of the specification for access instructions.

LENGTHY TABLE REFERENCED HERE
US20070055448A1-20070308-T00010
Please refer to the end of the specification for access instructions.

LENGTHY TABLE REFERENCED HERE
US20070055448A1-20070308-T00011
Please refer to the end of the specification for access instructions.

LENGTHY TABLE REFERENCED HERE
US20070055448A1-20070308-T00012
Please refer to the end of the specification for access instructions.

LENGTHY TABLE REFERENCED HERE
US20070055448A1-20070308-T00013
Please refer to the end of the specification for access instructions.

LENGTHY TABLE REFERENCED HERE
US20070055448A1-20070308-T00014
Please refer to the end of the specification for access instructions.

LENGTHY TABLE REFERENCED HERE
US20070055448A1-20070308-T00015
Please refer to the end of the specification for access instructions.

LENGTHY TABLE REFERENCED HERE
US20070055448A1-20070308-T00016
Please refer to the end of the specification for access instructions.

LENGTHY TABLE REFERENCED HERE
US20070055448A1-20070308-T00017
Please refer to the end of the specification for access instructions.

LENGTHY TABLE REFERENCED HERE
US20070055448A1-20070308-T00018
Please refer to the end of the specification for access instructions.

LENGTHY TABLE REFERENCED HERE
US20070055448A1-20070308-T00019
Please refer to the end of the specification for access instructions.

LENGTHY TABLE REFERENCED HERE
US20070055448A1-20070308-T00020
Please refer to the end of the specification for access instructions.

LENGTHY TABLE REFERENCED HERE
US20070055448A1-20070308-T00021
Please refer to the end of the specification for access instructions.

LENGTHY TABLE REFERENCED HERE
US20070055448A1-20070308-T00022
Please refer to the end of the specification for access instructions.

LENGTHY TABLE REFERENCED HERE
US20070055448A1-20070308-T00023
Please refer to the end of the specification for access instructions.

LENGTHY TABLE REFERENCED HERE
US20070055448A1-20070308-T00024
Please refer to the end of the specification for access instructions.

LENGTHY TABLE REFERENCED HERE
US20070055448A1-20070308-T00025
Please refer to the end of the specification for access instructions.

LENGTHY TABLE REFERENCED HERE
US20070055448A1-20070308-T00026
Please refer to the end of the specification for access instructions.

LENGTHY TABLE REFERENCED HERE
US20070055448A1-20070308-T00027
Please refer to the end of the specification for access instructions.

LENGTHY TABLE REFERENCED HERE
US20070055448A1-20070308-T00028
Please refer to the end of the specification for access instructions.

LENGTHY TABLE REFERENCED HERE
US20070055448A1-20070308-T00029
Please refer to the end of the specification for access instructions.

LENGTHY TABLE REFERENCED HERE
US20070055448A1-20070308-T00030
Please refer to the end of the specification for access instructions.

LENGTHY TABLE REFERENCED HERE
US20070055448A1-20070308-T00031
Please refer to the end of the specification for access instructions.

LENGTHY TABLE REFERENCED HERE
US20070055448A1-20070308-T00032
Please refer to the end of the specification for access instructions.

LENGTHY TABLE REFERENCED HERE
US20070055448A1-20070308-T00033
Please refer to the end of the specification for access instructions.

LENGTHY TABLE REFERENCED HERE
US20070055448A1-20070308-T00034
Please refer to the end of the specification for access instructions.

LENGTHY TABLE REFERENCED HERE
US20070055448A1-20070308-T00035
Please refer to the end of the specification for access instructions.

LENGTHY TABLE REFERENCED HERE
US20070055448A1-20070308-T00036
Please refer to the end of the specification for access instructions.

LENGTHY TABLE REFERENCED HERE
US20070055448A1-20070308-T00037
Please refer to the end of the specification for access instructions.

LENGTHY TABLE REFERENCED HERE
US20070055448A1-20070308-T00038
Please refer to the end of the specification for access instructions.

LENGTHY TABLE REFERENCED HERE
US20070055448A1-20070308-T00039
Please refer to the end of the specification for access instructions.

LENGTHY TABLE REFERENCED HERE
US20070055448A1-20070308-T00040
Please refer to the end of the specification for access instructions.

LENGTHY TABLE REFERENCED HERE
US20070055448A1-20070308-T00041
Please refer to the end of the specification for access instructions.

LENGTHY TABLE REFERENCED HERE
US20070055448A1-20070308-T00042
Please refer to the end of the specification for access instructions.

LENGTHY TABLE REFERENCED HERE
US20070055448A1-20070308-T00043
Please refer to the end of the specification for access instructions.

LENGTHY TABLE REFERENCED HERE
US20070055448A1-20070308-T00044
Please refer to the end of the specification for access instructions.

LENGTHY TABLE REFERENCED HERE
US20070055448A1-20070308-T00045
Please refer to the end of the specification for access instructions.

LENGTHY TABLE REFERENCED HERE
US20070055448A1-20070308-T00046
Please refer to the end of the specification for access instructions.

LENGTHY TABLE REFERENCED HERE
US20070055448A1-20070308-T00047
Please refer to the end of the specification for access instructions.

LENGTHY TABLE REFERENCED HERE
US20070055448A1-20070308-T00048
Please refer to the end of the specification for access instructions.

LENGTHY TABLE REFERENCED HERE
US20070055448A1-20070308-T00049
Please refer to the end of the specification for access instructions.

LENGTHY TABLE REFERENCED HERE
US20070055448A1-20070308-T00050
Please refer to the end of the specification for access instructions.

LENGTHY TABLE REFERENCED HERE
US20070055448A1-20070308-T00051
Please refer to the end of the specification for access instructions.

LENGTHY TABLE REFERENCED HERE
US20070055448A1-20070308-T00052
Please refer to the end of the specification for access instructions.

LENGTHY TABLE REFERENCED HERE
US20070055448A1-20070308-T00053
Please refer to the end of the specification for access instructions.

LENGTHY TABLE REFERENCED HERE
US20070055448A1-20070308-T00054
Please refer to the end of the specification for access instructions.

LENGTHY TABLE REFERENCED HERE
US20070055448A1-20070308-T00055
Please refer to the end of the specification for access instructions.

LENGTHY TABLE REFERENCED HERE
US20070055448A1-20070308-T00056
Please refer to the end of the specification for access instructions.

LENGTHY TABLE REFERENCED HERE
US20070055448A1-20070308-T00057
Please refer to the end of the specification for access instructions.

LENGTHY TABLE REFERENCED HERE
US20070055448A1-20070308-T00058
Please refer to the end of the specification for access instructions.

LENGTHY TABLE REFERENCED HERE
US20070055448A1-20070308-T00059
Please refer to the end of the specification for access instructions.

LENGTHY TABLE REFERENCED HERE
US20070055448A1-20070308-T00060
Please refer to the end of the specification for access instructions.

LENGTHY TABLE REFERENCED HERE
US20070055448A1-20070308-T00061
Please refer to the end of the specification for access instructions.

LENGTHY TABLE REFERENCED HERE
US20070055448A1-20070308-T00062
Please refer to the end of the specification for access instructions.

LENGTHY TABLE REFERENCED HERE
US20070055448A1-20070308-T00063
Please refer to the end of the specification for access instructions.

LENGTHY TABLE REFERENCED HERE
US20070055448A1-20070308-T00064
Please refer to the end of the specification for access instructions.

LENGTHY TABLE REFERENCED HERE
US20070055448A1-20070308-T00065
Please refer to the end of the specification for access instructions.

LENGTHY TABLE REFERENCED HERE
US20070055448A1-20070308-T00066
Please refer to the end of the specification for access instructions.

LENGTHY TABLE REFERENCED HERE
US20070055448A1-20070308-T00067
Please refer to the end of the specification for access instructions.

LENGTHY TABLE REFERENCED HERE
US20070055448A1-20070308-T00068
Please refer to the end of the specification for access instructions.

LENGTHY TABLE REFERENCED HERE
US20070055448A1-20070308-T00069
Please refer to the end of the specification for access instructions.

LENGTHY TABLE REFERENCED HERE
US20070055448A1-20070308-T00070
Please refer to the end of the specification for access instructions.

LENGTHY TABLE REFERENCED HERE
US20070055448A1-20070308-T00071
Please refer to the end of the specification for access instructions.

LENGTHY TABLE REFERENCED HERE
US20070055448A1-20070308-T00072
Please refer to the end of the specification for access instructions.

LENGTHY TABLE REFERENCED HERE
US20070055448A1-20070308-T00073
Please refer to the end of the specification for access instructions.

LENGTHY TABLE REFERENCED HERE
US20070055448A1-20070308-T00074
Please refer to the end of the specification for access instructions.

LENGTHY TABLE REFERENCED HERE
US20070055448A1-20070308-T00075
Please refer to the end of the specification for access instructions.

LENGTHY TABLE REFERENCED HERE
US20070055448A1-20070308-T00076
Please refer to the end of the specification for access instructions.

LENGTHY TABLE REFERENCED HERE
US20070055448A1-20070308-T00077
Please refer to the end of the specification for access instructions.

LENGTHY TABLE REFERENCED HERE
US20070055448A1-20070308-T00078
Please refer to the end of the specification for access instructions.

LENGTHY TABLE REFERENCED HERE
US20070055448A1-20070308-T00079
Please refer to the end of the specification for access instructions.

LENGTHY TABLE REFERENCED HERE
US20070055448A1-20070308-T00080
Please refer to the end of the specification for access instructions.

LENGTHY TABLE REFERENCED HERE
US20070055448A1-20070308-T00081
Please refer to the end of the specification for access instructions.

LENGTHY TABLE REFERENCED HERE
US20070055448A1-20070308-T00082
Please refer to the end of the specification for access instructions.

LENGTHY TABLE REFERENCED HERE
US20070055448A1-20070308-T00083
Please refer to the end of the specification for access instructions.

LENGTHY TABLE REFERENCED HERE
US20070055448A1-20070308-T00084
Please refer to the end of the specification for access instructions.

LENGTHY TABLE REFERENCED HERE
US20070055448A1-20070308-T00085
Please refer to the end of the specification for access instructions.

LENGTHY TABLE REFERENCED HERE
US20070055448A1-20070308-T00086
Please refer to the end of the specification for access instructions.

LENGTHY TABLE REFERENCED HERE
US20070055448A1-20070308-T00087
Please refer to the end of the specification for access instructions.

LENGTHY TABLE REFERENCED HERE
US20070055448A1-20070308-T00088
Please refer to the end of the specification for access instructions.

LENGTHY TABLE REFERENCED HERE
US20070055448A1-20070308-T00089
Please refer to the end of the specification for access instructions.

LENGTHY TABLE REFERENCED HERE
US20070055448A1-20070308-T00090
Please refer to the end of the specification for access instructions.

LENGTHY TABLE REFERENCED HERE
US20070055448A1-20070308-T00091
Please refer to the end of the specification for access instructions.

LENGTHY TABLE REFERENCED HERE
US20070055448A1-20070308-T00092
Please refer to the end of the specification for access instructions.

LENGTHY TABLE REFERENCED HERE
US20070055448A1-20070308-T00093
Please refer to the end of the specification for access instructions.

LENGTHY TABLE REFERENCED HERE
US20070055448A1-20070308-T00094
Please refer to the end of the specification for access instructions.

LENGTHY TABLE REFERENCED HERE
US20070055448A1-20070308-T00095
Please refer to the end of the specification for access instructions.

LENGTHY TABLE REFERENCED HERE
US20070055448A1-20070308-T00096
Please refer to the end of the specification for access instructions.

LENGTHY TABLE REFERENCED HERE
US20070055448A1-20070308-T00097
Please refer to the end of the specification for access instructions.

LENGTHY TABLE REFERENCED HERE
US20070055448A1-20070308-T00098
Please refer to the end of the specification for access instructions.

LENGTHY TABLE REFERENCED HERE
US20070055448A1-20070308-T00099
Please refer to the end of the specification for access instructions.

LENGTHY TABLE REFERENCED HERE
US20070055448A1-20070308-T00100
Please refer to the end of the specification for access instructions.

LENGTHY TABLE REFERENCED HERE
US20070055448A1-20070308-T00101
Please refer to the end of the specification for access instructions.

LENGTHY TABLE REFERENCED HERE
US20070055448A1-20070308-T00102
Please refer to the end of the specification for access instructions.

LENGTHY TABLE REFERENCED HERE
US20070055448A1-20070308-T00103
Please refer to the end of the specification for access instructions.

LENGTHY TABLE REFERENCED HERE
US20070055448A1-20070308-T00104
Please refer to the end of the specification for access instructions.

LENGTHY TABLE REFERENCED HERE
US20070055448A1-20070308-T00105
Please refer to the end of the specification for access instructions.

LENGTHY TABLE REFERENCED HERE
US20070055448A1-20070308-T00106
Please refer to the end of the specification for access instructions.

LENGTHY TABLE REFERENCED HERE
US20070055448A1-20070308-T00107
Please refer to the end of the specification for access instructions.

LENGTHY TABLE REFERENCED HERE
US20070055448A1-20070308-T00108
Please refer to the end of the specification for access instructions.

LENGTHY TABLE REFERENCED HERE
US20070055448A1-20070308-T00109
Please refer to the end of the specification for access instructions.

LENGTHY TABLE REFERENCED HERE
US20070055448A1-20070308-T00110
Please refer to the end of the specification for access instructions.

LENGTHY TABLE REFERENCED HERE
US20070055448A1-20070308-T00111
Please refer to the end of the specification for access instructions.

LENGTHY TABLE REFERENCED HERE
US20070055448A1-20070308-T00112
Please refer to the end of the specification for access instructions.

LENGTHY TABLE REFERENCED HERE
US20070055448A1-20070308-T00113
Please refer to the end of the specification for access instructions.

LENGTHY TABLE REFERENCED HERE
US20070055448A1-20070308-T00114
Please refer to the end of the specification for access instructions.

LENGTHY TABLE REFERENCED HERE
US20070055448A1-20070308-T00115
Please refer to the end of the specification for access instructions.

LENGTHY TABLE REFERENCED HERE
US20070055448A1-20070308-T00116
Please refer to the end of the specification for access instructions.

LENGTHY TABLE REFERENCED HERE
US20070055448A1-20070308-T00117
Please refer to the end of the specification for access instructions.

LENGTHY TABLE REFERENCED HERE
US20070055448A1-20070308-T00118
Please refer to the end of the specification for access instructions.

LENGTHY TABLE REFERENCED HERE
US20070055448A1-20070308-T00119
Please refer to the end of the specification for access instructions.

LENGTHY TABLE REFERENCED HERE
US20070055448A1-20070308-T00120
Please refer to the end of the specification for access instructions.

LENGTHY TABLE REFERENCED HERE
US20070055448A1-20070308-T00121
Please refer to the end of the specification for access instructions.

LENGTHY TABLE
The patent application contains a lengthy table section. A copy of the table is available in electronic form from the USPTO web site (http://seqdata.uspto.gov/?pageRequest=docDetail&DocID=US20070055448A1). An electronic copy of the table will also be available from the USPTO upon request and payment of the fee set forth in 37 CFR 1.19(b)(3).

The application's sequence listing, which the Patent Office published only in electronic form, follows.

SEQUENCE LISTING (3518 sequences)

SEQ ID NO: 1 - DNA, 158 bp, Rattus norvegicus
  Genbank Accession No. AA108277
accctttgaactagaagctttctattctgaccctcaagcagttccatatccagaagcaaaaatcggccgttttgtcgttcagaatgtttctgcacagaagatggagaaaatctaaagtgaaagtgcgcgtgacacacatgcatttcacatatccgctc

SEQ ID NO: 2 - DNA, 249 bp, Rattus norvegicus
  Genbank Accession No. AA684641
cgttctcaataaatattttatttttctgacactccaccctcaatacaaaagccttctggctggagccggattgtgcgaacaggccttgccgcgggcacctgcttgcttagtccctaggcctgcggcacccagacacaaggcagtgaacgtatggctagacggagatggtactttattaagaaacagaacagcaataggtccaaaaggggcagctgcgtcacctccaggggctactccagctgctgtggg

SEQ ID NO: 3 - DNA, 317 bp, Rattus norvegicus
  Genbank Accession No. AA685175
  misc_feature (1)..(317): n = a or c or g or t
ggatgttatcattattgctttattctttgggggataaggaatacagcatttaataaaatatatcangacccaattttatgcccctacagtaatttcaaaaggccattaaataagaattttaatgagaaattatctactgcaacatctcattaggatttctgtcccatgtggccttgcaccaaggagaatgatatcgaaggccttccacacaggtgtttccaacgtcagggggcgctgtcacagccacaagagccaatgccttcttcagggttgcttccaatttttgaagnataaaatatcagcacacaggctctcct

SEQ ID NO: 4 - DNA, 318 bp, Rattus norvegicus
  Genbank Accession No. AA685178
  misc_feature (1)..(318): n = a or c or g or t
catccaacaagaagctacactttattagtgatagaaacagtacaaattttaaaccaagctgtagttccacttttcaaacaccaaaaggggggggangggggaggagggtgtccttgctgtcagataattacattgttaattccataatagcatttacaatatcgttactgtngtttttnagggctcggacagcctttgctcttgacacatttgcttgtgacatgaccaactctatgtccttaacttccacacccgtttcatcaacctcctcttcttcgntctcctcttggacagtcggcgtctgcggtgttctcctga

SEQ ID NO: 5 - DNA, 302 bp, Rattus norvegicus
  Genbank Accession No. AA685903
  misc_feature (1)..(302): n = a or c or g or t
gtcaacttccgaactgatcggccagtttggtgtcggtttttattctgccttccttgtagcagataaggtcattgtcacgtcgaaacacaacaatgntacccagcacatctgggaatccgactctaatgaattctctgtgattgctgacccaagaggaaacacactaggtcgtggaacaacgattactcttgtcttaaaagaagaagcatctgattaccttgaattggatacaattaaaaatctcgtcagaaagtattctcagttcatcaactttccccatctatgtnttggagtagcaaaga

SEQ ID NO: 6 - DNA, 371 bp, Rattus norvegicus
  Genbank Accession No. AA685974
  misc_feature (1)..(371): n = a or c or g or t
gcctcgccacagcctttattgcgcgggcactccaccgggctctgcaggatgcacgggggctaggatgtcagagcggggaccctctggtttgttgagggtgacctatggcgcantgggagacccccagacccggaactctattaatccctggtcaggccaggctgaagagggatgagctgacttggacaagctggattcagcccggttctgtcacttgggtgcattgaagggcagcgcacgctggtttcatcgggttgtcaggagagcgcaaccactccttcttcagcagctgcttcagctgtnagagccgcatgttggggttttcctgcttcaaccgtggcagcttcanctcctcaaatgcggtgaaggcc

SEQ ID NO: 7 - DNA, 290 bp, Rattus norvegicus
  Genbank Accession No. AA686132
  misc_feature (1)..(290): n = a or c or g or t
aagataatgatgacattntcatgctggagaaaaaaataagaacatctagtatgccagancaggctcataaagtntgtttcaaggagataaaaagactcaaaaaantgcctcattcaatgcctgattatgctctgactagaaattatttggaacttatggtggagcttccttggaacaaaagtacaactgaccgcctggacatccgggcagcccgcatccttctggacaatgaccactatgccatggaaaagctgaagaggagggtttttggagtactttggctgttgaga

SEQ ID NO: 8 - DNA, 362 bp, Rattus norvegicus
  Genbank Accession No. AA686470
  misc_feature (1)..(362): n = a or c or g or t
gtcgatcataccatgttgaagatgagcgggtggcagcgacagagccaaaataacagccggaacctgaggagagagtnttccagaaggaagtgcatcttcatacaccaccacacctgaaagcagaaaccggtccaattacagtcatggcagctgagtctctgcctttcgcctttgagacagtntccagctgggagctggaagcctggtatgaggntctgcaggaggtcctgtcctcagatgaaattgggggcanctatatctcatccccaggaaacgaagaggaagaatcaaaaacctttcactacttttgaccctgcatccctagtttggtgactnaggagccagggccagcagaggtcaca

SEQ ID NO: 9 - DNA, 608 bp, Rattus norvegicus
  Genbank Accession No. AA799276
taataacaagtgtacaatttagcataaggaatcggagagcctctccagagaagtcggtttctttgctgcaagaagaatgaggttctgaacccttatccaagaacagaagccatcagccaagtctccacatttctctgcaaaatgttgtagcctctataactgtatgatagtgtaatgcatgccttcagttgtaagtggccagatcgcgctacagtgacattgaaacctgctctctaattggccctgtacagtttgcttatttataaattcatttaaaacactacagctgttgaatggttacaacctacgcctccggtcctaacttcagttgttctcctcggtgtgcagccagctgttccacactgtattattgtaacttatttagtgaagtcagaagcagtagacagatgttggtgcaatacaagtattgtgtgcatttatcgtaataaagtgctccgcgtcggttcagttcctcacagcttctcacagtgcatgtctgactgtagtctgtaaatagaggtcagtgtccgtgctgctaacaggtatcgatcgcacagacatgatttcaggtaaataaatcgattctacgataaatgggtaaaagaaaa

SEQ ID NO: 10 - DNA, 619 bp, Rattus norvegicus
  Genbank Accession No. AA799279
cccaagattaaatgattattaaaaaagcgtgccactgtatagaaatcaacattctctcccataattctgtgcattgggactatagaaatgtcactgtccctgctccacatcttcaaattaacattctcaggtcacaatagtaagtcttcccacaaggaaccttccggaaaaacaagctgtttcctcggctcatatttcccgctttttgtagcatgcaccagcaatctatccaagaagtatatattggggagtaaggaggagatccaccagcaagcccacagttgttaacagccataagattagatacaagcacaaagggatatgtcaacatactggcaaagaatcctgtgacagcttgggaataacttttcatttcattcatggtagagaccccactgtccagtgcataggtattgatgagataagccagtgagttacacagccacaaagaaatgatgtcacctaggaggcgaggaatgaggcccgcaaaaaatcctacgatgccttcttcccggtagatggttactatggagtcacacagtccgcagtacttagactctctgccgataaactgtaccatggacctcagagtaatcaccttgaagggatgtgtaatgag

SEQ ID NO: 11 - DNA, 506 bp, Rattus norvegicus
  Genbank Accession No. AA799299
aaaggacagcttaaataggcaatgcagaaggaaaggtggccccagtggcagtaaacagaaaggagtgagcaccatcacccccaggggcaggtgtcccccggacagccatggctgctggcttacaggctctctgggctcacaggggaagtcactagggatggggacagggtccaaggacaggtgagtatcaacagagccttcctgtgtaatgagatcaaagagtaaagaactggagagagctgccagctcttccttctccatgatagatgacagcatcttgcccctcgacgatccagagctgacttctgcccgaagcaggtccccagtagagaggtgggtgtagccatatttctgcacaatcttctcacactgggtaccttttcctgagccaggcccgcccaccacgaagatgatcttggccttcttcagcttgtcttccatcctgctgaggtctgggagctaggtcagcgctctgggggagggtgtggtgggcgctggggccagtc

SEQ ID NO: 12 - DNA, 545 bp, Rattus norvegicus
  Genbank Accession No. AA799301
gcaaaagttgaaaatgctcatatcagttaccagctcagaacctgggttcccatgggatccactgcataaaatgagtctgtcacttcttgccaggtttgggggccttttctaggccttggatgtattttccagggagccgatactcttcaagcaatagctggccgaggtggtggatctggtttccctggacctgcacctgcagactatctttggccccaggggcaggagagacgatggtgctggcctgacatcgctgctggagaatggcggccactgagcatggatctagaccataggtctccaagttccggaccacagtcacctttttattataagtcttcagtacaagggtgatatcaattggacagagtttccctttctttataatgggttcctggcctggaaatgtcacttggtatgcaggctgcagatttttcaaacacctggtcaggagagagtcccacggaagcttcatgaccaagtgctgctcatttttctctaagatacagtcacataagatgggatccaacttcaccagattcctg

SEQ ID NO: 13 - DNA, 566 bp, Rattus norvegicus
  Genbank Accession No. AA799322
gctttgcggcaggcttccgggctgctgaagaggcgtttccaccgctcggcgcccgcggcggtgcagttgacagttcgtgaagccattaatcaaggtatggatgaagaactagaaagagatgaaaaggtttttctgcttggggaagaagttgcccagtatgatggtgcatacaaggttagcagaggcctgtggaagaaatatggtgacaagaggatcatagatactcccatatcggagatgggctttgctggaattgctgttggtgcagctatggctgggctgcggcccatctgtgaatttatgaccttcaatttctctatgcaagctattgaccaggtcataaactcagctgccaagacgtactatatgtctgctggcctccagccggtgcccatagtgttcaaggggcccaacggcgcctgctgttcgagtcactggtgctgatgtccctatgccttacgcaaagattctagaagacaactccatacctcaggtcaaagacatcatatttgcaataaagaagactttgaatatctaatctagacgttgaatgtcaagtcagtgaa

SEQ ID NO: 14 - DNA, 633 bp, Rattus norvegicus
  Genbank Accession No. AA799326
tcccacttcagattcaaacacagcatagatggacctgcaaatgtcagaggaaaagaacctcagtgttcgagacttctcaacaaaaggtggaaaggaggctgcatctgtgccattaatcatgtcgcaataactttcccaataggacaaattccttttccctttatacgtatcaattatggcaaccttgcttatgttatcctttccattgaaaactttataaactccatctacagtgttattgtaaggataaaacacaccaactgtggtacttataggatatggaaccaaactcaagaatggatctttgtaaccccacaagagttccttcaaacttcgtgtttggaacatagaagacttggactttttgataaggctgttgagcacaccttgaacaaatgagtttgtgtagatatgtggtgcagctgccacagccagattgagaactgtgaagttgtcattctctgttccaacagacagtgaaggctcaaagatggctccattgggttgtacaaaagagacagtgctgtccttggggtcctgagttatattttccttggctaaataacgaactctgtatgtgtaaggacctctctgtttaaccttgatcttgctgctattctttgccacttcctc

SEQ ID NO: 15 - DNA, 619 bp, Rattus norvegicus
  Genbank Accession No. AA799327
cttggtagcttacaaatgattcgaagtgttgaaactttctgagtctcaatgaactatttctcacacaactcagatactgctgttcatgcatgaattagttgaaccaggccacatagaaagcattgtaattgtacctgtgagttggcaagaagcaagtgctcttccttgattctgctgcacgaggaggagaatgggctgcgatcggaactgtgggctcattactggagccgttattggtgctgtcctggctgtgtttggaggcattctcatgccggttggagacctactcattgagaagacaatcaaaagggaagttgtccttgaagaaggaaccattgctttcaaaaactgggtgaaaacgggcaccactgtgtacagacagttttggatctttgacgtgcaaaacccagaggaagtggcaaagaatagcagcaagatcaaggttaaacagagaggtccttacacatacagagttcgttatttagccaaggaaaatataactcaggaccccaatgacagcactgtctcttttgtacaacccaatggagccatctttgagccttcactgtctgttgggacagagaatgacaacttcacagttctcaatctggctgtggca

SEQ ID NO: 16 - DNA, 617 bp, Rattus norvegicus
  Genbank Accession No. AA799330
tatttaattggaatacatgtcctgccaaccaaaccataaaacacttcatgggaacccatcacacatgaaaccccagcaggaccaacaagtgcggccttgcacttgtcaaggatgctgtagaagaagaaactattgagtttccgtcttaatcctcttcagaacttgaatcatcctcttggtcagaaagttccggcacagggaagcggagaatggcagctactccagtcagctgaccaagctgttccccagacacgtggagactggagaatatccttacggtgcccgcattctctttcacactgtccaccagcctgacataccggctccgggtggccacatcctgatgccggaagagctcatcactgatgagcaaggtgtcaatcgccaaggcttcattggccctctccacctgcttgagtccatagaatgctcggtcaggttcgtgctgtaacattttgtagaagtcatccaaggcttttacttccccggcagctttcgtgtctgaaaggcggctcgctacagtaggatcacataggacctctttcagggagtacctgtgtccagaggaggcgtgtacctgaaggaatttggagccgttttccaggagcaccttgttt

SEQ ID NO: 17 - DNA, 599 bp, Rattus norvegicus
  Genbank Accession No. AA799336
cgtagccatggcgtctcgtgtcctttgcgcctgtgtccgccgcctgcctgcggcctttgcgccgctgccccggcttcccacgttggctttggcccggccgctcagcaccattctctgccctgagggaatctggagaagaaccgggactctgcagcccaccttggcgctcgcgcaggtgcctggaacggtcacacatttgtgccgccagtacagtgatgcacccccactgacgttagaaggaatcagggaccgagttctgtatgtcttgaaactctatgataagattgacccagaaaagctctcagtaaattctcattttatgaaggacctgggcttagacagtttggaccaagtggaaattattatggccatggaagacgaatttgggtttgaaattcctgatatagatgcagagaagttaatgtgtccacaagaaattgtagattacattgcagataagaaggatgtgtatgactaaagtatcagagccttcttcctcactgtgaggactccagaggacacatgatggcatcgtggccaactgacagcggttctgttcgacttgtatttaaattgtctgagtgttttgccctttaaaa

SEQ ID NO: 18 - DNA, 458 bp, Rattus norvegicus
  Genbank Accession No. AA799418
ttttgtgacggcaaggtctcactgtgtgacgctggctggcatggaacttgctgtgtgaccaggctggcctctgcctcctaagtgagtggtatatatttgaatcccagctttaaggagactgaggccaaagaatcagaaagtgtctgacgatttcagacagaatgaactttggtcaatgtgggctacaagagactctgaagacaaacaaacgcttctcatgttttgtaatgtgttagccaatgctacctgagcactctggcaacaagagggccatacccagatgccctttgaccttggaccagaaccaggagtcaaaataagccttttccttgtctctcacccaggccagagagttgtgggtttgccacagaaaagggactaatttctttgtatgtgtgtgtgtggcacgcatgtgtgttaggtatattcacatgtgtgttccttattatgtacaccag

SEQ ID NO: 19 - DNA, 480 bp, Rattus norvegicus
  Genbank Accession No. AA799420
agaaacatctttatttgggtaatatgtcccaaaacaggtcagttagtaaaatagattctacagagtacagccctatgcacagccctccctccccaaaaataatcctgggggtggggggaatctgtctccccaccccgggctcctcagatataaagttttggcaggttattgttattatctaggtttggcccaccatgtccactttctgtagtggctggtatcagtacctacttttctcattccagaccagttcagcaaacatttctgccccaccccaaattgtggggcctaaataaagagcaaataggtctcctccactgacccatcacctcatcactgtgctttcagaaaaggggcaggtgagcaacccatggtgctgcacacctttaatcccagtgctcaggaggcagaggcagtcagagctctgagtttgaggccaggacaaccagagctatacagagaaatcctggcggggggggg

SEQ ID NO: 20 - DNA, 705 bp, Rattus norvegicus
  Genbank Accession No. AA799440
  misc_feature (1)..(705): n = a or c or g or t
acataaccaaataagcattttattaacatttatagcatttaaaccagtaccaggctacacaagacacttctgtaaaatagaatgttctactgcactttcccactgaggcctggccttcttgagtgttctccacagtgagctcccgtgttctctctctgccctaggtcacaggaatacttcatgagcattcattctcttgctgtaattttccaccacttccattctcctatatccgaaaatcatcaagtggngcccacactctcgggaaagcctcaattcttcttgggtgtactcgtccagccgcttaagcactctccgtggctgaggaagctcttccactaaattcctaagaatatcttctggaatatcctcatcaagaaaaagatgcagcctttgcatcatcgttcntctgtgcaggtttttgggcagcatgccatagtagctaacttcacaantcgcactgggtccttcaagtggagctgtgcaactggtaactgtctgaagccaccccgggtagcagtatgtgaagagtacactttttggtccaatttggttccagnnaaatgcatangtcctggggttaatatgacaacatgtctccaaatcaatcagctgatggaacctgggttaagttacccctgaattaatggatgcaatggcccaattttgcaaggctgcatttgccacanggaaaccaattcggca

SEQ ID NO: 21 - DNA, 598 bp, Rattus norvegicus
  Genbank Accession No. AA799452
  misc_feature (1)..(598): n = a or c or g or t
aggaaaagcgactgctttaatgaattagacaaaatttcacatgaaatcagaatcctataatccttcccttctgatcactaaaaaatgcaagattcattcgttacaagccatgtgcgattcggacccctcgaaggcagtgcaggtctgcggtccagcctcaggtgctgcactatttcccattctcagcgctgaacattcgttctgtgagcatccgctccaactttatggcatcagcagcaaacttgcggatcccatcagagagcttctccacagccatttggtcctcattgtgcagccaacggaaggccttctcgtccagatgtatcttctccaagtcactggtctgggctgctttgacggaaagcgtgggtgccagcttgctgctgtccttgagcagctcccccagaagcttgggtgagatggtgaggaaatcacagcctgccagcgctttgatctcacccgtgttacggaaggaagcacccatgacaatggtcttgtagccaaactttttgtagtagttgtagatttttgtgacactcttcaccccaaggtcctcctgnggttcgtaggatttcttgtcgtgtttgcacatgcagtc

SEQ ID NO: 22 - DNA, 591 bp, Rattus norvegicus
  Genbank Accession No. AA799461
ccacacaaatcaagacatggctttattgaatttaaattctaccacctacccaaaagccttggggacattcactggtcaaagggcacacttagcgacagacaggaactgtctctttccttacgtctgataaattaactctgctgtaacctatggatgaaatgcaaggaggcagtgcccgggcttcagcgtgatttgaggtctacaggtcttccagggggccacagtttgtgaattccgactttgctgagcgggaggcttggcaggatcaggcagcaggtgctgggacaacactggctctcctggcctggctgcctactctgctgggggctgcagatggcccacagacatggcacatcctctttcaaacctggggatcagtcttctctttggtgtcactctgtggagagcagaagctctctgctctgttccctctctagctatagcaggaaacacagtaagacacataaattaggtcatttgccgcctctcagtgcctgtcaaggacaaaagttcatggtaatgaactgtccagcacagccctgaagactcaatgagcttcctcactccctgagttcccagagtcgccagcct

SEQ ID NO: 23 - DNA, 548 bp, Rattus norvegicus
  Genbank Accession No. AA799472
acaggaaggctggggtaggtatgtaccatagcatgtggtgatttctctcaccgacagctagagtttacgctcgttcctagaacataaatccacccttccacgttctgtgattctcatagcttagtcactgaaggaagactcactcgctgaactttcttctatggctttttcactttcgccacttggcaccggagcatctggcttctccagtagctctgggtctagtccttctgagatcatcttgtctctgattgccatcatcgggacacccacttgaaccatcttgaggtatctggcatatcgtgggtccttggctacagttacgacattttctgatggcgcttcaccttgttgtactccggagtcttgcgtgctgttctgcagttgctcagcagtgggttcagaatgtgattcatttgtgacagcagtgacacttagatgagacatgtcaactgtgacatcctctaggtctgcgatacatgacagcttcacatctaaacatatgacagctgtttcaacttgttgcatccgaagagaaaggtctgcca

SEQ ID NO: 24 - DNA, 687 bp, Rattus norvegicus
  Genbank Accession No. AA799474
  misc_feature (1)..(687): n = a or c or g or t
gagaaacttaatttattcccacaatgaaggctaaaggaagatcagaagcaagagtctggtctcctggccctggtatctgatgaaaaggggccaggcctgaaaggcctcggactgttcctggtctgctgagagcttgttcaggcaagatgacaagcagatactgaacagggtcacttgggtggccgataagccagctttcgactcttcaggactgaccacttatgccgcttcatggcataggtcaggggcagcagcaagcccatcatcaacaacatcttgagtcccatgcgttttcgatggtcatgctctggctctgatgcccagcgaaggaaggtggcaacatccttggctacttgtgacatggtagctggggtaccatcgtcatactccaagacttctgtgtagatgggaggagccatgccaatggcctggccaggaaagtaagggttgaaatagaggcttctcgcaatgacaccccagtgggaggttcacagtanncagtgagcaaaggaaacacatantcctcacaacgtgccttgctcgaacgatgtactgagtcaggggtaaagctccatgnntagcactctgcagctcagggtggggtatgntttggaaatatcaaacacttcctggcgcatgacatattccatcctcataggcatctgnacttcactcctaactaggctt

SEQ ID NO: 25 - DNA, 681 bp, Rattus norvegicus
  Genbank Accession No. AA799479
gggatcagagtttctttatgggctataggggccacaaggctggccaggtggcaaggtcaccggtggcccggtcaccgatacaggtagtcagcctggatgttggccgcgatctcggcctcccacttgtcaccattgttgagtagcttctccttgttgtacagcaactcctcatgcgtctcggtggaaaactcaaagttggggccctccacgatagcgtcaacagggcaggcttcctggcagaaaccacagtacatacacttggtcatgtcaatgtcatagcgtgtagtccggcggctgccatctgctcttggctcagcctcaatggtgatggcctgtgcaggacagatggcctcacagagcttgcaggcgatgcaacgctcctccccagtacggtatcggcgcagtgcatgctccccacggaagcgcggactcagtgggcccttctcaaaggggtacttgatggtggccggctcccgaaatgagtacctacggtcatgcccagtctcggaagagtccgtcacatcagaaccgaactgcatgtcatcccagattctagtcaaaaaattcggtgccttcaatcaatactgttcgtacggccatgaagctagaggtttgcaataaaatccgtccaggccggcaaggcgggaaaatcaaccaggggaatctaataacccccgcaat

SEQ ID NO: 26 - DNA, 673 bp, Rattus norvegicus
  Genbank Accession No. AA799481
ccatcacaataaaagtgacacagctttacaaaaataaatttttattaaaagcagtaaagtctgagcaggaagacagtacaaagaatgtaaacaatgtaaacaccactacattcagctcagcctgatcggatgctgaaagacaagtctaaatgctctagtccctttgctagcaagatacattaattctattttacacagacaacatattctaatttttactagggaaaaatagtttatcgaagtcgatcccaacgccaaatgctggcatcatcgcagacagctatgaggatgctgctatccctgctaaaactggtttgtcgaatagcagcgccacatttatgatgggtcagtgttgtgcatttggctttatgaggatcttctactttcaaatcccaaacatacagtttgacaacctgactgcccaatgcaagcattaggtttactttaaccatatcatcctcaatttggcaggtttcaacaaaaaaggcattttcacaaaactgggaaatacaaaacgcctaacatccttcaaatcaacataatccaagtagtccgggtaaaaaatcgggaatggatttcgggaataaaggccggaagtttgttgggtaaaaccaaaatcctaaccatcaaaatccttggtggtctcaaattagagggtcaacccgggaatatt

SEQ ID NO: 27 - DNA, 646 bp, Rattus norvegicus
  Genbank Accession No. AA799489
cccaggaaatttacttaacaaagtcaccaaaatacagtaataccatagctgagggctctccatatacttaatctatgaggagaggctgactactatctcttttatctctttcaggagaaggaaggcaagcaagaaagggaaggtcagccaccatgactgaaatccaggcaatggctgaaagcctggaggtaagacaagtaacttaactgtgtcaaaaagtggggtcaaaggcgcagtagtgccactaccacgaaggctgatcctggagtgggtgctcgtgcccatcgggaactctggtttcttggtgggtgggtgttgaaggagtcctcttgttgactatgttaatgtgacagttaataggggtgacacacccacatggcaggcatcagcggcctgtgtgacatccacacacccacatcaaggtttctattaacttctggtccccaaactcctgctcttagcagtagatcagaagtggtacgcacgaatgcctggaaaattccactctatgtaacacctttggtttaaagacattttccagtgaataacagtgaaaagttgaattagtaactattggtgttaaacccgttaattctcaggatcaggcctatgggattccaccatgcaatgtattcgaacaaattct

SEQ ID NO: 28 - DNA, 565 bp, Rattus norvegicus
  Genbank Accession No. AA799499
aatagttacaaaaaacccacagtttttcttgctttattaaaccatacagtattctttcaaggacagacacacagccaaggatgctatggtgagagaaatcttattttcatggaagacgtcacaggtgctctcttcagtgatgattcttatcctcatgggaagtcaggaaatactcgggccctaaagctaccataaacgcagcaaacccccatttgaatccttttaacattacgctcgtgaacgtgatattgtctgcaaagccgcccatgtatctccaagcctcattgcgagcccatggatccctcagccctcgtgcagcaagcttcttctgcattgcttcaaatggcgtcacttcaattttccactgtctgtaatctggaagttccattttaccatgaccatgtccgtgttcgtgaccatgttcaggagccatgtctgacagaatgttgacccccaggacaccaatattcaagcttcccctcggccggattctggcctcgaggtcaatttcctatgtggtccgattaaatcgtagtcatgtaaagtgttccgtgttaattgttcc

SEQ ID NO: 29 - DNA, 777 bp, Rattus norvegicus
  Genbank Accession No. AA799501
  misc_feature (1)..(777): n = a or c or g or t
aatctagcatgttgcttagaaaggcttgttgtgttgagtacaaatactcctccagcatgtctcctagagaccatttcacccactgctctgtttggctgctagcctcttgtctctctcttcagcaatggtaaggcggattccttttcctcggggaagagaaatccacggtttgttgcccttgccaataacaaaaatgttggaaagacgagtggcaaagctgttgccgttggcatctttcacatgaaccacatcaaaagagccaggatgtctctccctattggtgattacaccaattctccccaagttagcacctccagtcaccatacacaggttcccagtgtcgaacttgatgaaatcagttatcttgcctgtttccaaatcaatctgaatggtgtcattcaccttgatgaggggatcagggtatcgaatagtacgggcatcatgggtcaccagatgtgggattccctttgtgcccacanagatctttctcactttgcacaacttgtacttgggctcctcaggtgtaattcgatgaacagcaaagcgacccttggtgtcatagatcagacggaatttctctccagtcttgtcaatgcggaggacatccataaaaccaacaaggtangttataatcggtccggaattttccatctaaccttaatgaatcgcggcatgcaaatctttttaaatcaacctccagtcaggcaatacttaatcgggtccttaggaaatgattagggcaggattctccacattgtgtggacactgggtgtccag

SEQ ID NO: 30 - DNA, 731 bp, Rattus norvegicus
  Genbank Accession No. AA799511
  misc_feature (1)..(731): n = a or c or g or t
gggtacaaaagtatttattttataaaacttgtatttaaaatagagcttatctgtcaactcacaaatcctaatttaaaacataacacattacccttagctaatctgatgttaacctttacaatcaacacccatttttggaattttattaagaacctgtactaaatgaagtttttaatcagaaaacattcccttttaccttaaaagtgcttcttaaatgaaggcaccaacaagaactactttcagatggtacagaatttcttatttcttgaagactctgtggttgaccacttcttcattagttacctgcagcaagacaccttccattttactaccaacaccactgaaggaagcaagaaaagctttattaatgatcacttggcttgcctcagctgttgaaatgaagcactttacagtctttgtggcaccagaatatacttgtccatggttcatatcaatgccatgggaagtgggaaaaactcaatacgggttcctccaccataaccccaattcctccactcctccaggacatagttcctccaacataggtccccccagtccggaacaacaaagttcaccctcatgacccttgtaaaggtgcgctcngccgctcggccaatctggcccaggcaaatcccaaaggggccataatccaacaggcaacgttccggggaatgttccgccaatccaaaaatacgggcaaagtaaccggggccaaagtgcaccacaatgtg

SEQ ID NO: 31 - DNA, 589 bp, Rattus norvegicus
  Genbank Accession No. AA799520
  misc_feature (1)..(589): n = a or c or g or t
gagatgaagagacagtgaagccctgtttgctacttacatgaaaagatttaaaaaacaatcactgcacaaaatacaaaggggcagggtatgctgtggcattgaatttctcctcactttttttcttgacgtctcaagaacaaattaaagtttccacagcaaatttgttctcaaaatgccgaatggtgaaacagttactggcttcacgcttctgaatacctctaatggtttccctgcgctgcagtttgtaggtttccttgtcgtgacacagtcggtaaatgaagaagcccaggtggtccacgttttcgatgcggtcggtgatcaccatgtgctcatggatgaggtatgactgaggcaagtangtcccggccttgatgttaataagaagctccaacaggtttctgggtggcataacaatggaggtgttcagaggaatcacgtagcacttgtccagattaaggtcanataagcatgagtttcttgttaaatcatgcacaatgttggcaagatcgctgtccgcaaactctggtacagcacactgatgaattcactgcgtcttctcaaagatctaanaatctcttcattgtctgtg

SEQ ID NO: 32 - DNA, 483 bp, Rattus norvegicus
  Genbank Accession No. AA799523
  misc_feature (1)..(483): n = a or c or g or t
aaatcataaatgtacaacagcttcttaactctacacacgcacttaaatttttaaaggaaaaacgttatgtcttattacaccatgatcctggctaatagcttttcaaaactttttgagaaaaatcttaaaaaaggtttcacatgtcacctgaaacttacaaatttaacattatcaaagaaggaatgcttctacactcttacaaagaccactagaaagaaccaacatttaaaaggctagaaactgtctcaaagcatttttttttacatccttcctcaacagtaagtattaattatcaatccatcacaaatgctctcgcatcgctctgtgtctccgcatacaatgctattagcatactganataaagttctaaaatgtaattcgaaactgagccgtcggtactcgggctcacactcccaataacaattaccccaggaattagaaaatcaatacggtcttcaaatacccaattccaatcccaaacac

SEQ ID NO: 33 - DNA, 570 bp, Rattus norvegicus
  Genbank Accession No. AA799531
  misc_feature (1)..(570): n = a or c or g or t
aaggcggcagctgtttattttgaggtaactgtcacacagtactgttatatggtagaatagtcattatgtaatcttgagagaggttgtctaaggtaggatttggagccttccacacttatcagatgccttctcattagtttcttctagttttgcaattctagatccaaattgtatggcccgtttgggcagaagggcagaggatgagagaccaagttccacagctgcaaggcgtaaaatgagcttctcaccaactccacggggcaaagccaggtctaccttttcccaaactggcagagaattcaggaaagatacaacattttcatccagaaaaggaaatcttgcttcctttccatgatcagcaataactctatcatcacgaccaaggtttctagaagaaatgcgacccaattccattgctatttcctcattcaatccttctaggccaagagactgaaagcgggcacgatgacgggaataacctgccaactgctcatctgcnacaatcccagtgagaatcacctttgcactgctcttgntagactgcacagcatcctcggttcacaacaaaac

SEQ ID NO: 34 - DNA, 524 bp, Rattus norvegicus
  Genbank Accession No. AA799534
  misc_feature (1)..(524): n = a or c or g or t
aatgttaccactccaactatttgccaacagtaacactggtatattttgtcaatgtacaatacagagagcacagcccctcatgactggtgccaggtcacatgcagcacagttcctcttccctgtcagacagtgtctttaactaaggacagacagtacgtggagcgtaagcaagggattcgggcactgtgaagcgggcagctcctcgccagctggccccagtcagatacactatggtggtcagttctttctgtgcagatgacaagggaaagatgaaccatgctgacagaggatggggcaggcgggtcgagccactgtgagtcagaaggctgacctccacgttgcaggatttgctctctgcanggatacagagtgctcagtttgcagatctgctggtacgtgacctcgatgatgacgacatgaatgggagggagatgggtgacccaagcaggccagcagagtgatgatgggccagagagggctcctgatctctcttgtggttgggcaggccccggtggctcatgagg

SEQ ID NO: 35 - DNA, 512 bp, Rattus norvegicus
  Genbank Accession No. AA799538
  misc_feature (1)..(512): n = a or c or g or t
ggccaagaatcacacatatctgaacgtgctggtggtaccctttggaaaaactcccatttgggccttttaaaactgataatggccaggtggaaccttctgtaacccacttgtttcaccagagccttagtaagtacatgcctgatactgaaaccaaaaccatgcgcactttggtgcctttgtagtagtggaaagtaactgaacctctttcttttcaaacctagatggatcggcaagccgcttaacagaggactttgggggaaaggaccacaaactcagtccatcggtccgtggaagagtccttggaacaagcaactggctattaaaaaggttattttgtaacatttgtctaactttttacttgttttaatctgcctcaagtggcaaacttcattttatgtgccattttgttgctgttattcaaatttcttgtaatttagtgaggtgagcgacttcagatttcattattggattggatattgaggtaaaatttcatttntgtttatagtgctgac

SEQ ID NO: 36 - DNA, 553 bp, Rattus norvegicus
  Genbank Accession No. AA799542
caaggatttattaagtcatacatgcaaaacatactgctaactgcattagcaaaagatcaatgtaaaaacactccacaattctgcaactgtcaattgaaaaaagtttgttctagaggtcgaaaggcccaacactgtgttcttgccagtgagttaggttgtacagaacggcgttagcactaccgcttgacagaacctcacagacccaaaggtacgggaagcatgtgtccgcgtgggtgaggtctaaagggggcggcatcaatcacatgacagtgttggtactctggcaagacagtgatgtttcagaatatctaaaatagtttacaaactgtaaagccgcatcacgtgatttctacacccagttactacaaaacgacgggaagcactactcagctgattaaaggaaggtgaaaacaggaacgcacttctactatctaccagaaaatctccgaatgcattatcagaaagatcttatagaacaggtcagacatattgctcgttaagaagaggtcctaaagaaaacacttgctaagttagcaactgtgagggatggcac

SEQ ID NO: 37 - DNA, 633 bp, Rattus norvegicus
  Genbank Accession No. AA799545
  misc_feature (1)..(633): n = a or c or g or t
caaatgacttagatttaatcactggaagcaaactgaatggaagcttacaacagaagagatacacgtcagtgctttttgcaaaccgagatgggacagactgggggctgcccctcaacctgatcctttgcaaacaaagatgtccacagtgttcctggaactctggctcaggaaaggggagactgctggttctgtggttcagtcaccttgcttagcactcactcctggccagcatctggagcaccggtttgccggttctggtcatcacccttcttcttgtggccagagacaatgtcatcaatccgcagaagcagaactgcagtctccactgctgttttgtatgtttgtagcttcacagccaatggctcccaaatacccagctctttcatgtccactaaggtaccagtctcaccattcacaccccaggtctcacaattctcctgtgtgtgcttggcccgaagggaggtaagcagacgaatggtactggccccacagttctggatcaaggtccganggatgacctctaaagcctgngccacagccctatatggccattgttccacaccagtcatgggcttagatttgtctgtcnaagcatgggccacagccatctcagaggctcccacacaagcacan

SEQ ID NO: 38 - DNA, 623 bp, Rattus norvegicus
  Genbank Accession No. AA799550
  misc_feature (1)..(623): n = a or c or g or t
acttttattaacatgtaagattttgttttcaacatggtaagggttttgacctcaaatgcttatcaggtctgccacacatttatagcttgactacatatgaaccttgaagacgcctcttccttgaagttttgggtccattgcaggttttccttctcagtacacaaagggtattgcaaggatctttcattttacgcccaggatctcctcaaatatatggggataccaacttgtacagacgaacaagacctcatctcccataccgggttccgtttcatttaaaaatgagttaggctgtcccaacaaactcatcaggcaggttataatagatagtgtagcacataaaatttaaaatttgcacaaaatacatctctcctcctttggtctcacacagaaattaaagtccccccatagaaacaatacaatcctccgacccttctcccaggtcatcagtcctagccgtgtaaggcccatccacagtcccagatgaagtctgggcccttcttctgccattgctgcatggagtcctcttctagaattaacgcagcttcctcagaactttcagangcggtgagctccaactccaagtctcaagtgtcacagggggaccaagttcagggagctag

SEQ ID NO: 39 - DNA, 604 bp, Rattus norvegicus
  Genbank Accession No. AA799560
cacagcagaagttgtgtgagacaggaggtcacaccctacacacaagagtatggtcagagtctgaggtagcccttcccaccctgatgccaaaccccaagcagtcggacctaagttctttcccccagtcccactttaggtgcacactgacagctattaaagttagtgcggccaaaggacccgggcccctccctaatgcccctgcttcaatgtgtttaccattgttcttcactggccaccatctcccgttctgactttctttttacatgctggatatgtctatcacgttaaggatcagtaacacaccagcaaatattcccctgagagacatccatttaggagcattgccttcagaggccttaaacgtcaaggcactgtgtcagctttgggggaatggagctcctcatatcccaccaccaaccctacacatacacacactctcctacccttgcaaatatgggctaaagagggggagtgatggcatccccgtgacagctaaaacaacttattgttcctcacctatagaaacaagtcagagagggaacataaaagccttcccaggacaaaacgggagaggagatacttagggggctggatcctaagaata

SEQ ID NO: 40 - DNA, 541 bp, Rattus norvegicus
  Genbank Accession No. AA799571
  misc_feature (1)..(541): n = a or c or g or t
cgtcgtctcaggccttgactgcgtacttgcgcagtgggtacagccgctccttccgctgctgcttcttggtcttcagcttctcttcatgcttggtgagccggcggcgcatggctcttgtcttcttgggtcgcaggtccaggggcttgtacttctttcccttgtagaatttcctgaggttttccttttgagtctgattaatgacagtgaggacacgggcgatgtatttgcgtacgactcgtatcttgaagataaaaagtccatgaagaggttatgaagctctgtgcagagtccatcatgtcgctccagaaggacctcaccagagtcagagggaagaggaggtgcatccttggcatcagggacatgagttgttcttgtctcagttcagcanatggcaactggtcctggcagccgagatggcacgcatactgctcgtcaggctgggaatacgcttctgtgcacgcagattcacattccagtttggttcgatttanatcaatttcatcatccacgaactggcaaattgaaaacagcctgcagcctc

SEQ ID NO: 41 - DNA, 541 bp, Rattus norvegicus
  Genbank Accession No. AA799576
  misc_feature (1)..(541): n = a or c or g or t
aacagacaataaaagggctttctttttaattcaaaggtatagccagataagtagatttgtttagaaccattcttgtgaaatactttttaaaaaaatacgaccaacttctttgcaaattacagacaaatacctcaactatgatgatctaatttttggtgaataatatacatgattagacagaaataggcaagctcacactggaagattaactatcaaacactcagtcaaaactccgtttatggcccccacttcttgatcgatttctgttcccacttcgtcttctaccgtcttgccgacttcctgaacgactcccctgtcgactctgtctacctgatcggccaccagatcgaccaccagatcggcctgaacggcctgacctgccgccagaccagccgctcctctgtctgggattagaagatgtgtttccatcataatattcttcaatttcaggtaacttggctggcactgagagtatccagtctgagtcantgcactctgcctgtaatctttctgactcacttgtaggaacatcaaacaaaca

SEQ ID NO: 42 - DNA, 464 bp, Rattus norvegicus
  Genbank Accession No. AA799581
agataaagaggtgactttattcagattgctgggaaacccaggccaaagggcagcgatccagactggtaccatctcattgtactctgtgttatgtttttctttctgttgttcaccaattaccctggagccttgtagccagcaggcgaaaggactcctcacctcaaatccattccacagtacccgcccgcccaacaaccagcaagtgaagccttgtgatgaggttccaaggtaacatcctggtttgctgagttttgacaggatctccaacacatccttcaccttggacacaaacagatgggagcccgtcctatactaccaggccactggtcatcctttgccagaaggtgcctgctcatgtttcctgcccaaagactgtataggcgactggtgttctctcggaggaccgacagagtgtgggaaagtgactcctctttgaccctggcaatctctcgaactgtgtgcaa

SEQ ID NO: 43 - DNA, 603 bp, Rattus norvegicus
  Genbank Accession No. AA799582
taaatttattttaaaaatcataaaacgtttcttacaaaagagcattacattctgcacactgctctgaacaaatgccagggacatgtggactattactttcctccctgtcccaccccccaatgttacagtgaccacaaagcaaggtgttcacaataattacacggggggaatttttaaaaccaccaacaatgaacaaaaaataaaagtcactcactctgctgctgtttcaaaatttcaatgttagtttttttgcatgccctccccccaaccctgtttgtaaggaactaaaacattacatctggtgaacagcaaagatttcactacacctcaaatgcagaacacctaggaagcagaggaatgttggctttttaaacagaagcagataacaaaaaaagatgcaggactccttcagttcttcactagtcttagaaaaactttccagaatactgcttcacactataacagaaaaaaattacttgcattagaatccttcaacatctgcatactgcttcacactgttcggcagcaaatacggtgcgttctgtatctggtcctgtgttccccgtatggtaatgattccatcttcagatccttctaaaggtc

SEQ ID NO: 44 - DNA, 597 bp, Rattus norvegicus
  Genbank Accession No. AA799591
cagacactatgaattgctttaatggtggtatctgtacaagtgatgtcaggacacaggacagcaaatgcacagtggacatggctagcagacaagctgtgaatgaataaagagttcacactgctcccatgctgtagtgactaagacagctctaagccacctcctcctcagcctcctcctcaaactctccttcctcctcagctgtagcatcctggtactgctggtactcggacaccaggtcattcatgttgctctcaccctcagtgaactccatctcatccatgccctcgcccgtgtaccagtgttggaaggccttgcgtcgggacatggctgtgaactgctctgagatgcgtttgaaaagctccggaaaggccgtgctagttgccaatgaaggtgccgggcatttttaaggcaccgggtggaatgtcacagacagctgttttcacgttgttggggatcaactcgggcaagtaactgctgtccctgttttgggcatttaccatcggtgcggcaccgccttcaataacatgcggcccctgaaaaggtagccactgtcaagtaacgcccatggggggatgagaggagccatcaggtcctaac

SEQ ID NO: 45 - DNA, 569 bp, Rattus norvegicus
  Genbank Accession No. AA799594
cagtacataaaatgatataggacattaaaacatttatgtatatcgtacattaaattattttccccaagcatataagcatgtaatatatatctaatgatttaggacatacatttaaactcaactataaattcataacaacatgtctattctcaaatacattaagataatgcttgttagacatatctgtgttattagacatgcaccattaagtcataaacctttctcttccatatgactatccctgtccccaattggtctctatttctaccatcctccgtgaaatcaacaacccgcccactcgtccccctcttctcgctccgggcccattcgtcctgggggtgactatactgaaactttaccaagcatcgggttcttactttagggccatcaattggttcatcgtccatacgttccccttaaataagacatctcgatgggtaacgggtcaaatcagcccatgatcaacataactgtggtgatatacatttgggagtttttaattttcggatgccttctcaacatagccgtcaaggcatgaggttagcacaaagtccgtggaaccttttagt

SEQ ID NO: 46 - DNA, 708 bp, Rattus norvegicus
  Genbank Accession No. AA799612
  misc_feature (1)..(708): n = a or c or g or t
caagaggttcaacagaatttacttgtatattttccattttctatactacttgaaggcataggatagcttcatcttagctttctacaatactgtgttttaagtctacccagtaaactaagaggcagtacaacttgaatacaactgaggaggtgagaagcaactcggcaggccctggtgctcaacagttccggaataaacaggtagcgcgcagccgcattaaaaggtagtttgcaaatattcaagttacaccgagattccttccaaacctctgccttgctcaaaccagcgcacctggccactgctaacaccgcggcacggcatttggtgaatggtgatggttttactttcttcttaatcaaaagcctgtggaggtgctgccacgcagcagagtaagtcagctctgctcgaggacgaggtgccaattgtgaagtcacaaaaggtacagtttacatgagaaacgcacattaacaagtggcccaaatacagagctggacagaaccagaccagtaagtctatagttactcaactgaactaacataagtacattcaaaataaagccggagatcagaataggttttagaatcaaatttgcagactttcttgataaaacagaagagtgaccttctgcagttggaaatgaggctctcacctggcgaanagcanagacttggcagtccctcctgcacaggtaaggaaataagtgacaaa

SEQ ID NO: 47 - DNA, 599 bp, Rattus norvegicus
  Genbank Accession No. AA799616
  misc_feature (1)..(599): n = a or c or g or t
ctaaggcactgggtgtgatgggctcggttctgtggctgctctccctgctgctcagaggcaggcacagacagctcctgcgagcatctctaccaacatctctaggctggagaattaaatactccgattttagcagttggttactctaacaccagctcagcaacctaactgatacaatgtatggtgctacatattaataccaagttcatcaaggcctgtgacgagggttccctttcaacagatgaaagataactctcaacggctgttacaatacttaggaagtgtttgacaatgctttcaattccatcaaatgcctaacaaggcggaaatgtaagactcccttagttttggaaatcagaagagagaaatgttaatccctggacagactgacagttggaaggctactgagctgctaggtgaggcctcaggcatgaggggagcctacagtgagaccacctcatctgctggtggctgctttcccgctgctttcctaggggcagtatcttccctccttaccttgacatagggtggtcatctgcttactanggacacatctggatttcagagaactgttcagtgtggacggaatcacggggacctga

SEQ ID NO: 48 - DNA, 539 bp, Rattus norvegicus
  Genbank Accession No. AA799633
gactgcaaacaaagacatctgctttatttgttttccatcagtagcacatactgtttcttgagcatggcagccccatgctcagaggcatatgggtgctcagtcagagactgcagggcatggggaccatggtctgtggtctcatgatcggtcccttcttcaaggctccaggaaggatgctgctcctcagcccttgcgggcggtgctcacacagtgctggtatgccttggccaggtcggagcatagaagtacctcatgcagatggtcacggtagcagcggaggatctgggcctgtaggccagagcatacaggctccactctgcggggctttattgtgctctctgcttttgaagccgcctcgtggaattgttgagaagacagtttatacagctcagcattcttctcttggatgcgttcctgctgctccttgtagtaagtgtcacggcggctgagctcggcctctctgttcttcagttccctggtctgtcaagtggagcaaagaaacaacttgggtccccagaggttgaagaatccaaaaatcc

SEQ ID NO: 49 - DNA, 665 bp, Rattus norvegicus
  Genbank Accession No. AA799641
gaatcagataaggcaaagaatgggaactgttttgaaatttaggacttttagaggtaaccatggtcccctactgttaaaaacaggtatttgtctctcacggttttaagattaagggccagaactatctgcttcacaaatccttgttactctgatttccacatatgatcctaaaggttggacagtggtcccaacagcccgtcaggcccagcttcccgagcctccaactctacttagctgtccatattacgattatcagcttaattctctaagatgtaataaactgacatgcctttgacttctacacactcattaacaagatcattacataacactgcagtgtttcccaagtcaagtgttctttttaatcagatctacaaagcatttactgggatgacatttctgacaaagccacagacttctatcaagcagcatcagtgtagtataaaaagtaagcaaaggaacaaaatagccttcttctttcagcctcatgagcagctgcatttctggggaaggacctacacacatagtaattccttgccaagaaccaggacctctgaaggagggaaatgtggattaatgcattcctttttggtttttaaggagactgtaatagaaatatattaaagatagccttaaatatccaacaatcttctgacttacaactt

SEQ ID NO: 50 - DNA, 502 bp, Rattus norvegicus
  Genbank Accession No. AA799657
gctgggcaaacgacctttatttataaaggaaacagtttccgcgtcattataaacagtaagccacatggtgtgaaggcacttggttggggagatgggggcctcacacaggccccaaggcttctgggagaaatggaggctgctgggaagaacggggacttccaggtgagaggaagaaaggactcagagagaaatgaaggggtgggtagcctcccaggctcagctgggatagtgcagtggcttgctgccagtaggaggcacttagaaccagatctgatttggcaagtgtgtgtgttgggggtggggtgggagttcctgcccccaaatgtccccagcccaacctcaccccaatgcttaaggcagcttcataatcttcagtctggggctgccctcccttgagccgcccttgagcagagaatttccggtgcaggcagaacctctgaagaatagccgcatattacttagatggatccggcaggtctgggtggcaagcatgctggcggtg

SEQ ID NO: 51 - DNA, 616 bp, Rattus norvegicus
  Genbank Accession No. AA799672
aaccttatgaagcagtttaattaggttgttaacaattagaacaccagtttgtgagggtacatgccgttcgtcagggagaactgagaccgcaggtagccctggagctgggggacagctttgatctttggcaaaatctgcgagtccacagctttctgatcagcctttcgctgctctgtaatttcgtatttctccttctctgtgtcgaagatctcaccctcctgatgcctgggcttgcgaagtggcttcttcttgaagtaagcatcagtcaggtgtttgggaattttaaccttgctgatatcaacttttgtagaggtggcgatgacaaacttctggtgtgtcctacgcagaggaactctgttgagggcaagaggtccagtcacaagtagcaaggaccttttctttcttcttcttcttctcaacctttgtcttggcagcagagtatttccttttgtacaaggcctttctggaatacatagcagatcgtgaatacctgccgattcctctcaccaggacagggttccggctgcaatggggcttactcttcctcagctttttagccttagaactactctttttgaccgcaccagcgggccgggcccggggggcagtagcatca

SEQ ID NO: 52 - DNA, 401 bp, Rattus norvegicus
  Genbank Accession No. AA799678
  misc_feature (1)..(401): n = a or c or g or t
aagagtacaacatgctgttcttagccatgaacgaagaacagttaaagggaacatgatgaaagggggctgtctgcacttccaaccacatctccctctcgaactgctcaccgtatgcatggttatcgcatacctctaggctttgctcttcccacagagttagcagaagctaaattaccaggacgcttcctgtcctctcatttaacttcaaatttcagtaccagaaaaaacaacccaaactacctggtgagttttattccctggataattaggatccccaagtaagaagtaaaaatggagcatacaggctggggtcgtcttcgacaagagagcatcaatttagcaatgaccttcaaaaagaacaggttgtangaccaggaaaaaggagcatccaccgtgggaca

SEQ ID NO: 53 - DNA, 400 bp, Rattus norvegicus
  Genbank Accession No. AA799717
ggaaactgggcatttattacaaatggaggaaggaacggtcactcagtccagcggtggccgcagtgtggggcggtgcatacatagtacaggcgcatggcatcctcagctcgggcactgtgtgactggaagaacactgcctccttgtggccacacttctggcacgggtggtcctcggtccggggcaacgtagggtcctgggacacgtctgcgatgatctgggtcagctcgtccacttcgtgcgtgattttgttgacgtacatgcagctgttgtcggcttcctgctggtaatcgcaattccggcacgcgtacagcagaatgcgattctccttgtcctccttggggtacagcatgttattacattcctggcagaaccgaataccgacgaagccagcctcgtgcc

SEQ ID NO: 54 - DNA, 571 bp, Rattus norvegicus
  Genbank Accession No. AA799718
caaaaagagcaaacatgtaaaaatccagggtgctagaaatacaaactcaattcagattcaagcttgtctagaccctggtcataattcccagtgaggtgcctatgagcaccaagtcagggaacgggacaggagtgaatcggaggccaagagaaagggtggggaggggatctcctaggtctcccggtgttcacccctacagtggtatctccatcttcccaatgacttgaagatctgccaggcccagtcctcttggccccaacctcaccctaaccagagcatgaaggccgatggcaatcggttctcccttcccttgctcagtactcacttgctctggcttctagccttattcttgtcctccacattcttctccgtgattagtagcaggttgggttctgtagaaagccacagtgaggctgggggccagaagaggtggggtggagacgggatgaagacgagggaagagctgtcccaggacccctttcttcatgggatcccaaactgtacaaccagctcttctttcgcatccacgcggatctgagaaagtgcactataggcataagcagctatcctg

SEQ ID NO: 55 - DNA, 640 bp, Rattus norvegicus
  Genbank Accession No. AA799724
aaacaaaagcgagaatttattaggcaaacagacttgcagagattccaaaagctgtaatgggtcaatagctagagccacattttcctataggacagaacatgctgtagtcaccaattctagttctgggctctgtaccatcctgagggtggtcctgcttgtaccctgcacgagggactagagcgtgggttcgtttttgcttgcctttttatctttatagtcctttacgctggcctcaaacttgacaagcacatgctggcagacattcaagagctcattcaggcctttctgaaacggctcaacagctggaagtgcaccccgtgtctgaattcgcaaattaattttgctctctgaaggatgggtcgtagtgtaaccacaaaattccacttccgggttcttcatgattatgtaccgcagacaatttcctagtgtatggtcctcctcgtgtagtacaaatgtcacacactgtctatctgttccagctgcctggaccatttccagggctgtcttcctctcgccttcagccattgaggtcttcaatcctgatatttttctctccagctcctgatcgtcctccatcgcggggggcggctccgggaaatcctcaggtggcgctggcgaaaaggaagctcttccccatgtc

SEQ ID NO: 56 - DNA, 588 bp, Rattus norvegicus
  Genbank Accession No. AA799729
cagctcatataaaagtctcttaagaatgcatttgagcacaatatataatagtaataatattataacatacattgtgagaaacttttgaaaacaatataacgtccacctggaacaacgcagtgttacagacgtaggaacccattggtcatgcacattttgtgccattttctttaactagttgtcacaatgctgaacttgtttgaagccatctcgctgacagagcggtaggtctggatggtctctagctggtctaggcaccagtctagttcctccagcgtctccattgctagtttctgatatgattcttctgcaaacaaacacacagacaggtagttaggctgcagcggctgcaggctggccatagccgagtctcctccgcctcggctgctcccggcgccactgacggtgcccccttgctccttcattgtttgcttgccgactccttgcttccaagctctttctggtgctctgcccgggagggggagtggctggtgccaagttttcaccccctcgccgggatgaggtgtcagtgatctaccaagaaacttcctcagaggaagaaggcgggacctcgtgccgaattcttgg

SEQ ID NO: 57 - DNA, 616 bp, Rattus norvegicus
  Genbank Accession No. AA799744
caaacaggaaattctttattgcaaagatacaaaagcagtcacggcgacatgtacagcaataaattaggtggtggccatgaggcagggtgcagacggggccaacagtctgtgatcttgatctcttctcaataatttataacatgggggaaaaaaagcacaaaaaaaaaataaatattgaaatgaaattgccaagtggcaggcggctgaggatgccaggcctcggcatgatcggcatgtgtccctgacaccttttgaaatagttaaagcttgctttaagaagtcagaggaacaagacagaaaactcacttttatctttaaataaaaacatccatatattattaagttgtgacaatgaaatttcagtgacacgaagccatggggcatgctcacacccttcccagccccctcctggcaggtgtcctctgcaggtgctccagtggtactgacagccctgtctcccctggccgccaagagtatggggcctccacccaggaggaccaccagaggccaggagcgggcagcaagccagtcagtggtcacctgcctaccctggagaccactcatccagttacccggcctgccagcaccaccacagaaagactgatggaggctgttg

SEQ ID NO: 58 - DNA, 419 bp, Rattus norvegicus
  Genbank Accession No. AA799762
ggaagacacagttatggggtcaggaaagctcagtgctgtaaactaataggctctctccagctcctgctcatgtctgtttagccttcctagtttacagggagggttgagagtgtgggctcttgtctagcaccacttaaacttgggcagtctgctgattctgacaggtcaggacggggccctgctgttggtctggctaagatgcatgactggctgcttcttcatggtttcaggagccaggccacaggaaattgggcttctggaggcctggggggattctgccgagctgtagggagagcataagtcgctgggtcagcatttgttttaattggggccacccccacaaccacacggtaagatggactcactgctcaggagactccaacactgcggccatgaatgggagggtggatttcccgaaa

SEQ ID NO: 59 - DNA, 567 bp, Rattus norvegicus
  Genbank Accession No. AA799766
gatgcctgacaattggacaagtccctttctgacaacagaccattatgttgaatcctgcctgcaagacaagctgctcgaattcacttaaggagctggagggcagtgctgaagggggccaggttctcacaggacttaagccaccgctgcacattggtgggcgctgccccactgcttcccccagtctgctggagcacggaccacagcaccacatctgccacagtgagctcattcccaaccaaccacgggcttttccccaaagcggagttcatagagcggaaaacagccgctttttccttactgctcccttctctcagctgaaacatggcgatatccacccagctgtcgatgagggttaggtggacagcgttatgcttctgaccaaatagagagaacaggaagcgtgcgatgttcccttctccttcaatggggcacatcgtttgtacactgaacttcatctgtgtcttgggcacgttcttccaaatcagagtgaagcccagctgatactcgtggcgggactgttttctagcctgctccccgaagcacttgagaagattctcaggtacattc

SEQ ID NO: 60 - DNA, 631 bp, Rattus norvegicus
  Genbank Accession No. AA799771
actagacacctttgataatgatagaatgagtatcttgtcttaaacattctcagcactatgcccttattacatatgacatctaaaaacaagatactcattctatcattatcaaaggtgtctagtaaaaaaggaaagattgacattgaagatgggactagaaacccctacttaggggccttcaaacggtttctcacacacatctgtgaggtaggttattatccacattttgtacaagagaaaactacacaaggttacataccttgtgctgccataatagcaaacagggaattagatccaattagatccggtccttagctttgcatttcttttctttataaactttaaaatataaagactgctagtaattgcattcattttaaaagcataagaaggcagccaaatagtttcccgggtggctttacaaagtgaaacaaatgaacagaaaatgcattcagtgaagacattccaatggtgacgctgtaaggtctggtcaagtggaaccaaaaggcagaagcaaaccacgtgaccgcctgtgggacaggtctcaggaaaacgggggagctgggggcagcagactttgaacacacgtttacggctactctgcaagtatttgagaatgcaccaggtactc

SEQ ID NO: 61 - DNA, 673 bp, Rattus norvegicus
  Genbank Accession No. AA799784
ggcagcaaaattgtgttaaaaaaaaaaatctagaccatgaacatgttttactgcttcagtttaagaatcccaagccaaataaaaagagcagcacagaaagcagcaagctggttacttccagacaaataaaaaggatcaaatgcaacagcaggaagacaaacactcccccttttccagaaatcacaattccttcaaataaagaatgtgaaccatgtgccatattgaattgatatttatttcaggacatgccatgtcaaaataaaacaaaagagtcaatccctgcttttaacaataatatgtattataaaagcactttacaactctatcccatgtttgagtataagttacagggtatgtgggctaatgattatctgaaagtatttctctattcagatccataatccaagtgctctccaagtgttacaaggtgacagtacgtagaagtggaggaggacagggaggggagtcgggctttccagttaggaattttgttgcaatgaggaggtgaggaagtatgaagttatttttgttaccttttcatctttatactgtgttaagtaatgcttacaacataaaccccgcaggcttcttctgagttagaactcagaattttttccctgcaaataatgtatttacaaatgtgtttattaacttacacagcaatctcaacctc

SEQ ID NO: 62 - DNA, 586 bp, Rattus norvegicus
  Genbank Accession No. AA799788
cagcttctcagaaagctattttatttggatttcacacacaccaaaagcagagaggagactgtggggctggccctctttgggctggagtctctggctcccctgggcagtcggttcccagcctcccaggcttgtcatcctctgaaggctgagtggggtgtctgccctgcaccacagctcttctccaaagccgaggaaaacccatggggaatacagggtaagaggacctaaggatcatgggatgggagcccacattgaacctcggtgaggtagtctgtcgcctgaggcccacacgggtcctgctgaggtaaaatttgtaagtttatttcagggacgtgggtcaggactcctccttggtccccaggacctgcttccggatgatgtccgtgtactcgcggtccttccccttgctctccttccattttctgtacatcaccgaggcgtccacgttggcaggcgaaaaggtgttgggctcattcagcagggagatcacactcaggaggatggtcctgacattctgcgtggggttccaccgctctgagggtagctccccactctgtgggtcatcaactgggggatggaggatgga

SEQ ID NO: 63 - DNA, 556 bp, Rattus norvegicus
  Genbank Accession No. AA799803
gagattatagtaaaagagaatttattctatacactgtctgcctccgtgattttaatatgagaaacgtagtgcttatcaaaaattggttagatacttttttttttttaatatactacacactggattctaacccaatgaatgctggcttcagttttcatctccaatctctttcttgatccagtcaacataattcagtaacttggtgtaaaagccgtatccctcaccacacccaatgccccaggatacgatgcctgtagccacccagatatcacgactgcggtccctgactgcaaaaacacccccactgtccccctggcaggcgtcatgcttgagagttgggtccccagaacagaacatattttgagaaaatacatcattactgtttttcgtccggagccacctctggcatgcctctcgatcggctatgggcagacggacaaacctgagattaaaagctattttatcttctgttatcccgaagccgctgacataacccataaggtctttgtcataaaaggtctcattgtctgggagacagatggggaggaggttggga

SEQ ID NO: 64 - DNA, 475 bp, Rattus norvegicus
  Genbank Accession No. AA799814
agtaaagacaattttgttcatacaaaacaacagtttacaacagtctgagtgttgaacacaccatcaaggacatgggaggagctgcagacatctgggccctgccccaggcccagagatgcccaggagcccctcctccaccaacccctgagggagacacccctcctccagcacgaggggcatgggggaccatggcacaaagactcgtccccaactgctccgcctcaatcctggggagcccccacccaggttgagtagttagagggtaaggtggctggtgggcagggacagagtcaagacatctttggtgcgaagactgtcccacccaccagaccccgtgctggaaatcgagaagaccacacgtggtcctgcccttgccaaacggaggttggcaagtaccccatagttcaggggagatgcatgaaatgcaactgcctttctgggtagataaccttcccagggtcacccatgggactgg

SEQ ID NO: 65 - DNA, 630 bp, Rattus norvegicus
  Genbank Accession No. AA799824
caccgtgcacaggttcttttattctgtcctgtgggtgtcaacagtgctgacaggatagtgttggaacattcggaaagcacacacctgaatgttgttacattgcactacatcacaacttggtaactactgaacagttatgtctactaatacagtgaatgaaacatctgctcacaccattccctgtaaacaaggctgtgcactacagtaacacaggattatgcataccatgatatcaaggaggaaaatacctctttaaataaactattctatttataaataaactctgattttctcagtacacatttacagacctgatcaataaaaagaaacaatatatatatatatatttttttttctttaaaaagcaaatgttgagatatggaccacatagaaatccacctggggaagggtagggagcaagcatggggcaggagagttatgagttaactctgtgagcacacaccaacacgaggacaggactgactgggaggagcttgtttttacttgaattccagcaagttgcaatcaatcttgtagtacacataggggtagtattcttgctgactcaggttcaggccaggaatatccataggagcatcaatgatggcagctgcactgctgtccagatgc

SEQ ID NO: 66 - DNA, 207 bp, Rattus norvegicus
  Genbank Accession No. AA799858
aaaaattcaaagtcttctttattgcaaaaaatatgtctttgacctgaggaaaggagttgtcttccaaaacctttgcgtaagggaaagggaaatcagcaccagtgacccaaaaagcaggcgcatcaaggaattttaatgcagggccttccaaaattcccgcaaaaatctcagccccgaccccaaattgggggcaacccccttccaaag

SEQ ID NO: 67 - DNA, 412 bp, Rattus norvegicus
  Genbank Accession No. AA799871
aactggatataaatccaattgcaaatgttccttggtcacttagtaactttcgaagctaggtcactaaggacggagctcataactgccccagaccacactcggaagctgttgctcactctccactcagtggccatcgtcaaccggcggccttcgctgacgagcagatctcatcttgtgtggggaagccgaagggtcttcttctgcttcagaccctgaaggctgctcattatctccttcctgggatcctgtgtctcccaccagctcccgcagaaacttgaatttagataaaaacagatgccatacaaaataccaaccgcacaccatcagcaacaggacgatcagcagcgtggccacgaacaccagcagagtcagccccacgttgtgccacattttgagtgcttgggggtgggcg

SEQ ID NO: 68 - DNA, 465 bp, Rattus norvegicus
  Genbank Accession No. AA799887
caaagggaaaactccaagctttattctgttgtcaaggccgcagagcacatctaagtctttatccaaccccatccttacagtccccagggcagactcggctacccctccctccggcctcacttcttctcttcctctttcttgtccttcttgccatccttggtggcctgggaggccagagagcccattgcatttcgaatggcttcattgttgggatccacaccgggaaggttctctaggacgctctgaaggaactctgggtcctgcatcacgtcatagtcatcctcctccttgactggctcagatgtgtccatggctgagctggcatcgatgtcccctgattctgcttggccaaactctgctccctgcagggacatctgcatggcataggcaatctgctcttcctctgtcatgctgcttaggtcaggaagccccgcacggccaaactcctgctggctgatggtcatc

SEQ ID NO: 69 - DNA, 523 bp, Rattus norvegicus
  Genbank Accession No. AA799893
aaaaagtttattgtaaaaaaagtaagccattcacaaaattgaatgatttttagcagtacagctaaaacccaactgcatggcagtgagaagtagtagagtggcccagaataaaggctcttctcttaaggatgttccttttagccaataacttctgtagcatgttttttaaacaaattttatgacagcagttaagcctcatagcagattccttcctaaaaaagcaaacaacatttagaactagccttttgtggggccaattcccatcattaaactagtcccaccccctcccattaacaatccacccaccctcccaccattttggggaaatgtatctaatattactttgagccattgctttaagaaaatgggtcaaaggaaggttaaataaaattaaagggccaaaacatattgtcacaatagaaatgtattcattcccttcaagtaggacttaataggcattaattaaataaaaacaattcatctccagaaaaaccaagtgcagcttaactggactagttttggc

SEQ ID NO: 70 - DNA, 712 bp, Rattus norvegicus
  Genbank Accession No. AA799991
  misc_feature (1)..(712): n = a or c or g or t
acaatcagtaatataatcaaatacacaattatatacaaggattatatacattttgcccagacttttacatcacagtacatagtttccattaaaaatattgtttacatttatcaccaaacaataaaacccaacaacagtagtgttacagcacctgttagtacagacagctttttcataaattacatcataagaaaatatacggctgtaaattgggcttttaaaaatgtctttttataaaatctgaacatacaatgtttcattcacagaatgtttttttttttcaatgttctgactgtacccttgtgcataaaacaaccagctggaatatttagtaaatgctaccctccctctaaaactataagcactgtttgaattacttaggctgagctttctttatgatgagtctggcatggagtttggtgagaaaacaacgctggctttgctataanaaagtcatatgatggtaattaaatctaaagattccaggaaataatacatagggaattgattcagaaggcatattttcattagaatactacacgtaagaaaaggaaaggaaatgcaataatgtccaaaagtaaaccttcggaccataaaggttnagaaaaaaacattcaattccgccaaatccagattacatctccattatttaggaaaatcaacagctaattcagggttagggaaacacattcaggaaatttgctanaccgtg

SEQ ID NO: 71 - DNA, 460 bp, Rattus norvegicus
  Genbank Accession No. AA800015
cacaataaagtttattatgaaaacaggctcatgtggggacagaggggaagacaaatacatctgggttgggtggctcaggtgaagtagtgcggcttcttcacattgatgccatactcgctgagggcaggggtcaagtcctccatggttagggtgtacttgcgatccttgctcttgctccgggagctgccagaggctgtacccttcattttgcagtgctgtagggcatcattggcaatatctgagatgaatttctgggcagctagtgagatgagccgaattatgcgtgggtctgaagcttcaaagccagcacggttcaggtagtaaccagtcactgcatccgggatcgtaggtgtataatcctccaactgcatcaagaagtccactagtggtgtgctggacactacgggcttcacttctccgttggccgcgctcggtagggcgtaaaccccgtcctcgtgcc

SEQ ID NO: 72 - DNA, 613 bp, Rattus norvegicus
  Genbank Accession No. AA800016
  misc_feature (1)..(613): n = a or c or g or t
gaaacagtcaaaatctagtcaggtagctcttatgacaataatcaaaattaattttataactttagcaatatatatcgaacacttacattcaagtgtatagaacacaatccattaaatcttgaaaaacactgtaacaaggcttgaaatgactgcacggtggcaatctagcgttcctctgcccattctacagttatgggaaactcagctctgtaaacacagccagcaaatcacagcactggagcggtcagttgctctgacatgccctgccatagttttgacagtagagggaaacaattcttacaacattacttaaaaatagatcttagcgatgactcatccttatgtacacacattatgctaacctgtcacagacagtaaatgtcagatttatacactggactctgtggagcaccctacacatttagaacttactatgaaaataaacaaacggctgtcaaatgtctctggatggtctgctccacctgngaggatgganggctgctctgaagcactgcgctcactgctgcttctcaaaggcaaannacangtaaatgcttgtagctttccagtctgactttactaacgttcccagaggtaaactttactgactggt

SEQ ID NO: 73 - DNA, 579 bp, Rattus norvegicus
  Genbank Accession No. AA800024
  misc_feature (1)..(579): n = a or c or g or t
aggtttgcaggtgcctctagtagccagaagatggcgctaaaggtatgagagatctgacccacaccgtggatgctgagaactgagctactgaatccttttgcaatggcagtacacgcttaagcagagccatctctccagcccctagatcttactttaactgtgtttgtgcctgtgcctgcgcagtgagcacacaggtccctcagaggtccttggagcacctggagctgaagttcaaagcaattgtgagacattcatgggtgctgggaactgaagtccattccccctcgaagagcagtgtctgtttaaccactgagcaggctctccagcatcctgaacttacattttgttgaaatagggtctcactgtgtagccctaactggcttggaactctgttgattangttggccttgaagattcgcctccctatgcacccgagtgctgggattacgaggaaatgcacacactcggcctgaattttcctcagtggaggttaaagggagtggcggttacaactgggaaaacctttaggaaactaagcctcgtagacaagcttggcttcaaatgtccgcccaaggggac

SEQ ID NO: 74 - DNA, 613 bp, Rattus norvegicus
  Genbank Accession No. AA800034
  misc_feature (1)..(613): n = a or c or g or t
aaaaacaaagtttaatcatacttattaataacaagactttatataaaaatgcagagtataaattcaacttccattatttcagttaacttccaattatcctttccaaattaaaacaaaataccaaacagggcaaattgtaaatttaaatccaagactattaagttacaaatggagtaaatcacaaaataaaaatgcttaacattaagaatctacctatcacataagagaaaaaacagaagtgtgtgcattctgaatgtcctattttaccagcatgatgtatggggtccttttatgtacaaactctgccacgggatcactgttatgtctcactgaacttcgtaatcctatgtgcaacatgtgcaaggtggagaagagggtccacacttagcatacaggactgacacactgattccttaagggagttgatgatacggctacagacttcacacagagaaatgtatttggtagcacagagagagctaaacattttgagagttaanaacaaagacagtcagtcattgggaaacattcaaggacaaagagaactgcataatcactctcacaacaaactttattactaattaaaattaaaatttgaggtgggaccctagtt

SEQ ID NO: 75 - DNA, 396 bp, Rattus norvegicus
  Genbank Accession No. AA800039
acagaactcaaagggtctatttattaggaaggaaatgtcagtgctttatcaaagatgaagaggtcagacagagatggtgggatggaggaccctcagctgggacacttcttggccacaatgaggacagcagaaggcacgagtcccagttcctgcagaggccgttccatgtcagcctctgagaaagcccgtctggggaagccactgagcaactgcaccgggtcctggcagctagctcttcagccttctccctcctgcgctcctcagcagcccggcgtatctcatcttcctgtagtttctgtcgtgcagctgacagctcttgcccttgtctcctccgctgcttctctcgttctaaagcttctcgctcctctctttcttcacgttcccgcttccctcgtg

SEQ ID NO: 76 - DNA, 630 bp, Rattus norvegicus
  Genbank Accession No. AA800044
  misc_feature (1)..(630): n = a or c or g or t
aacgtgaaagccgttttaatttggtcggtacacatttaacaaaatatgttagagatacaaggtatttacaatggcaaaacatgtgaaacaaaatcaaactgttttcagacaggaatgctttttgaggcaggatgtcactgtgctgcccaggcggggcccaagtgaacccgctcccacccagctccccagtggccgagtcggagtcggtgagcagtgctgccagaccgcactgctcgtcaacgtcccatgcgaatccggaagactttcagctcccactcactactcgggtctcgagccccaacacaaagtccacaaggcccagcctaggaggtacaaacactagcacatttggcaattaaagatcatctgctgatgggagctggcagggcagtgaagggcaagccccacaaggaagacttcactggaaggaactagagggaagtggtgtccttaatcacgtggccttctcagcctgcagnaaatacanaactgctttaaaagctcacgaggctgtccttacagcagaanaccagcaaccataagggtccaactcttctcagcagcactcccacccttcctaatgcgttgacccttcaaagtgtcctcatacaacggttgacccaaccacaa

SEQ ID NO: 77 - DNA, 581 bp, Rattus norvegicus
  Genbank Accession No. AA800053
acataaaattttatgtataggatcctaaggactgtcagaaaattaaaaagcacatgtaattagattttaacaataagaacttaaaaattatagtacagcccttaaaatcaaagactagttaaaattgaatgtagttctatcaagaactagaaattaagtctgcgtgcatagtgtcacttaaagttccatgaaaatataaaatatttcgatgactgtgactatatctgggacaaacatcattggcttcaaaacttgacactaagtgactttccaatcaacacacgctcagaggcttcatccagtgagtgatattctgattccatctgagatcttgagtccttggtgtataggtatgatctgttgacaggtacaaacatctctacgcatagttaggacacatccggacatcggggtcttccacacagagcttcatctacatcccagagctgttctccaaggcaagacaggcttctcactgctcatccatggacactgtgcgggctccagcctgagcagtaatgtaggagtcacaaagcttacatttcatgcctaagaaatgaaatggacgtgggatctcaata

SEQ ID NO: 78 - DNA, 602 bp, Rattus norvegicus
  Genbank Accession No. AA800054
  misc_feature (1)..(602): n = a or c or g or t
gacaaggacaaaggcttgttttattttaatgactgatccacgtgaggccacagcctggccactatgtacagacacgagggacgcttcatttcttggtctcttcctccttggacagagtcttgatgatctcctccttcttggcttggaggcgctcctcccgacgctttcgtgcttccttggtcttagacctgcgagcctcagcctggtcagccagtagcttcttgcgggccttgtctgccttcagtttgtggatgtgctccatgagaatccgcttgtttttgaacacattccctttgaccttcaggtacaggctgtgatacatatgacggtcaatcttcttagattcccggtatctcctgagaagccggcgcaggatcctcatccttcgcatccaggtcaccttctcgggcatccgagcgttggcagtacccttcctcttccctatgcccatatgcctgcccttccgtcgggccaaggtgttcttccggcatcgagcccgggaatggacagtcacaggcttccggatgatcaggccatcttgatcagcttcctgatctgttgacnaagttggcattggcaagttcgttggtttcattggggtc

SEQ ID NO: 79 - DNA, 648 bp, Rattus norvegicus
  Genbank Accession No. AA800062
  misc_feature (1)..(648): n = a or c or g or t
tgctgacatggctgacagtgactgtttattgagcatcatgacacaactgagactgtccaaaactaaatgggtacagtctgccacaaaatacatttcactgtcaattgtgaaaattaggaagataacaagttctgttcgaagttttcataaatacattgatttctgaaaaatattgttaatactatattgtatgaaaatctaaaaaaatatgattagaaggaaaaaacattaaattgattatacatataagaatttaacgggttggggatttagctcagtggtagcgcacttgcctagcaagcgcaaggccctgggtttggtccccagctccgaaaaaaagaaaagaaaagaaaaaaagaatttaaaataatgagtttgtgctaagttcttgaactcaagtttttgaagtgttactggcaggcaaaataattaggaaaaagagaacactattccttaaaaaaaaaatactgcttttataantggtattttatactcctcganaatacaatttcgagagtcagaagtcctatgattggcccattaaatagtgtcaaatatcatcctgaggactccagccaacataatgatactgcactgctgtcactaacagcaaagttgatgacatgggggtctaagaaagaacaagag

SEQ ID NO: 80 - DNA, 463 bp, Rattus norvegicus
  Genbank Accession No. AA800120
caaaggtagcgagtctataaactatttattccatctccaattctctggaaaccttctatattcaagtttcaaaatggcaccaagttacataaggtagaggatgtcattaaggcaacagtttcaccatcacagtcatgcctggggctctgatcacaccacttccctcccctcaccctcagggcttcccagtcctgcccctgcttctcggcaacagtcttccagcatccaaaggtcttcaacagtcttcagcctcacaagttgggggcaatccaattgaggatcttcatggcaatttcaaagccaaggaaacaggcagcattggctgggaaggctcggatcatgactgcattgaaccctttgtacaaggaggtgactccttcttctcggatcagctctctcagcacatctctgaaaccattaggatattttccaagaggtgcggtctggaatcgagacttgagca

SEQ ID NO: 81 - DNA, 593 bp, Rattus norvegicus
  Genbank Accession No. AA800170
  misc_feature (1)..(593): n = a or c or g or t
cccagcacatatatcctgttgtctagcacagcaatgccaggctcaccatgcccagctggcagtgggcagaccgatgaccactgacgagatgtacaactgtagcaagccacctggtgcacatctctcctgtagccggcatcattgttgctgcctccaatcacaaacagcttgtcaaggagcgcagccatgccgtgccaggcgcgtcgaacaggcccatcggctagagtgtgccacgtgttgcttcctgggtcatagcagtgtgtctctttcaggtagtcctctcctctgcgaccacaggtgatgtacatcttcccttgcagcgtggtgcctgcatgggcatatacctccttcttgagtggggccacatattcccaggagttggtggcagggtcatagcgctccacagcactcaggttattgtggtagtcacggcctgccacagcgtagatgtacttccccactacacacacgcacaagtctgcatgttcctgctgcaaggactggatctggaaccagcgattgtgtcttgggtcatacctccagcatcgggactcagctcggaatccttggacattattgtcncctccaattaa

SEQ ID NO: 82 - DNA, 601 bp, Rattus norvegicus
  Genbank Accession No. AA800175
  misc_feature (1)..(601): n = a or c or g or t
ggcagcggttccagatttaatggaaggtgcacggtgcgctgcttcgcaccctgaggccgagctgctgcagcgccaggtatggagcgtctgcttttcgcaacggaacagaagaactgagcatacaacttaacaagaaaaaaggccctcctgcctgcctctgagaccgggggatcaggtcacctctgaccccctgagcctgggggcctccccacctccactgcccttctgaagtcgattcctccagaaggagcctagctaggacagccccaaatgggggcaaacagggagcgggatgctcagagtccccttctcagagcccccctcccagtcattttaggaacaataaatactgtgtgacagtagcaggaagggcgtccatgggctgtatgtgtggcagcccaagcaggctggccaggtgcctgccctcattctgtgcgtaggatgatatggatgcctgaatccgtgaacaccggcccactcatttccccggtccgtanagcaaacgatgcatcttcgaacggtttctgcatctgacctctgctgaaggcacccaggtctcccctggctttggcanagctgcagtcactgaactgtgaggcca

SEQ ID NO: 83 - DNA, 437 bp, Rattus norvegicus
  Genbank Accession No. AA800186
ggccaggtttggtggcacctgctttaatttcagaatttgggaggtagaggcaggtggaattctatgagttcaaggccagccagggctgtatacatagtaagaccctgtctcagaaataaaaaaatttttgtgttgtggattacatataatttaagatttattactttttaaaatgtatagttcattggtggtaagtaggtccgtaagttgtgactgtagctacaactttgttttttagtatgtatttatccatgcatacatgaggaagtcagagatcagcttgtaggtgtccatgaatttaaactcaggtcattaggcttaactataggcacatttaccccttgagccttttctctggctcttttatagcttgtaaacctgaaactgtcctcatcaaacactgatgatgtcccacctgtcccgctccccctcgtgcc

SEQ ID NO: 84 - DNA, 543 bp, Rattus norvegicus
  Genbank Accession No. AA800197
  misc_feature (1)..(543): n = a or c or g or t
acaaaacaaccatgttaggaaagacacaaaagtagaagtaaatgtctaagtaaaaactaaataaacatgccaagagctatgacttaaaaatcctaatgatgcactcggctacatccagacccaagacacaaatttactttgccacttaacaaaaaagaagcagaatgcccttcatcttcaatgtatttttaaatgtttgcacattgtgtgtctgcaggcaatggcagtatcatcaagtatttaaacaaagtcacctttcaggttgaatgaacaagtcacatcgaaatgtgcaatatattccaggacagccagggctgttacacagacatgctgtcaaaacaatacaaactccccaaacacctcaatataaatgtttaagaaaacaccagtattatataggcaatataattcattacaaaatacttttcttcataaaactatctgctttagacacaaaaggggtatgtggcccttctgtggtgctaacattaccagcttacacagattcgtctaacactgctctangaacagtgctgagaatgt

SEQ ID NO: 85 - DNA, 556 bp, Rattus norvegicus
  Genbank Accession No. AA800198
ggaaacagacacggtgctctttatttgcattgttcagaatactgtacaaagggagtaaaaatcctattcacactttgcttagaaagaccaaaaggtgaaagttccctatgatacatggggttcaaaaggagggtcaggggggaaacaggtgagtgacctccctctggcccccgggagagggcttgggcagccacactatccaaaggaacatgccccagtcgaaccagcgaggggagagactgctcctctctggcctaacctcgggctctatgacctgcctgccactctgggctgaggagacagtgcccgcagctgtccctactactgccttgtctgggcagggatccttagcactgtggagaccactgaccgcatgtggaagtggcctcctgaccattcccacgcaagccacacaccaggcactgtcccagcccaatctacacaagaatacaagttgagttttaaggaagaacctctctgaaagcttcctcacaccactaagggaagtgtcaaagtaaactgcttctgagggctcacaggcctcttccaacctgtg

SEQ ID NO: 86 - DNA, 613 bp, Rattus norvegicus
  Genbank Accession No. AA800243
acaatatgcaagagactgattcgtatgttcccagacactctgctgttagtcgcttcctaaagctcttgaaaggcccatctgcctcctttctcttgcgggaatcctgctgctcggtcctgccctgggtaccaccaccaaaccccgttccttcctctgacatcccacagcctgtaacagatggtagagaatttgcgtgaaagctgggtccctggacctctgtatctgtgatctgattacatgaaccagcctttggcgctagccttgggggatggctgctcttctgtgtcacccagtgctcggagcacataagcgcccgcataaaccaggaactgtccggtcacctgggcagcataggatgcgaaccgcagcagactccttaacaaggccttgaagcttgtgcagcggatatcatacgacactgagtacatctcatacatggtggctttgacattgagacagccgaggaagtccttgggattcagcctgtataggtcgaaggtgactctggctattcctgacttctttgtttgtgtgcagacatacttattgcccggtgtccatttctgtcccttttccaagatcatgaagtgtgtgttgtctcttagggtctgaa

SEQ ID NO: 87 - DNA, 688 bp, Rattus norvegicus
  Genbank Accession No. AA800250
  misc_feature (1)..(688): n = a or c or g or t
aaactcaaatactatgtggttttatttagaaataaaagattgttcgtttgtacatcatttaagaattataccagtttatcactgcacaagaatgagagacaatggtgcaactcgagtccctcacatcaagtactgccaagctgttgatcataatctgtgaagtgactccttgttcatgagagcagatttttaacaagacgagtatgaaaggaaacctaggtaagctatgatgtataatcacataagctggtcctgtagctgtcaggtttttcagtaggaacggatagcaggaggtacagtagcacagtcagcctcattcaaggtcttgtcaataacaggtctgtaatccaaagtaaccttcccagtcttggtgtccacatatgagagggtgtgcttcctccagtgttccgcaaatggcttcttctgctggccctcgatgggcttggagtaatcatactcatcaatccgcaccttgtaatcttccctggcatgagctccccgtgactccttccgtgcttccgcaccatatatggtctgcagtgcgcacagcatcagattctgcagctccagcgtctccaccaggtctgtgttccagaccattcccctgtcaaacgtcttcagatgctgtaggtctccatanagctggctgactttttcacagccttcttgcagcacacttcccacacgg

SEQ ID NO: 88 - DNA, 609 bp, Rattus norvegicus
  Genbank Accession No. AA800258
acagcaatgcactaaggctgcttttaatggcggcgcagtagagaagacagggttcactagcttgagctcatagaaagatacccattgactcgtgcaaacacctcaaaatagaaatctacccagagccagaccccaggctgtgaaaaccgcacagcacacgatagagatggcttcttgcattttgtggggtgaaagaatgactgtgccccaacactgtgttcagagcgtgggaagaccctttgtcttcagacggtctcacctgtgcctttacttgggtgggagatgggaagaaacatgcttcctcacacactgttttattaatacatgttttgtttcagtaggacgccatccattaggcctgccggagccctcctgggtatttctgggttgtgttgtgtacatgtgtgcttgacagcgacagcttcgcttctcatagcactgtttgccttactgttagaattccagtaaagtatcctttcccacattccttgccaacaaacccagtaagatcctgagtcctcagcaaacatctggttttaaaatctggaaaacagtcctgaaagaaaaaaaaaaaactactttctgaactctgggcttcatgacagtagt

SEQ ID NO: 89 - DNA, 569 bp, Rattus norvegicus
  Genbank Accession No. AA800268
  misc_feature (1)..(569): n = a or c or g or t
caaatttcagccataactgaaagactttattttaagaaaaatttacagcaaaacagaacttgaagttagcgggtttagaggatatggcaaaacataattaccagaaaagctgcccaagcattgatggcttcttgctagatagaggagagtgagtggcaggccctaacctcactcacctttcctgattcagagaaccttgacccttttaaggctgggcccaggaaccccattttccaatttctcccttcttggagtttagaaaggtttatcttatctgtcaggcttccaagatacagaagatagtacggagaagggaaaaacattctattagttccagtgccttccctcaatgcctgcagacctatcagcccgtctttcagtatttgttgattccaaagaggcgaaccccatgggactggggcagcttaggcagcagtacgctgagcagtgaggcagtgttgatgaggaaatgagcagcatcatacttggcgtagaagctggccagtaggtanagtacaataggggaaatgctgaggaactttcgtgaggaagtaaactgtagtccgtag

SEQ ID NO: 90 - DNA, 420 bp, Rattus norvegicus
  Genbank Accession No. AA800290
aaatacaaacaaaaccaagtttatttacacaaattacagtatttaccacatataaatattgacagttgtcactgtaacagcagacaacttcactttcaagtgagcactttttgaaatatcacagagctccatgcctctgttcttgttctgctaccctgatggctcagtttattacatagctcaaggcggcccgacactcccagcaatccttcagcctcccaggcgctgggactaaggtaggagcctggctcagtgcccttggaaagtactccccatgagttgtgacaaaccctcaaacacgtgtgtaacagatgagaaccagcagttctggctacaggaagaaagaccactgactttcctgggctccttagaggtctgtgctttccatttcccacttgacagaactctgtggcacgaggc

SEQ ID NO: 91 - DNA, 596 bp, Rattus norvegicus
  Genbank Accession No. AA800296
cagtgtctacaatcaattttattgtaatataatctaaaaacataccatttagaaaataccaagaaaaatttatgtacaagagttgatgctattgcatttggataaagctggcaagttcttgctactagcatagcccaggaaacaccaccgaggaaacctaatatattggaatagatgttgtgccgtttggcccacagtttgatggctctcagagttaacctgaagttgtcaatgtttggtactagatgtaaaatctcatcggttaccctgcaaccattaaggcttcttatgcatcttatatctaggtttttaagcagactgtcatctcgtaggtccaaatcttctggaatagtctgcagtgctaatcttgcaaacaaaatatcaatctctattccatcaaaacagagtttgataactggtacaaatgcctcttcaacagctcttaaatctttcacttcttcttgtaatttcaatttatcatagaatgaggtgaaaaaatcacttcgatcaacatgtcttggtgcaacacacaacgcatcaatatcagcacctttcgtatgtactcctagtctgtaggatccaaatgtaaaaatttt

SEQ ID NO: 92 - DNA, 556 bp, Rattus norvegicus
  Genbank Accession No. AA800305
ttttacaccactttattccaacctgagcacctcaatataaaactaaacactggtgagctgttctccttactaattttgagttactgtaaaatgtacacattctgctagcagatcaacacttaaatagattaaatcatctgacacatggtagatttcatataatgaaaatacctaaaataattagtgcaatatactgattaaaataaaattgacttcaaaaaacaaggcttcaagattactaataacattgtaatacttatgttacaaattgcaagtacggtgtttattatggttctagcatgtaagaacagcaaagccccttcctttcatagggggagaaagaaataattagctgttttagtaactgtacattttgtatgtttaggcaattcttaaatattacaggaaataataaacatatggagactacaatgcagtactctatttacagtacagctgaatatttaaaataatcaagtttgaatgtacataatggttagtgcactgactaatcatgtccaaagggaagcagagccccctccctgttctagcctcg

SEQ ID NO: 93 - DNA, 560 bp, Rattus norvegicus
  Genbank Accession No. AA800318
gaaagtgtctgcaagttttatttgtagactctgttaagcttgaaccataaaagctgcaaaacagtggtttagagagcatgtcaataccatgggggttggtgggtggaaactgttccttctgccagttcctaaggctggaagtggctagggcaggcagtggcgaggaaatagctggatgagctgaagcttgggtggcagtgcttactcaagcctgactcctgcctgtctcaggccctggggtcatatacacggcccatgaagactgggaacttgtgtcgctggtcccagagcaggaagaggaaaggctgctgcacctcaaagatgagtaagtttcgggccacggagatggtggaggctgcggctgcttccacacctgtctctgtcagttccaacaccgtctcgtgtttcatggaagacacctgaagatctgggtcctcagtcagcccacacaggttgagatcgtaagtgaagtcaaagaattccagtttctccatgattgacagcatgtcttggatgctctttactttaatgcgaggcatcatcacgtaagtgggctgaaa

SEQ ID NO: 94 - DNA, 560 bp, Rattus norvegicus
  Genbank Accession No. AA800339
ataccatactatactatacaatacatacacttacaagttgccacatggaattctgtgtaagcaatgttgaggtctactgttacaaaatccaagttaatatttcccttacctagatgctcaagagagcagtctagctttgttattttccaccccctccctagacccagctcagaagttgctcgggactactagctaccatctgcttaaccttctcaggcaagagcctaggcagcttctagttatacgaattcaggctcagagcctcaccggttaaaaacaaggctggagatgccctagggcagaaagttgggtaacagggtctatgtccttgtgcggagccctccctgtggggattggagggatgggacacagtgtgcatgaggacgggagaacaaagagcctgggacaatttatgttatactgaactgtccattcggttcattcattccgctaaaccgttcataaaattaagagtattctgaatggcctatgtctttcttctctccccaggactcctagaagcctgcactttccacaaaagttaaaatccaagaggtggg

SEQ ID NO: 95 - DNA, 678 bp, Rattus norvegicus
  Genbank Accession No. AA800429
atatacgcaggctttaaatacacacacacacaaacacacatataccaaccatgacccacaggtgtctgtggatataccattagtaagaagcccacaatgatttctgtatggttttgcaaatattgaacaagcttctgctttatttattgcaaatgttactggatgactttctaggtaaagtgttcagggttggagctgtatgaaatctgtaatcctagatctgtctttaggaaaccaatactgttgcagactctcctgtggtatactaagcctcaaaatgacctcttcctaaaaggacctaccaaagttgtacttgggtctggagagaaggttcagtagttactaactagcacctgttctatagaccccatattccattcccaccacccatatggttcaaagccaacaggaattcaaatgtcatagtaccttacaccccctgctggcctctcctggcactacagagacacatgcaaatgaagccctgatactcatcaaataaaattaaggattaaagacaaattttggtttcatgaaatgaattctacttccattcaacattttacaaagaataatgggattcactcattttcataattagcctttggaggcagatataagaatttaatttatgttttgatagtacagaataaagactctaaatatgttctcacacaa

SEQ ID NO: 96 - DNA, 439 bp, Rattus norvegicus
  Genbank Accession No. AA800499
gtttaatcccctccctcctgagccctctgactacagaagcaccacacccagtacttgtggacacacctgcccttgagggcacattttcttctaagcctcccattccaccagtctcttcctttacagctctgtgacttcttggaaagccacttcctggataaggaggtgaagctcatcaagaagatgggcaaccacctgaccaacctccgtagggtggcagggccacaaccagcgcagactggcgtggcccaggcatctctgggcgagtatctctttgagcgcctcactctgaagcacgactaggcctctgtgccttccaaggggctccctcctctgctctgcaccgaccgcctcagcacctccacccgaatgaacctctaaagccactaggcagctttgtaaccgccctggagcctctcccaagtcttggaccaagtaa

SEQ ID NO: 97 - DNA, 495 bp, Rattus norvegicus
  Genbank Accession No. AA800566
caccctcagcagaaaaaacaatacagtgatagaaaacctccccagccctcccacaccccaattaaaaactagaaaaaatgcctgtcctcttgggctgcgatgccatggtagtctgactcctctggggcactgccatggagtgggctggcccccagagcaccctccacttcaccttggggaaaggaggggtgcttatggtcacaggcgttaaaataggagttccagtggtacccgttcccacacatgcacttccttccttttccccagggcctggaccaaagggataataggatagaagtgagccacaatcagcagattcaggagcagagacacagcctacaggaggtcaaggaggctcccggcacacctcctccctctcccccatttaaaaaaaaggcatttttggggtctttatcataccaaaaaaaatggttcctttcagacctgagaaaaagaccaagatgtccagtctgggcaggagaaactgcactgaac

SEQ ID NO: 98 - DNA, 551 bp, Rattus norvegicus
  Genbank Accession No. AA800576
acaggctgaagacaggtgcatctgaggtcacctttcctcttgaacaggccatgacattctgctcacatccatgccggttaacttaaagctagaggtataaagtgacatctacagtgtatttgcaaggccagagctacagtggcaagctgcatgtggctgcgcgccaaagctcagtggtgctcagcgaggctcccgggcgctcgctgctctaagcatgcacttggaaacccagctcatcagtcccttttaaacagagacgggatgatgtagacccaccaccaagactcgcggaaggggctacttaccacaacctgcattaatttataaagtgagatcctaagtcaaacattcacagaaaggcatattcactaggagctggccaggcagactgtctttcttagtgacctgtctgctggctgttattatagttagcatttaaaaaaagggggggactgaattttaaaatagagcacttggcggggagagttaatgtgtgcatgtgcggaagccgctccctgcactctgctgtattcaacagtcaacactgcaca

SEQ ID NO: 99 - DNA, 506 bp, Rattus norvegicus
  Genbank Accession No. AA800613
cacactcaagattttatttaaaaattccaaaaaaacccacaaaaatagacttgtacggtaacaatatattacttaatatattatagtatatacttaatacagtatcagttttaacattacaaaaagaaaaacggagtagacgacccaatatatataaatactataaaatcttattacaataaataaagtcgtcataaataaagggtccattggttggggcaggggcgtgggggaaaagggatttggcaatggctttggctatttgctttgggagggaaatttgagcaccaggattctcaggagaggctacaaccaccggacactgaacttcggggtctagtaaaaattaggatactattgtgggagccgggtcttcacagcacttaacattccaggagaccagagtttccgaggggctggtgcatacctgtaaccccagaacttggaaaaggctaaggcaggattatattgagttcaaagccagcctggggtaccctagtaatccc

SEQ ID NO: 100 - DNA, 642 bp, Rattus norvegicus
  Genbank Accession No. AA800626
ataaaggacaacatttaattggggctggcttacagattcagaggttcagtacattatcatcagagcaggagcatcaaatcttccaggcaggtatggcagagaaggaactaagaattctgcatcttgttccaaagggaaccaggaaagactgaatctctcaggcagctagaaggagggtctcaaagcccacccaatcagtgacacttcttccaacaaaaccacacctacttcaacaaggccacacctcctaatagtaccactccctatgggccaagcatattcaaatcaccgtgctcagggttattttcactggggttttggttggttgatttttggtatatggatcccaagtcttaaaacttgtctttcaatttacacttgggccttgctcttctgtcttctatatcctcagtccaacagacacagaaagggtggtcttttgaagataatcttacccctccatggggacattttttcccagcattctaaagccaagatgtaagctcatacacacagaatactgaaacctttccttgaataacaaaaagggagtgtgtagatcataaaattgttcacttggtcttttaaaataatatcgtagttgctaaaaagacttcagtgtaccctcaactcttttatcct

SEQ ID NO: 101 - DNA, 721 bp, Rattus norvegicus
  Genbank Accession No. AA800665
aaagcacaaaaattgagacaagacatatacatttgtacatggaggaaaataataccagagagtttacaaaacccttgtggctgtcattaccatttggtggctctaggactaaatgggctgacagcatgagggtagcctcaggagggccccagttcccagaggcaggaggctggccagcttggcgagtgcttacaacactcacaaaacacagggtccaggttctcacagtggcttcctaagtgccactgcagtgacacctgtggagcaccccaagatgagtggataggaacctagactccactgagggtgtgggaagaaccctcagaaagaaggctcagcagtcctgcctgcaggacatagttcaggactgatttcctccaaaccaccctaagagttgtaagaggtgagtattgctgaagatgggcaggggccagggtaaggcggaggggcagagtcccttgggaggagagaagccacaacaaacaggtcagcagacacctaccctctcagaagactgctagaggctgggcaggacttgattgacttgtcctcagtccctccccatccccaagtcccaaccaaccccactcactatacattcagaagtctgaagaggggctaaggaaggccccgaggacacaaggtgcggtcacaccatgaagtccaagcaggcacagggtcctgaactatcgtgaacacctgaaagacccccgaagataat

SEQ ID NO: 102 - DNA, 595 bp, Rattus norvegicus
  Genbank Accession No. AA800679
atacaaacactttttattttgtttttaatttagaacatgatacatattcacaagatttacactttatatcataccaaagcaatctagaaacactgtacagagcacacttgaacatttagaaggctatatataatctgtggtaaagtcataggcatcgtcttcttcactcattttatccaagataaaggatctgtcagatggtttacttgctgttgattgcccaggtaacatctccctggtctcttctacaggagtcacatctgagatctctgcatttttttcaccagtaacatgttcttgatcatcaccatcctgttggtcttctgtctgttttggtgactcttcggggatgtccttttcttctagtattccatttgtcaggcccgaagaccggaaaaggattttattagttaaatgagggcccttgaggactagtggaaaggaatagaactcatgttaatagagaagccctccagcattgtcattcttattaactatcatgatacgttcattcatgtaacaattttaccttgtatgctgtgtgcattattcttttctagttcttctagattaaagcccctcttcatgattgctg

SEQ ID NO: 103 - DNA, 632 bp, Rattus norvegicus
  Genbank Accession No. AA800686
  misc_feature (1)..(632): n = a or c or g or t
aataacaagaaacagaacatcagtcccttatttgtacaaaaatacctgaaagtttacaattaggttcacgagccaaagagctatatagcacagagtgaagcaaagcacgcgggataaaggttttgtctatcaattaacaccctctgcattccctgaaaacgtttacatgtcaggtcattttccggtcactgcagtttacactatgatatcacaaatctacgatgagctagtagcgccctcggaggcacagtgatcggacaggctgtcaggtatttaagtgcagaaaggagaagacaaaacatctaagctgaggcacatatttcttcaaagtttaagcaaacaaaaaaagaaaaaagaaaacacgtttggaaactcttaacacctaataatataacagagcctacgtattaaaacgctaaaaacccaaagcatttggcattttccttctcaacttagtccaggtggttacacggagttgttcttaagaaaagaaaatcacaggcagagattgcaaagtcaaacaggctccaaacaaccctgagctgtccccttacattcatgtcaattaaatacaanaataaaagtcaattgtccttcagtctccggttaagggcggctgggtgcccgctaac

SEQ ID NO: 104 - DNA, 533 bp, Rattus norvegicus
  Genbank Accession No. AA800693
tatttgtgggtagtcatagaagtcaacagaccagcacagaacagacacagctacacagtgctcatgtccacaaacacactgacaggggacagcacacagggctgggagacttgggctaagaccacctaagtccagagcacgcccctcctgcacagcagggattgtggggccaactgtgctttgctctaaagaccaggggcctctggggaggtgaggtctctgggaaggactagcagggtcgggccagccccacagtgcagcccatttgacaattggtccaggtttgcaacacatgggtgagattctgacatgctcagtgccaggaatgggcagctataaaccagagcattcacgagtaacaggtttcattcttcgagggctttgttcatgaagagttcacctccatgcacaatacactgacatcatacccccatcatccaaaaaaaaggtgttgggtgttttgtgggaatcactcaggcctgagctttgagaggacattgcttctgccttcctgctctgtgagttatgaggga

SEQ ID NO: 105 - DNA, 636 bp, Rattus norvegicus
  Genbank Accession No. AA800701
  misc_feature (1)..(636): n = a or c or g or t
agcattttcaaactttatttacaactgtcacagtgacaaaaagtagtttggaaaaaaaaaatgctagtttctccctgagcctcgatacagaacagacagaagtcacaggaggttcatctcacaacaggcatgtcactgaaatactaggattttttttttcaatacgatcagttagaaatacacacaaattacttaaagaaagaagaggaggaagaggggaagagaaagagaaagagaaagagaaagagaagaagaggccagacaggagctcagccacttgtccaagagcagctgggtccccccaacaggctcaaccgctgaggggcctgacgttagctatcagcccctgacctgctcagacaacacacggttgtacaacatggtctagtgaccggcaaaaggaagaagccaccccacagacacacatatacacaaagctgattgatactggatttacaagcacatcccgtcacacggcaagaccaagacagatcggggtaggggtgagaagacaccaanacacaggaatttcaaaggccaaacacctgtccataaagggaggcgagggacgagaaatgccgtgggagaaggggagaaggatgaacagatctctgtagccaaaacagaacagagtgg

SEQ ID NO: 106 - DNA, 663 bp, Rattus norvegicus
  Genbank Accession No. AA800719
gaaaagcagccttttaatatctaattgaatccagtgagtgggaaagactcaaaacatatgtccccttgagaatacctttacaagaacaacaggccagaggcgtctcttccatgggaaactgacatcccctgtgtgctcacaaaagtgaggtctcaactcatatgcatgccacatagtttccaccccatcccaccctgcccaccctccacaggtgacagattcacacaccgaagggactggtttcttaaaccgtggaacagaatgtttaaaagaagataaatctagccaagtggccagataccagaaataactcaggggcagttttacatacacaataaaagtcaactcatataaaaagggaagttttgctaattggaatcagaggcaaaaattacaaatggcagagaatccagctacccatatgagattatttaagaaaaacaaaaaaccaaaccaaaccaaaaaaaaaaaaaaaaacacccccaaaccccaaaagtccctactggagactcccttcattacaaaagtatgcaaacatctcaatataaacgaagcccaggcccacggctcgctctctctggacaggagagcatagctaaaattccccgtgtggaattcatgcctggaccaatgccccaccctttgggaaagaaagggaaggat

SEQ ID NO: 107 - DNA, 597 bp, Rattus norvegicus
  Genbank Accession No. AA800745
cacagttctaacagcgcctttactttttcccttctgtaaggcccagggagctctgtcaagaccaagtccttcactttccttcactcttccttcagccacttcaacagctggggtgcaaagtaggtgatgataatgtcagcaccggctctgcggaaggccgtcatggactccagtacagcagtcctgagatcaaaggccccagccttggctccgtgccacaacatggcaaactctccggacacctggtatactgcgagggggagctcggggtgcttgtccttcacctcctgcaccatatccaggtagggtaatcccggctttaccatgagtatgtcagctccctcttgaatgtcccgggccactgctcggagggccaggccacgggctccaggaggcagctgataacagcgtcggtctccgaaagctgggcttgactgagctgcatcccggaaaggaccatagaggcaggaggcaaatttggcactatagctcatcacagagaccctgttgccaagtccatgttttagcagggcagccttgatggcttcaactcgtccagccatcatgtctgatggagctacaacctgacaacctgcc

SEQ ID NO: 108 - DNA, 637 bp, Rattus norvegicus
  Genbank Accession No. AA800749
aagcaccaaaagtacacagcaatggttggtacataaaaagcacaattattgatataatttcttaccatcaagtttacaatctaaaataaaacacaagaatattgtcagcccacatcaaagtttccttattttggaattggctactttggcaaatgaatgaggcaaaatgtcctatttcaggcaaagtattaataaggctttgaatatgacacacaaaatattttttgtgtatccattttccatgttacattatggtaactaaggacaaaaagggcacttagaaatttcataagcacaatgaattacttcagattgttctcagaaactcagagatgttcaatgacaaatgccagcagccagtgaaagcctacaattaataggaactagataaagtctttgtcttggccccatttagacctccatctccttccttactaagggctctaatgttataccccacagtgaaaggcaccatctctagatgaattactacataattatgagatcaagcttactggaatattgtctaaagagaagtgagcaaagccagcagtggggactctggctaagtgatgtcacacaagcaaaggcagtcaggcaaggccacgcacatctaaagagattgggaaagcacagg

SEQ ID NO: 109 - DNA, 547 bp, Rattus norvegicus
  Genbank Accession No. AA800750
tcgggatacacaggcacaggcacctgcgggcgcttcagtcactcgggggactggcgcgccccacagaaccaaggatgggcttttataggattttggggagcagaagcaagcatacagaagcagatgcatggttacagggatataattggtggattctaatatggcaagggtttagcccgggggcaagtttcctagctacctttctgaaacataacggctgactcggccccccaagggttcagcccgggggcaagtttcttagctaccttcttggaacataacgactgactcggccccccaccagggtgtgggacctctcccggggcttttcttcattgtcaggtgctcaaccgaagtcgtcctgttgccaggccttcaaccaaacatatcttgcttggcagccgctgtgtactcagtgttctaacctttccctgaaccagtcatcttaagtacagccttgcaaaatggcgttactgctgctaagctggggtctttcattcccccattttttttgttaactttgagtgaaatctttcactcgacttgg

SEQ ID NO: 110 - DNA, 475 bp, Rattus norvegicus
  Genbank Accession No. AA800753
agacaacagtatgtagtagttttgaatccactgagatgttgctttcaatttgaaatattgtgtatacatgtatataaaaaataatccaatgtatgactcatctgacagatgtttaagatcaataaagtttttgaacatgcatttaggaagagaggggagaagcccaccccgctaccctgttgttgctggcttatttctgcagtggtctcaatagtggtttttagagggaaccatgtgccttcagtcttcagagttacgataagataccataatcaagacgggaggggaaatggggaatgggcaggtattaatcttaaatacattttgcactctatctggtacaagataaaaacaggttaatggggataggtattaattaggaataaattgcagtcagatcaagacataattgccgaattgagtttttaatagactgcatatatagatgtttagccatactctagatcaactcttt

SEQ ID NO: 111 - DNA, 520 bp, Rattus norvegicus
  Genbank Accession No. AA800787
ttagaagcaatgttgggcaaacagacaggcaaatatctgagaagagatatcgtacatcaactagcactttaaacagttgaagagaaaacatggaaagtacttacatggaccagtttcttatacaaatactaaagtgtggaaaacatcccaaaccaaatagagtattaccgtcgagaagcaaaaccagtaaaacaaaacaaaaatacaaaaaaaaaaaatacaaagatagtgtgtattgtctataggaaataatagtgtaaatagcagacataaactggcccatgtaaaatacaaaaatatttattgaaatcagatctttctataaaacagtgctttggaggtatcttaatatgaatccaatatatgatctaaatgtaaattcgtttagaaacattaacagcattaagccagtgccacccacttgttccaattagtccttttttaaaagctgttttgttgattcatgacaaatacataagacctatgttcttaaaagcacaatccattcttttagaattaa

SEQ ID NO: 112 - DNA, 359 bp, Rattus norvegicus
  Genbank Accession No. AA800797
acacccagaacataattatcatatattaatagcaatataacagaataaaggcttgtggggacagccagtctttcagacatggatggaaggttggcgttcattgttggtgaggttggttgaaggctgtgccttcagcttctggttaaactgcagtgagtaagcccagggttagttgctgagaatcatgttgcaagcagaaccatcgcacatgctgaaactggcccacgaggttgtgtggaggctcctccttaatacgatctgtggaaatgagcccggtggcttcggaaagaacgctgccagtaacgaaggctccaggaaggcttcggtctcaggagctctgccatgctgaccctcgtgcc

SEQ ID NO: 113 - DNA, 447 bp, Rattus norvegicus
  Genbank Accession No. AA800840
ccttctgcccgccttggaagtttgcagcgctcgccacaaagttcggacacttgggcatttcattttgccctagcgtgcaggtcccctcggttggtggggggtgaggccaaccacttagttattggcaaagtcatagaccgtgggcatccactatggggaaacgaagtccaactccttaaggagtaaacatttgccctgtgcactcttcgttctgtagcacctctgtgagctcaccgcttcagtggtgttgttcttggaagtcagactatctgaattcttcaaacgtttttaggtaatgatgttgatgacattcacagactttcatgtctcatactatatcagagtcagactctattcatgccacaataaaaactttagaaacagaaccaagagaccagaactggggtggataaaaagaacatatgagacacttgataaataaaaaat

SEQ ID NO: 114 - DNA, 335 bp, Rattus norvegicus
  Genbank Accession No. AA800849
  misc_feature (1)..(335): n = a or c or g or t
caagtgagatgctcgaagtttattgcaaagaggaaggcggggttggtgtagggaggtcaaggaggcagagggcaagggagtggagtngtttttgggcgaagtatgcgagggttggcgttgagagcgttgcaggtagggagggtgggtttggattgattggtggggggtgtattgggtgcttaataggtttacggtttgggggttcgtttttaggtttaatagtatttttaatttatttgggtgggatgttggttgtatttgggtatacaactgctatggctactgaggagtacccggagacttgagggtctaattggtttaattttagttttttt

SEQ ID NO: 115 - DNA, 358 bp, Rattus norvegicus
  Genbank Accession No. AA800855
ccataaacacctagttacaagttgcacaaatcatttatttttataaaggcagagaagggaatagatctacgaggaaaagtaggggtgtatggcaccagggagggattgtgtcgtggtagaggtggctaggcaggggcaaggtagagagagggggatgacaaatggggggaaggggggtggtgcttagaggggacgtgttggttggccgcggggcgtgagccagggctgtgggtgtggggttgggggggtcgtagggagcagccccaccggctctgcctctggtgagcttgggcaggcttcggtacttacagagactgtgagcccagagcgtttctgtcatttcaccctgtgccccgag

SEQ ID NO: 116 - DNA, 431 bp, Rattus norvegicus
  Genbank Accession No. AA800881
aacgtggatctgggcttttattgctagaccagggacagagcacagtaagaggacaggctagaccaggagcatagtgacccatgtgactaggctagatgggtcagaagggtcagtccatggtccaggggagggaaagaccagagtcacccatcttggactggtagacagcgttgaacttttcattcagctcaggagtaaagtattccctccagttccccacaacacctttccggaggaacttgccctgactctggtctatgatctccttggataaaaggctgtagttgaccatgttactctgactcatgaaggagaagctgctgtgttccagtatgatctcctcttcctttggccccagggtgcgccccaggaattcacttaacttccgaatggttgagcgaggttcctgatgcagctcctcgtaggtgacg

SEQ ID NO: 117 - DNA, 422 bp, Rattus norvegicus
  Genbank Accession No. AA800885
ggaagccttttcaacagaacatttattgagtgccaactgtaagcatctgagctgtgtatgggctgtgagtgacagaggcatgagggggaaaaccaggaaagctgctgctgccccttatcttctctcacagagcagttgctgctcttagctgggttagccctcggaccagcaaggaagaggattaaaatcccaagcatgctaagtgggagggtggtggcgagcttagcttttgtaaggctctgggcgcgttcttcagcaccaggggcgaaataattccagagcaagatctggctgaactggaacggagcgaggactaaagcattgggccaagcctggcaggcagtggttttaagttcctccaggtgcctgaggtcttttgctatcaatacaaatggcgggagaaaaatgacttcggtctacca

SEQ ID NO: 118 - DNA, 297 bp, Rattus norvegicus
  Genbank Accession No. AA800908
aagtaactaaaatcgaacttatttttgcttaagtaaataggctaaaaatgaggaaatacaaccaacaagaaaataaatgttcaaagcactaaaattctactaggtaactctttggttaggttagacgggtattagcaactaagtttaggactcaaaatggctcgatagacttccagctgaagataggtcttttactaaccttgataaaatctaagtttacacgtactgtttcatatttttttaaatgtgcacgtactcaagtggatcatacaaacgtccaactctcaaataataaat

SEQ ID NO: 119 - DNA, 460 bp, Rattus norvegicus
  Genbank Accession No. AA800928
aaaaaaaaatgttaaaataaattacacctgccttcaccaccagtacatgcatacagtgtggttactatggctccgggacattcagcttaggacatctcacaggagccaggctctttctcccaccccgaggccggtgtggcctctgcaaccgctttgaggatggcggacgtatggacacacacctctcactgtcataacgtgggggctctggccctattacgccccttggcaaacgaacagggcaaggggaggggctgaggcaggtaatcagctgagctgggaactccatatctcctgccccacacctgagacctgcgggtgtctctctctccctcgctagacaaaggacaagctgagttgggaggacaacagagtgcccgacagacagacctccatcccaacggcagggaccctgttctttactggctctgggtataaaagaaaagacagttcgttaaaa

SEQ ID NO: 120 - DNA, 206 bp, Rattus norvegicus
  Genbank Accession No. AA800946
aaaaaacaaaaaccacagggttttatttcaaccccaatgggcagggccccgcgggacttggctgggcagggagcaggctcccaacgggctgaggctggcccccagttaacttgccagcaatgaccgggttccgcagcaccacaatgactgagtccccgcccaggaacatcttggaaatataccggtccttgttgaaaggcttggac

SEQ ID NO: 121 - DNA, 495 bp, Rattus norvegicus
  Genbank Accession No. AA800962
catagagtcacctttattggagcttgacctgttgggtttgtaaccctcaggctccacaggtagctggggcagggatagagtatcaaaaagggatgagttgagctgctgtggctgtggggattggctggaagctgctggcaggttggagcagctggagccctggcagggtaaaactgaggtatggcagcgttaataatactcttggagcgttaatactctggaggggacaggcacttggggccctaaggtgcgaaggcacttggagtcagggagaggacacggcttgcaatgggactgggcaggaccaggcccggggtttggcaggcactttggggagtgctggggttggcagcttgggccctgagcagcccagaaggctttggtagtggcaggcacagtctctgggctgggtctgcattaaatacaggggtttcctcagtgctcgtctcgaagctctgaaggcaagaacttgtactgctgctgccggatctgggc

SEQ ID NO: 122 - DNA, 499 bp, Rattus norvegicus
  Genbank Accession No. AA801058
acagtgctagttgagtcatacactcttccagatggacgtattattaaggttggaggagaaagatttgaagcaccagaagctttatttcagcctcatttgatcaatgttgagggggttggtgttgctgaattgctttttaacacaatccaggcagccgacattgataccagatctgaattttacaagcacattgtgctttctggaggttctaccatgtatcctggcctgccatcgaggttggaacgagagcttagacagctttacctagaacgagttctgaaaggagatgtggagaaactttcgaaatttaagatccgcattgaagacccgcctcgcaggaagcacatggtgttcttgggtggcgcagtcctagcagacatcatgaaagacaaagacaacttctggatgaccagacaagagtaccaagaaaagggtgtccgtgtgctggagaaactcggtgtgactgttcgataaaatagcaggcttgtccccatcacgc

SEQ ID NO: 123 - DNA, 410 bp, Rattus norvegicus
  Genbank Accession No. AA801142
ccccctcaaagattctttcaaaggagtatgggaagtacttggatgagtttgtctctaagacccgactggtggacctgggagatgagagaagcttccggagaggcagtgctgagaagcccgagccccgcagcctgggatcaccgccagcaccgcagcaggagggttttgagttggagcttcagaggctacaggcgaactcgtgagcacggcccgcgggttcttccccatcgtgggtggaggcctcattgctgggcgccctgccccggcccccccacctcccgcggcagccacccaacccctacccaggcacacctgcgccaacgcaatggaacttaatttttggtcaaatttgttttaagctttttgtcaccaatagagcatgaacaaacggtcaaaagaagagaaaaaga

SEQ ID NO: 124 - DNA, 608 bp, Rattus norvegicus
  Genbank Accession No. AA801187
acatcaatcagtatcactttatttcaagccaaggttttacattaacaccaacaaactaaattgttcattcacattgacaatgtacatggtttctatttagtttttgaaacttgctgttgctacagcatgagactaatctgaaaccacccgcaagtgtaaatgtgtaccctaagggtgttgacagtggaaatcattatgcaagtttacacagctcatgaccatagtgcaaactcattaatgttgaataagtaatttatctgttttgcaaaggtactgaaaaatattaacaatcatcaaataaatgcccagaattatcaaggaacagctaaaaatgaccaggatccaaataggttatttatattagatttccccataaagaactgacaacactaaaaacacattgaaaaccactgttttaaactttgcatgtgggcttttaaaaaaatatttgtgaccttgagattttcagtaatttttaaccaagtatcatttgactgacaatcctgatataatttacagctgtactattcctgaaaggaacatctacacgcggcctgctaaatataatctgtgtctttgcaaatcaatacaaaagttctccaacatta

SEQ ID NO: 125 - DNA, 492 bp, Rattus norvegicus
  Genbank Accession No. AA801212
aaacgatagtacaaaattgtatatataatatagatctatataggtatacatacagagatgctcatccacacacatatacacggaagcttgtgcatcagaatcaaactgtttatcctaaataaaaaagaaacttttgttttcctgaaagtttactatacataaggctgccggacaacttgaaaaccaaggcaacactgagaagaaccccggggcaccctcctctccatggccttggcagagcacacactgggccaggccagcgagcacagttgctactgtaacagttgacatagcgagacgccagaaactacgtgggaacagaggggtaacctagttagttctcagaaacaaatcacctcagaacaaagtatgtggttgggaaggaggagagaaaggaaaggtgagtcccacagattagagatgaccgactaattaggttccagtgcctggcaaaaccttccaaagacaagagccgtgggacagcagaaacag

SEQ ID NO: 126 - DNA, 600 bp, Rattus norvegicus
  Genbank Accession No. AA801230
ggcctaggaatttattcatgaaacatcaagtttcagagtcgttatcttggcgaacaaagaggctgagtggagaagctcgcagttagaggagggtgcacctgcttggcagagttgaagcgacaagttaggctagctcttgaatggtttgttgctggtgacaaagactgaccctaaagcacaggaaaaagtgctcacagggcctaactcccaagaaggtaaccattcattttccagtgcagatctgtacccctaccccagcctgagggtgaattcatagtccagaggcattagatcccccccacagacgctttgtgggcttcatctttcaggtctgtctggacagtagacccactgtaaccagttagaggcagctggtaggatgaggacagagactttacttagatccttcctgtctccacctaggattactcaatctgtccgtgacaagtcagtcccaactggctggcggctcagctcactcagcactcagaaataccctcttgcgggctgtgttggtatacggatgccagcgccactctacatctgcggtagcctcctgctccagtgtgcccaggcgaatcatgtacaacttgagctcaa

SEQ ID NO: 127 - DNA, 437 bp, Rattus norvegicus
  Genbank Accession No. AA801255
gctgggtatcacttgaaaacttgtccctgtttcaagggcgagttacttaagacaccagcttatatatagcttctgtgagtctggcttctgcataaactttgtaatgtttgccatgaggtttagtggaaaatgttcttttgtctcaaacttggatattgctacctgaagtaataaacaccccaagccagaaacttggtcagtgctggcaacattttttgagtgtttgtgatccaggaatcctagagtgaccgcctgccattaagatttttccaaggacagagtcatcccaaactcttgtttaattaccagataaccagattctttatcagaattatggaataaaatatgtactgtaacaaataatttttagaagaaaactgtttaagataatgctcttaacatttttttttgcaaacattgaagattacattgaagaa

SEQ ID NO: 128 - DNA, 590 bp, Rattus norvegicus
  Genbank Accession No. AA801273
aatagtacactttaatgagagtatatgttcaaaacagcataaacattacagtgaaggaactgtccaggaagcagccatgtgaaagtaaaaattttttattcgactgatttctcaatgtatcgttcaatataatgccagttttaagggcagaaatttggttccactgaaacttggtactgctaccgagagcgactacttttcccaggaagaaggtaaacacctagagaagagaaagaacagctttccagcagcatggcaacctacccacaggctgaggcttgtagcgaatatactcaacatggcacggacattgtttagctggtgacagagtgagaaacagggacggatggagcactgcatgtgctgtgacaacagcagacagaacaagcgcagggtgcgaggacaggcgtagaaaagggaaccaggattttactcaaatgcgtttagagcctttctgtagatacaaatatatatatatatatatttatccaaaaatatgttttatacagataaacatttctcaattaaagatgggtccaaagctataacataaagcatgtcttctgttaagactatccacctgaattttc

SEQ ID NO: 129 - DNA, 462 bp, Rattus norvegicus
  Genbank Accession No. AA801368
gctcgatcgtccagaccccacggcgtcaccatgctgggcatgatcaggaactcactgttcgggagcgtggagacgtggccttggcaggttttaagcaccgggggcaaggaagacgtctcctatgaggaaagagcctgcgaagggggaaagtttgctactgtggaagtgacagacaaacctgtggatgaggctctccgggaagcaatgcccaagatcatgaagtacgtggggggcaccaatgacaaaggagtcggcatgggaatgacagtccctatctcttttgccgtgtttcccaacgaagatggctccctgcagaagaagctgaaagtctggttccggattccgaaccaatttcaagggcagccgccaacgcccagtgaccagagcgtgaaaatcgatgagcgggagggcatcactgtctattctacgcaattcggtggttatgccaaggaagccgactat

SEQ ID NO: 130 - DNA, 519 bp, Rattus norvegicus
  Genbank Accession No. AA801441
cagaaagttcatattcttccactctctgaagcaacagggatctgagcactaacaaaaagtggcaagcctggacccttcttgctatctggttccagagacaaaactattaagatgtgggacgtcagtactggcatgtgccttatgactctggtgggtcatgataattgggtacgtggagttctgttccattctggggggaagtttattttgagttgtgctgatgacaagaccctccgtgtatgggattacaagaacaagcgatgcatgaagaccctcaatgcgcatgaacactttgttacctccttggatttccataagacggcaccctatgtggttactggcagtgtagatcaaacagtaaaggtgtgggagtgccgttgattgagtcacatttggttcttcctcccttttttcctctggatgcactctgatgataccatggttaccccatttgagctctgtttaaataaatattgtcctttcatgtaaattattctggatgtagattgagcttattaa

SEQ ID NO: 131 - DNA, 408 bp, Rattus norvegicus
  Genbank Accession No. AA801442
atcacattcgggatagggcccacatcctccagcgctcccgaaaccaccgcacgggcgaccaggaggagcggcaggactacatcaacctggacgaaagtgaggcagcagcgttcgatgatgaatggagaagggagagcctttgactgccccccccccccgaccttcatttccatcttcaccctcaccatgtgtccccacccatcctgtatccactaacttgagttttcatgttgctgctccatctccaagccgcctcatcttcccgagtccctgccatgcattgaagggtttgggggcaagctctgggtttagggatctccatccctcagctcccctggaccctgcccacctcttcctcagagctccactgcacatgccatggtcctatgaaggctgtggaaagtggac

SEQ ID NO: 132 - DNA, 598 bp, Rattus norvegicus
  Genbank Accession No. AA817722
tttttttttttttttttctgattacagaatttttatttcaattaagcttataaaaatatagctagaaatatattttgaattctaaaagctttttttctaaccagctttaacacaaacatgtccttgcaaaattcaccacctggctgagtttgaaatctgctccctccctgtggaatacaacagagctctctacttagcaaacacatctgagtggagaagtatgtgaccgacttttcgggacccccatgggctacggagctcagatgctgtccatggccttgaactcgctgagggcctgcacagggttcacgtgcttcttctgggaggcccgcttgatcttggtctgtgtctcatcctgcttctctctcttcaccaagggcttcttctcgggggctttcattttccatgacacagcaggaaggttgagggacgccatcccctgtgacttctggtatttggtggaagccacgtaggacgccttcactgtctgcactacagcgttcatcaagttcttggctgcctggatcagggacatggcgctgtccaccccagagacgacaagctctccaccgaggttctgtacttcagccttgacctt

SEQ ID NO: 133 - DNA, 631 bp, Rattus norvegicus
  Genbank Accession No. AA817759
tttttttttttttttttcacatttgaagcgactttattagaaggttgctcgtctttgacaaactccagttacagcacagactatgcagactggtgacttttgcattgatctttgcatcctatttggattttcctcatcaggccattctggggcaatggaggcatgattgccaagtggccagctggccactcattgagcatgggcagtctcgggccaggagcgagaccaggtcacaggttggggaaggcaggcccttcagtcctcaccctcacaccaaattcctggtgaatgaagcacctcactgccgtgttttccaaaagggcaaaataaagaaaacctcccggtccaggaaagaatgtcaagaagtcgccacctttcccactaccctacctggcctgaagagtcctccctgtgcctttccttctgtttcctgtgagacggacatgccgtcagtgtgggcagcaggtaaggtcactctgtggccacttttctaccttgtctccccatgccccaccagctggtgacaggaacgtacaatcaaccatgaacataaatatgaataaaaaaaatgaacttgaaaatgacaggctattaattaaacaaatctataaaaatagttaggacataactc

SEQ ID NO: 134 - DNA, 585 bp, Rattus norvegicus
  Genbank Accession No. AA817787
tttttttttttttttttaggtaaaccatccaagcagtttttattcattaatattcataaatacacacagcagcttcattagagatttcaatttcctcttcagtttgaatgtggagtattaggagagccttttgcatgtcaaggtacaggaagcagagatcaccctgcactgctacctacatttacctgctagaagtaaaaattagttaagtggaaatgattatcatatatatttctctcttccttttgaatgtacacaatgtaacaagagtgacagacctgaaattacaatcaccacacaaacccaggatagctgttgtccactttcattggcaaatacagcacagaggacattgtctgcgagtggggaggtcatcaaagaggaggtggtggaggctcatttcctttattactctcttttaaatttaggttttctaaagcgacatctaaaggcataatatctacacagcccatagcaccaaaatctgccatctccccccgttcatcctcgtctgaggacgagctctcttcacgcaccaacgtatacagaaggagctcctggacaaacaggctgcggtctgcacgc

SEQ ID NO: 135 - DNA, 601 bp, Rattus norvegicus
  Genbank Accession No. AA817816
tttttttttttttttttgaattccagcgttgtttattggacgcaagtgttcaacatgggatggcatcatactgtcccatttccagagtaaccaactggcttggttacatgctacaagttgctgcttccaggtgtgtgaattagtaagctaaattcaaacagtaagatagaaacacttttgtatcaaagttgtgacttaaaaaatacaaaagctaaacccacaggtgtagagaaaaatggcagtcctgagagctgccttgaaatgtcagtcttgaaacttgtggggaggccagcacccattaggggaaatgaagggagtgggagcctgccctcttcatccaggcggccttcatactggcatatgtgggcccatccccaggctgggcaccatcattggggaagcatatggagaggcactgagaaggtgtcagggcagggccatccccttcagccagagcatgctgggaggaaaggggcttacttggcacttacaagctttggcagctcagaggggttttctgcccagcccctgctgtggctgaaccaccacaggtctctggctgggcctatggttactgaagactgggtattactccatgccc

SEQ ID NO: 136 - DNA, 577 bp, Rattus norvegicus
  Genbank Accession No. AA817823
cggccgctattctccacctgactgcaccccagcccaaacggtggcagtcatcatcccctttagacaccgggagcaccacctacgctattggctccactatctgcaccccatgttgaggcgacagcggctgcgctacggtgtctatgtcatcaaccagcatggcgaggagaccttcaaccgagccaagctgctcaacgtgggcttcctagaggcactgaaagaggatgccacctatgactgcttcatcttcagtgatgtggacctggtccctatggatgaccgcaatctgtaccgttgtggtgaccagtgccgccacttcgccattgccatggacaagtttggcttccggttgccctatgccagctactttggaggtgtgtcaggcctgagcaaggcccagtttctgaggattaatggttttcccaacgagtactggggctggggcggcgaggacgatgacatcttcaaccggatctccctgactgggatgaagatctcacgcccagacgtccggataggccgctaccgcatgatcaagcacgaccgggacaaacataacgagcccttctggtatgga

SEQ ID NO: 137 - DNA, 584 bp, Rattus norvegicus
  Genbank Accession No. AA817825
  misc_feature (1)..(584): n = a or c or g or t
ttttttttttttttgctaatgctctgaaaacactttattacacaaattacattcagattctgaaaaatagtgttctaacagtgtaaccatctaaaaataagacatcccggaaacacaccaactgaggagaaatttaaaaaaagaatttaaatagagactttttaaaatttctctcattgcaatataatgttagtgattttaaaaaaatagaaggagatttagcagcttttcgtcgtgtggcaggttggttctcttcactgccacaggctgagaatgctgaacaggaaaggcaccaaagaaagacactggcgatgggtgtggactgggagaatactgtgttcaagcagagaatagggctatttacatccaccaactaaaacgtctccaaatgtgaatgagctaaacttccctcgggggttggagcgctaccttggaagaggagggcggcttctctacgctaagttcatataaagacaatggcactggagtgaactggtggggaactcctcacctagaaaacagaagccaacggagccaaatgaagtaaataaggtgtgtacagtcncacactgacgagtacagtt

SEQ ID NO: 138 - DNA, 605 bp, Rattus norvegicus
  Genbank Accession No. AA817829
tttttttttttttttttacttttaaaaatactattttatttatactcatgtataaaaatggctatcctgtcatttttatatacatactgataatggaaacaattcagtgtcatgcatttcaaccgtacaaagaacataatcatggaagcacggttacaggggaagcagaagagtctgagtagtgatttcattctcactgaggagcggcaccctgaagaatcgagtccattagtaacactcaccgcactgagagcagaggggcgttagcgattgtacttgattatttttactgagccatttcatcttcctcacagtgagaagaaatacaatataaccttaataagaaaacgacctcattacaatctcggtaaaggtctacggcttatggagtggagcagagttcaggtgtgcttgcgggctccggcctcaccgtaccatcccacctgatgtgctggacagaggccgctctctcatgcgcccgcactaactccatgggagctgcaatagaatgaaccatttctgtggcgttcccaggtctcactgaggaagaaaagacttcatacacataaatataacaattgatctgtctataaattatagtggta

SEQ ID NO: 139 - DNA, 635 bp, Rattus norvegicus
  Genbank Accession No. AA817843
tttttttttttttttttgaactctacccttatattttattaaaagggtaataaacattatgaattaacccagctgcttacttgaattacaaaataacatgattcaatatgaaaataagaaactgtctacaaatctctgacagtaataaatcgcaatatacaatgcatacaggcgtcacagagcaacacactctcgtacaaaacaaaaatatttttaatacctttaaaatccaatttttttcttttaaaatcattcatgaaaaagattctcaagtcagaattaacacctcaattagtcaggcatcaggaagctacgttacagctacttattatacaaggaggcggcctcactctcacttcctcccaatgcctctgctccagactccgtcagactctcgctcgcgctctccacacagcccggctccatccttccttcatatcatgaaaactgaatctgctggacaccagaaatctgttgataggacgtcgtgtaaaccataacgttttgttgttggccatctgcagttattaacccagccggtaactggttagtgaatgcctcttccgtgagctcctcgctgagtccatctgtatcagacacggccccaccaatgcccttctctcacttcatggcct

SEQ ID NO: 140 - DNA, 456 bp, Rattus norvegicus
  Genbank Accession No. AA817854
tttttttttttttttttccttatgcagagaaccttttttacagagtatcaacggtcctatgagtcctgatgcaatatcttttggagcatccacatgagagtggtaaatcctggtcacacaattgctgtctccctcgccaggacttggctcattggcacgcagcacgtacaaatactgctgtccaggaaacagtttgtcatcggctctttgaaaatcagtggtgttgtcagggtagatggccccctcgttcgccttggtgtaagttaccccatgagcatgaaaagtgtagggcctagaggcaaagttctttacgtgaacagaaactttgtctccaacttcagctttgatgacagggcctaaaagccctatccaggctggtttgtctatagtcttcgtaaaggtgccatctgtgtactcagaataaagggccttcttatactttcttcactcgtgccg

SEQ ID NO: 141 - DNA, 576 bp, Rattus norvegicus
  Genbank Accession No. AA817892
tttttttttttttttttcagagttggaagtggttcctttatggaaaaactgaaaatataataaaaattaaaataaaaccagttaaaaaagccagcccctggagtttccacctcctgcctctggccctccagaggggtgaggccctggccccagggcagcaaagggtgagggctttcctgcccttcctcttcccccattccatccccgacttttatctccacagtgggggccccccgagaggaaccaaacctgggtatgggagcaggacccaaggccctgtatcccagggagggaggcttggcatgtgtgcccagccccaaagctccgggcctgtagtgtgggcatgggcagggctgctccctgcctgggcccatctggggttggggaggttagttccagatcttgaggaaggagtcccaggagcctgtatccacagccatcccatcatctgtgaccccaaggcagctcacacggttatcatggccagcgaggacacctgcacggtcacccttcatggcatcccagatgttgcagttgaagtcgtcatagccagcgagcagcatccggccgctgcgt

SEQ ID NO: 142 - DNA, 493 bp, Rattus norvegicus
  Genbank Accession No. AA817921
tttttttttttttttttaaagcagcagcaaaattttattcatgtgaactgttaaaaatgaccatctataccagtgtcaaatgagggagggaggggaaggcagggcagagcagggagacgaggggaggagggaggagtcccctctactggtaataaagctccaggttcatcccgtcgtggatctcatagtctcccagagacacgtggtctttaaaaatcgtgtaccactttttaagaacgatcttattccagcgggtgccagtttgagccgctatcagtttcttcaggtcgccgatggtgtcatcggtgttgcacttaacgcggactttctttcctagacggtcgttgcaaaccacctcaatcattgtggctggagccggctttgcctcccgcaacccctaggctcccaagtcttggcagcttcccgcgatctccggcctctccgtttagccttctcacctccaatgtcctcgaacctagcgaccctcgtgccg

SEQ ID NO: 143 - DNA, 386 bp, Rattus norvegicus
  Genbank Accession No. AA817925
tttttttttttgcaattttgagatgtttaataagagtttgagcagctgcatccattcatgccctcttctgtgaggtagtgacagccccttttcagaaaccgtggtcactgccttgctgcaggcacggcagtcctcagaacgggcactgagacagcacctcatgcgtgtcaggtctttaattttttccctgccagagctttttctttctttgcttcgttgttactgtgttttttctgtttaacaattcaattggcagaaaaatggctatcgctggtggacattagggttgcagtgaaaaaaaaatccccctcccccaattcttgcttgccaccgtgggagacgaggtgagggttcctagaggtttcccaacccacctcagagcttcc

SEQ ID NO: 144 - DNA, 390 bp, Rattus norvegicus
  Genbank Accession No. AA817987
tttttttttttttttttcacaataccagatcaggatttattcgatgaccacattcagttattcagacatagaacaacagattgcataaatatcaatgttcataaaatatttatcacttttgaaattttaatcccatgggaacatccctggagggagaccggacattttctcctgaaacactttatcaaaggcttcagcttgggatacagtgaagtgattcttccagtccccaacagtgcctttcctcatgaggccaataccagtagaaattgattttttcatcaggaggctataattggacatgtcattttctttcatgacttggcaggcactatacttgaggaccacatccagctcatcgggctctagttttttccccaggaagtcaca

SEQ ID NO: 145 - DNA, 504 bp, Rattus norvegicus
  Genbank Accession No. AA817990
tttttttttttttttttgaaattgtttctctttaattgagtacttcattcagacattcctctgttggcttctgctctggaagcagctaggtccccacctcaatatcacaactgagtgaacatgggccccaaaccagggctctcagaacaggaaaacaataaactgcaaagccagcctctcctttcacttaggagggactgggagtcacagagtccaatcccaccctgcagctgtaggccctggagcctggactgcaaacacagaaacatagctgtcaggaacgaggcagcagcctcatcctccagctccagtacctgaccaccagcctcttccagtagggatggacctactcttaagagttttggcatctacttacttaattttcccaagaggtgaaaaatctaccaaaaggaatacataccatggaccagaataaatcagctttctcacggtaaactttcctgagtaacaacttggttgctgagaagcctcagcacattattt

SEQ ID NO: 146 - DNA, 581 bp, Rattus norvegicus
  Genbank Accession No. AA817997
  misc_feature (1)..(581): n = a or c or g or t
tttttttttttttttttcacctagagacaaatctttatttttaaactctcatctactaaattagcgtttcccaccaactctgggagcagagaccttcacaggcttcacaatcttttgtttaggggctgcctttgtgggagccttggcagcagccattgctgtcttctttgatgcctgcttagccttttttgcttccttggcagccctgatagcctgttctcgctgagctttcctaacttctggtttctgattcctcttggccattatatcagccagagaagcgcctgtgatggcccgctggaacttgactgcacggcgggttcttttcttttgaatttcttccgactgtcctttcttgtgttttcttctgtagaggacagtccagttaatttgccgagggttccttttggaaaggaatgcggactcacatttggcattaagaaactggaaaaccttcccatcggtcctggcgtancgccgcccgtgtcncgggtagatcttgtacccactanaactgcacagctcgaccttcatggtgacagatgtcggcctgccgggggaaagcctcgtgccgaattctt

SEQ ID NO: 147 - DNA, 391 bp, Rattus norvegicus
  Genbank Accession No. AA817999
tttttttttttttttttgcttttgacacatgatcagcttttatttaaaaacatgctaaaaacatggtgttcgttaaagcgggacctgggatggaggaactgcagacaaggcattgcaagcagaaagtgcattcgaaaccaataagcgtgcactcctggctctctggccacccaggggcagcaaggcaagtggaggcccaaaggctcactccttagaatgcccactagggaggggaggccagaactccaccatcgtggaggggagggaaatgagagaacaggaacgtgagaaggggtgccagaccaaggggtcatgggacaaagaacagaccccaagcatctggcacctagctcagtcctgtgccatatccctgctagttagcacctccacc

SEQ ID NO: 148 - DNA, 504 bp, Rattus norvegicus
  Genbank Accession No. AA818025
tttttttttttttttttcctatagcatagtgtttattattccattatgtggaagacagtcaagataaactgctttttcaagatcgaaaaaatgttggccattacagttttctagtaaaagctagcaaagcccaggcaatattcagagatgtgggataattcaggttggagccgcccgtccacacttctacaagaacagacgttttgtgtgtttcctttcttttttgttttgttgttattgttgttttgaggtttttcttttctatgtatgtatgtatgtatgtatgtatgtatgtatgtatgtatgtatagacaggctttctctgtatagccttggctgtccgggaactggctggctttgacctcacggagatgcacctgcttctactcccaagtgctggtattaaaggcatgcaccaccactcgccattttgtttttcatttgaggcaaggtcttactatatagttttaggtgacttggagaccactgtgaaggtcaggctgg

SEQ ID NO: 149 - DNA, 532 bp, Rattus norvegicus
  Genbank Accession No. AA818026
tttttttttttttttttacaaaaggttaagctctgtttatttggagtcacaaggagctgattgagtcactgtgactcaagaccacaaagaaaccctttgcctccacttcagtctcaagcctgtggtgaaaacctcgaccagcacaagtgctcttggggcccattcacaggtttacaagtttctcgttgagggcaatctgtgactgggtgagattggccaggtaggtcaccatcagcaggtcgttgatgttgctgttgagcatggtttcaaagtcatcaggaactatcttgggtacttggttgacaaggctcatcaagaagcggcctactgtgttgtcagcagacactttcccagacagcacatcctcagcatactgcaatacagtgcttagagcatcctggatccgggctgaggcccctcccacttgctgtaagtcactcgagagtccaatcacccggttggggctaaaacatgtcttcatgatgaggtcaactccaatgcgctcagtgtcataatacgcatacttcactgt

SEQ ID NO: 150 - DNA, 321 bp, Rattus norvegicus
  Genbank Accession No. AA818069
  misc_feature (1)..(321): n = a or c or g or t
cggacgcgacgccatctttatcctggatcttggacttcacgttctcgatggtgtcactgggctccacctccagggtgatggtcttgccggtcagggtcttcacgaagatctgcatgccgcccctcaggcggaggaccaggtgcagggttgactctttctggatgttgtagtcagagagggtgcggccatcttccagctgcttgccggcaaagatgagcctctgctggtcaggggggatgccctctttatcctggatcttggccttcacgttctcgatggtgtcactgggctccacctctanggtgatggtcttgccggtca

SEQ ID NO: 151 - DNA, 425 bp, Rattus norvegicus
  Genbank Accession No. AA818072
tttttttttttttttttacacatgcgcgggctttattataaagcacgtttcttgacctggggcctccagctaggatgataggacagcacccagtctcggtttaccaggactcgcaacttatcacaggcgcctgagggctgtccagtaacggagagggaacatagccacttccggaggcgtatggggtaaggtgtgtggaaaactttgaaaactccaaagcaagggccacccctccatggctattgcacgcaccggaaggaactcaacgctgtacgtcagctcttctccctgttaaagggacacagcgatccttttttcctaaggcctcgaaagacttccgcccacacccaatatggcgggcgatgggagcgggtagaattccgggaatgtggagcagatcactgggacggagtggagcctcgtgc

SEQ ID NO: 152 - DNA, 525 bp, Rattus norvegicus
  Genbank Accession No. AA818089
ttttttttttttttttgattgtaaatttgttcagaattccttcaactttaattgtgggggtaaaatcaagcagccactgaggaaaaatagtccctggaagcagtcgaaacgtttgtgtagtggacacgatgagttatttattagcacaggttgtcacaagtcgccagctgttctcattcttccactgtctccttcttgccagtctcttgcccttcaaagagggggtacctggcctccacatcagcccaagtgatgttgccattggccagatcacggaccacactgggcagttcagagacctctgcccttatctgtctcatggagtctcggtccctcagagttgcagtgtggggggtcttgttcactgtatcaaagtcaatggtgatgccaaacgccacgccaatctcatcagttcttgcatatcgccttccaatagacccagaggaatcgtcaactttatgagacacgccatttcgagtcagagcttccgataattccttgacaaatggcataaactcttggttt

SEQ ID NO: 153 - DNA, 594 bp, Rattus norvegicus
  Genbank Accession No. AA818091
tttttttttttttttttacatttgagagccttttattcttatgtgaataaagtatcatgctttttgttgttgagaaaataaagccagttttatttcttgcatttgaagtagtcttcaattggcgtccttaacacaccacaaccaagtttatagggttcctctcccgttttcagatgcctaattaggttgatcttcatgctcgcacaaagctcctccaacaacttgacacgcataggctcatcacaactgggttcaagcatgcacttgcttaaggctttggcagctcagctctgcatgaaccccatgctgggccctctcggatgaaggtggtcttcagggctcctgttaggcagtatcagcgtccattacacctccagcagtaatgccttccttagccatagtagcggttgtgcgtggagttgaatcgtgaactcattgagtgtctgtatgacttgctgacagcagggggagagggctcttcagcattcgacatttgtaactattgtgtatatgtttaaaagagagtaaaataaagccactttcttcagaaatagaaaaaataccatctattaaccgtccttagtacagactata

SEQ ID NO: 154 - DNA, 572 bp, Rattus norvegicus
  Genbank Accession No. AA818101
tttttttttttttttttaaagttagcattaaaaaaataaatttattttaagtatgaaataatgaagaacaggcacatagagaaattataaaaaatagcaaaaataagaacagggatgatgacatgagacacaggtgccgttccagttactgcataaacattttcaatgctattcctccgatatcctcaaaacaaaagcatttacagatgcagcagcttctgactaaagcagacacaggcggtgacaactgctacttctaaacctacacacagaattgtatcaaagtcttccctaatacattaccacttaaaacactgagaatatcatcaattctttttgcatttttacatcacactttgtccctgttccaaacaatgaaagacaaaacaagaatatacttcagacattaagtattccaactcgcatctgtaacttgttcaaagcgtcaggagctaacatgtccatgatcaccataaacaacactgtcaatttaaaaatagaaacagctgggggagacagtgcatttttggtcctttgtaacctctgacatcaacaccgcctcgtgccgaatt

SEQ ID NO: 155 - DNA, 378 bp, Rattus norvegicus
  Genbank Accession No. AA818112
tttttttttttttttttccaagcatcaaaccgcaccattttactttattctgcacataaggaaaccaactgattagacagagcaagaatagtgttcaggaattagaaaggaaaagaggtcaagagcaagctttcaacttcctcccaacacggtatcacaaaaatccatgacaggatacctagaattcttgttctcaacagaaagacctccaaggaacaaagatgaatgagtccttagatccacagggatccatggggcttactccaggaagtctgacctacctataagtaagccatccaccctcatcctggcctcatcgactcttactccaaagtggccaatggctgcccgatgctggcagcttcaaatctacttgtc

SEQ ID NO: 156 - DNA, 613 bp, Rattus norvegicus
  Genbank Accession No. AA818122
tttttttttttttttttcacaataccagaacaggatttattcgatgaccacattcagttattcagacatagaacaacagaaacataaatatcaatgttcataaaatatttaaaacttttgaaattttattcccatgggaacatccctggagggaaaccggccattttctcctgaaacactttatcaaaggcttcagcttgggatacagtgaagtgattcttccagtccccaatagtgcctttcctcatgaggccaattccagtaaaaattgattttttcatcaggaggctataattggacatgtcattttctttcatgacttggaaggaactatacttgaggaccaaatccagctcatctggctctaattttttccccaggaagtcacatatcttctttatggttcccattgtatcctttttcatgtcttcatagtacagtaacaagaagttgtcccattctcgcatggacagccaggcacggatgtgctcaaaccatgatccatatagaacatttcctttgaggaaccattcaacataagttcccagtgagtctggcttcttcacaagagttgaattaccccagaaataataaccagaaacaagaacatctc

SEQ ID NO: 157 - DNA, 554 bp, Rattus norvegicus
  Genbank Accession No. AA818144
tttttttttttttttttaagtcaggttctctttgataaagagtagtgggatgcacatgctggaagccttacatttaaattccatgctctagtgctgaggaccacagagcatataagtgaaaggccatattcacaaaacagatctacaacatctgctggggttaaaaggttcataaggagggacaagggagagaatgtaatcccaggatgtgcctcaggactcacaacagtcagtcaagggccacagctgcggcttgataaacacatcaccgtgtgtttcatacttcagtgcccgccagttcaaaacattggggctgaataccctaccagcatagactgcattgatctgttctggagatagcacaaagtcgcacatgttcacatctccaatgtctcccaccaaagactgattcgcgtcaaagccaccgccatacgagtcctgctcctgccccaagatgatgcttgcatttgtccccacaatgtagcccttctgcagacttttccgcaccctgggtttcccgtcaagccaaagctctacaattgctgtagcagact

SEQ ID NO: 158 - DNA, 158 bp, Rattus norvegicus
  Genbank Accession No. AA818152
cggccgcatccattttgttgttcatgtgtttttttttttttaacacttctcaattagtttttattcataatcataaacttaaccttgcaatcctgctagacttgaaggggaatgaagaaaatatggaacccaaagaacttcaatgcaaacacatatta

SEQ ID NO: 159 - DNA, 365 bp, Rattus norvegicus
  Genbank Accession No. AA818153
tttttttttttttccttagtatcaggagagctttgcattttttattacatttatttgtatgtggatacatgtgggtgtatgcatgccacatgtatgtagtggtcagggaacttgtggaaatagattctttcctcccactgcatgagtcttgggtttacactcaggtcattaggcttggcttcactgaattctgtccccaaattcaagtggcagaaacccagggctggaagcttcgtggtagagcactttcctgggatgtggaagatcatggagcccatgtccacaactacacacttcagtgatgagtacccaattagaggtttccaactttcctgacgctgcagctcctcattctgtggtgatct

SEQ ID NO: 160 - DNA, 363 bp, Rattus norvegicus
  Genbank Accession No. AA818158
tttttttttttttttctgattaaaacaatacaacattctaagatgtcttttgtttattttattgtttatcttctaatagcccacagaagagactgaaaatagttgtgggctaatcttaaacatgaagtagagaataagcactaaacactaaaaaaaaaataaaataaaataaaacttttaccttacttattaaactaggaagaattttcctgaaacgcacctgttaaattagtctataatatattaatgaatggaggacatgtatttcctagtaaatattttaaacatgaagtatacgcttgggggaaaaaaaacttctcaggatatgaaatttttcaagtctcaatcccctgaacagactaa

SEQ ID NO: 161 - DNA, 357 bp, Rattus norvegicus
  Genbank Accession No. AA818163
tttttttttttttttttagttagccactagcttctttatttctatggactgcagaagcctcagactatcacaggtgtaggaggtgacattgctggatagataacaaggggcacaagttcaagtgagtgggaaacctaaatggtcacagcctacacatcacagcgtatacagaatgttgggcatattaaatgtagcagaacacttgggtttctggttgccttgctactaacctgactcttgattttgtgtatgtaagtttctatactcacttacttttctccataagagaagccatacatactgtcactggtaattgtaaagaattacagttccccttatcaaacaattacaatttta

SEQ ID NO: 162 - DNA, 558 bp, Rattus norvegicus
  Genbank Accession No. AA818246
tttttttttttttttctcaccaccaaatagttttttaataacaagaaaatgtttacacattattcaacaccagacacgggagacgccgagttagtaaacactttggaccccagagcgaatcctcaccccaaaggctccaccatttctccataaccaactcttcagaccatgacagaagctggcggagtgtctcccgccagcaatttccttgcctgtggtagaagctgatggggctcacgccacacgaggccgttgcagtttacataggagttctcaatgattctagcgttgtacgattttaagctgagattatactcagaggtaagtttagaaaacagtattacaaaagattgggcgagcagagaaaaaacatcccacgcagggcggccatgctgcagaagtgggggtggggcggttgtgctgcagaagtgggggtcctcattgccacaagtcttctgtgcggccaaacttaaaaaccaggcccccaaaaaagatgaaggcattctggaaaaatacagcaattccaggatacactatgggcttttccttagcaacata

SEQ ID NO: 163 - DNA, 425 bp, Rattus norvegicus
  Genbank Accession No. AA818261
tttttttttttttttttggatccaatctctttattgtcagccctccctaccccccgtgccgcccttcacaaccccctttactttcaaacctatagaaaaaccccaagcctgggaatgtcctgggaaaaaaagagcagagtgcttctgcccctttactttcaaacctatagaaaaaccccaagcctgggaatgtcctgggaaaaaaagagcagagtgcttctgccccttggcccaggcagtgcagacaggaagagtgcgtgggataagggtaggccagtaactccacttgcaaaggatgtagcactcactggctgggatgcaatggggagagaagttactgctgccagccttcctctggtactctctctagactggcatccagagatgggtgcctggcttgaggcctgagcctcgtgccgaattct

SEQ ID NO: 164 - DNA, 572 bp, Rattus norvegicus
  Genbank Accession No. AA818353
  misc_feature (1)..(572): n = a or c or g or t
tttttttttttttttttgcaataagcaaccgtttatttataaaacaaaagaagagagaggaaaaaaaccaaacttgattatcttacgacatcttatagattaagtaaaaataccagtatcaatatatatgtatatacatagtgcatatatatatatgtacagatgatatggtaacattacatgcttctcgggacagaagacttaaaacacattccctcacgctgatttaaaattcgatcacaatctcaatcaccccaagaaaacgtgttccctctatttcctttctctcaggcttcaagtacaggaagtgatcaaaccaggatctcagcgtagaacccaagtgctatgcaccgacaataaccgactgtcatgggttacgagttgcagtcttcagaattcttaattaacacaggtctccataaccctaccctaagtcaaccttctacctgagaagggagggagtgaggaagcgtgaccgtctctaggtctcatgtgcaccttcacatggaacttcccacanaagcaaccaaaaatgtcttcttacagcaacactggccatgaacactctgggg

SEQ ID NO: 165 - DNA, 386 bp, Rattus norvegicus
  Genbank Accession No. AA818372
tttttttttttttttttaaaggtgtgaacttttattatattaaaacttaacaagagtttaggtgcagtcctaatgttttcctccaagcagtcaatgtgtggaggctgagtgtacagtcatcctatgagcacctctgactggaggggagggtgagactgatgggggctcttggcacagaattcagttacacagtggccatggtgtccacctcaggtggcaagtgagagtagacgtcctaagcccttggcagagctggttatttgaactgcttacagcttagatggcaggcggacacaggctcgagttcagcgctctgacctaaggagggtgtcttacagcttttcacttgccgttcgttttagggcaccatactttggcagatggac

SEQ ID NO: 166 - DNA, 539 bp, Rattus norvegicus
  Genbank Accession No. AA818394
tttttttttttttttttacagcctctaagtcatcatttattgatttctagagcacccatcacatgattaaggtgctttacaacaatacagtaaacatcacacacaaaaaaaaaagctcacatagttaaatacagtcaaattacagaacttaaaaaaaaaactggaatgaagcaacattatgtcaaacttcaaaaatattgagaagtggcagtacaaaaaagggtaattccaccaactagagaccagacaatgaaacacaggcaccaagacccgaaggaggaaggtttgtagagtatgaatgagcatataaataaaatttcacaactgggaccaaaggccattaaaagataatatgacacccaggtatcacaaaatagaaaaatcaaatgttcaagcattaccttctaatgacaagaagatcaactctgtgtgattttaaactctgaggtcaaaaagccatcaatattatctcattaaaaaaagactaaaatttgcaatcctctataagaacgttgaacattagttaacagccaacaatt

SEQ ID NO: 167 - DNA, 340 bp, Rattus norvegicus
  Genbank Accession No. AA818412
tttttttttttttttttctctgtgcacacagctttattggatatcgctggagcgtccccaagtggctctgattactggtgtgacaggaggaggtggtgaagaagaggaacaattcatttcgggcaatgccttcgccaagacaaatgcgctttcctgtggagaagggcatgaaagcttcactctttttcagtgccccattggcatccaggaagtgttcaggattgaagctgtctgggtggtcaaagtactgtgggtcatggagagctgaactcaggatggggtacacttcagtgttcttgggaagcaggtaccctcggaacatggtgtcttcctcgtgccg

SEQ ID NO: 168 - DNA, 564 bp, Rattus norvegicus
  Genbank Accession No. AA818421
tttttttttttttttttgaaaaaaatgtatcattttatttgcacacttagaaaagttgtacacagaaacttattgtttgtaaaacagaactgttaggatgacatttttatttttaaatcattaagactggttgagaaatagaacaaaaacatagtaaaatgtttaaaaaattaaagaacattttccaagtataaattttataaatacaaaacaaattcacaaatgactttgaatgctaaataaatatctagttaataaattcagttggtactggctacagcacatcagagctagcgaactggactcactcatgtgtagtgttgaaaccctatgacatggagctcagacacactctctatggtgtgttctagcaggctcaccgtggagacaagacctccttactactggaactcctaaggctcaatgacaaaatagagcatagatgaaaaatattttccaagacacctgaacacatgaatgatctcaaaatatacacaagcctctgtaacccagtactgtacccagtacgtctatgcaacttagtagacactgaacaaaagctgt

SEQ ID NO: 169 - DNA, 544 bp, Rattus norvegicus
  Genbank Accession No. AA818487
tttttttttttttttttaagttataaaaaaacccacttctttattgatcagcattggtaggagttttatataaaaatcaggcctgtggaatgtgaggggtgtggccaccccgtcggatggaagcactggagccagagccgcacagagccttgtgactggctgctttcacctgtgagggaatcgacaggacccgcacagacagctgtttagagggatgaggtccccgaggctctctctactccttggcaatggcaaagggtttctccacttcgatcttgccacagtctacaatgatcacatccttcaggggcttgtcccggctgtccgtcttggtgttctccaccttccgtaccacatccatgccttccagaactttgccgaaaaccacgtgcttgccgtctagccaggaggtcttgactgtagttatgaagaactgggagccattggtgtctttgcctgcattggccatgctcacccatccgggcccatagtgcttcagcttgaagttctcatctgggaagcgctcaccatagatgctctttcc

SEQ ID NO: 170 - DNA, 399 bp, Rattus norvegicus
  Genbank Accession No. AA818511
tttttttttttttttttaatcttcaatcataactttaatctaaaatagaaatgggagggcaccttgacgttggtctcagattcaagtgtagaggtgacgctgtgtagtgaggcttgcttatcctggaccgccaagcatgcagctgacaagcatcagtgcagacacagcacagctgctgaggatggctcagtggtgagaggagctgcctcccacccaagtaggcctatacatagagcactatgacctgggtccttggggtgagtgccgtgctcgccttcccactgtatgcaggactggctgccccacaccaccccaggatctgaccaagcgctatttgccgtctgtgacccttcgccagcaccgccttttcttcctcttccccttcgccttgagtgagtc

SEQ ID NO: 171 - DNA, 507 bp, Rattus norvegicus
  Genbank Accession No. AA818521
tttttttttttttttttacattgtaatctatttattttatacacgtgacgtcataagcaaaggctttgcttgtgttctagctaaactccaataaataaatatgtacagatatgctgagcctacaaaacagtaaagaaaaccttttcttcacaaaagatacacatatgatacatttgttccttacactgacatatgaactcattcctagcttacttaaaacaaaacccttctggactctgtatgccaatatctagaggcatgtacctggtccttttattttatccagaaagcaaagctatgcagagaaaattcctcagtttctttattaaaaaatggcctgcatatggcctgctacttattattaagtgacatttaaatgttctcaagaagttggaaactctttagaccagttgtcctgaaatgactggacaatgccctgtggatgttgtcaaaatgcagcttcttatgaactggctcactggggtgggagtggggtatggtgggggt

SEQ ID NO: 172 - DNA, 419 bp, Rattus norvegicus
  Genbank Accession No. AA818574
tttttttttttttttttgatttttaaaaattatttaatttagtagtttttttttttgaaaaaaagcaataaggcaaaaaaactgaaaatatatatagatatatatatagtcttattttgctttcatgtgactttattccatcttcaggacttctaagcttcttccgttagcagggatctgggaaatcaagctagaaatgtagtgcagatagaggggaaggggctaaagcaaggaggttccttgggaaatttccactctatccaaagcctctggaatggtattttccccaaggacccacactggctgaggctcaacagttaaggaacaaaaacaaaaacactaacaaaaagtacacaaggaaggcacctcaatttatgaccctcaaccaagagtgggttgcacaagggttatatttctga

SEQ ID NO: 173 - DNA, 492 bp, Rattus norvegicus
  Genbank Accession No. AA818593
ttttttttttttttgttcgcaagcatttttattatatttaaatcaaatatcattctgagaaggcatgtaacatacacatttgtacatagcatctttcaataaaaaaatgtacaggtggggcagtgttttagtgaaaggcttaaattttttttaattgaactactagttcaattaaaaactcaaaaaactcattgtgttaaagtaactatatacatagataaagtgggcatccaagaggtatagcagcagccctttaatgtatacaccagggagtgatatgcatcttcctgccctctgcctccagcagttcccttcgaagctggcctgttcctctgcacccttcagggctcatgattccttgcgtagctctgtctgttggtggtttcgtgtagagtcgtatgtgagtcctcttttctttctttgttagactctgtggtcttgaagaaatcagttacatacaaaaccactaatattgccacaacagctccttga

SEQ ID NO: 174 - DNA, 515 bp, Rattus norvegicus
  Genbank Accession No. AA818604
  misc_feature (1)..(515): n = a or c or g or t
cggccgccgtgggctcgttgatgatccgcagcacgttcagacccgcgatcacgcccgcgtccttggtggcctgccgctgcgagtcgttgaagtaggcgggcacggtgatcaccgcgttggtcaccgggtggcccaggtacgcctcggcgatctccttcatcttggtcagcaccatggacgagatctcctccgggtagaacgaccggttctcgcccttgtagttcacctgcaccttgggcttgtcgccgtcgttcaccacctggaagggccagtgcttcatgtccgactgcaccaccgggtcgccgaacttgcggccgatcagccgcttcgcgtcgaacacggtgttctgcgggttcagcgccacctggttcttggcggcgtccccgatgagccgctcggtgtctgtgaaggccacgtanctgggggtcgtgcggttgccctggtcgttggcgatgatctccaccttgccgtgctggaacacgcccacgcacgagtaggtggtgcccaagtcgatg

SEQ ID NO: 175 - DNA, 448 bp, Rattus norvegicus
  Genbank Accession No. AA818658
tttttttttttttttttggagtaagagttatatttatttggatcacgaagtataaatatgaaccaggttttggaaatataggttgtaacagttcagaaatggcactagaaacttccatggggtctgtgacagcacacatcacagttttggtgagaccgtggtctccttacccaaaaccttccctcccgccaaccttctctgtactaagtgataggtatcagttaccaagaatagtcaactccaaaattccctgttcttcctcagcctttttctttactaatgccttctccaaactgttctgtgctctaccaacccctgcatggagtagcaccagaagaatggcaggataagggaaatgtcttgatacaaagggagtgacacggggtgatggaggaccgggaagctgcaggaatgggcgcccaatctttctgcctcgtgccgaattctt

SEQ ID NO: 176 - DNA, 496 bp, Rattus norvegicus
  Genbank Accession No. AA818669
tttttttttttttttttccttacactaatttaaaaaattttaattggttgcatatattaacatgtactataagattcttttctaagaagcattacataataaatggatactgtaaaaagatctgattagttaaaagtaacaagcattaacagatacatacaaaacagcctgctcagaacggagcctgggcaccagccttcccacaggaccttcaaggagggtaggggtaaaagaccacaagaccgttaaaaaaaaaaatcagataattagacacagatgaactgtgaacagttctctcactttccagtggacaaaaagagtaagctttccacgcccactgcaccccagagcacccagggtctccgccatatgccatacacagggctcacggtggacagctgccccaggagccctgacaggcacaagctggagtttgcttgctgtgtgtgtatgtctgtgtgtgtgtgcatgtgtgtatgtgtgtgtgtggagtttc

SEQ ID NO: 177 - DNA, 584 bp, Rattus norvegicus
  Genbank Accession No. AA818700
tttttttttttttttttgcaatttatttctaaatatcacaaacttttaaaaaagcaacacattcatactaaaatacgtgcatgagcaaaaataaaaaataagcacaggagtacgaaaattaacatagtaaaattttaatacagtattctggatacaagtagaatagcactaagtaaaggactgtagttacctcagcagcctgggagtatgggttgagatcaaccaaggtttagaatagccccttcacatttcatcagtgctgaccaaagccaaagcaagctaggatggagactacaactaaccttccatgttaaccagttattttaaggtgacttaccctcacttaatggcagttgaggtaagttaaacagagagcccttacaaagactaagaaccaaatgaaaacttgtttctagcctttgttttaggtcaccttaaactaaaatgcttttacgtacttcttaacattcatgtacacattctttcaggccaaagtttcagcttgggaatcttgccaactgtatgtccaacttctgaacatttgcaatcagacaaatttactgtataaaacagtaagatttact

SEQ ID NO: 178 - DNA, 600 bp, Rattus norvegicus
  Genbank Accession No. AA818759
tttttttttttttttttcccaaaaaaagatttatttatatatacactgtagctgtcttccgacacaccagaagagggcatcagatctcattacagatggttgtgagtcaccatgtggttgccgggatttgaactcaggacctctggaagaccagtcaatgctctagcccgaaattcttttcttaattatttttactctatatgcattggtgttttgcctgcatgtgtcggggcctccagtactggagttacaggcaggtgtgagcgtccacatgggtgctggaaattgaacctgggacctccggaagagcagccagtgctcttaacctccaagccatctctccaacccgagaagccaaattttcaccgtttaaatatcctgtgatccatatgcagtgctcttctggaaggaagagtccatcactttagaatcatgaatcagatctcacacagtctcaattacagcagctatttccttgaactgtctgtagaaattctgaaactgtgggattgtcatttcgatggacttgctgctcacttggccagaatgatctgccaccttcagcatcactgccacgtacggatacttgagagatctgca

SEQ ID NO: 179 - DNA, 368 bp, Rattus norvegicus
  Genbank Accession No. AA818761
tttttttttttttttttacaccgatggacgttccctttcctagctgacattgtaaaactccaggtagttgggagttaaacacaacccaccgtgggaaaagtaaacagactttcttaaattcgctggtaaaaaattctatcttgcccgaagaggtcgtgtctaagacagcaaatgagaccacccacccaccctttccgcggtagtccacgccaggcgatcagtctaggctgaccagtcccggggtctccagccacttcaatcaactctgatcgcagcaagatttgatttgttcagttctggatctcagccgaaggccggctcgcccacagcagcctgtgggggcgaggtgactcaagtcacttcccagt

SEQ ID NO: 180 - DNA, 488 bp, Rattus norvegicus
  Genbank Accession No. AA818770
ttttttttttttgttttccctcagaaagctattttatttggatttcacacacaccaaaagcagagaggagactgtggggctggccctctttgggctggagtctctggctcccctgggcagtcggttcccagcctcccaggcttgtcatcctctgaaggctgagtggggtgtctgccctgcaccacagctcttctccaaagccgaggaaaacccatggggaatacagggtaagaggacctaaggatcatgggatgggagcccacattgaacctcggtgaggtagtctgtcgcctgaggcccacacgggtcctgctgaggtaaaatttgtaagtttatttcagggacgtgggtcaggactcctcggtgccagagtcatcctcttcatccccaaagcagctgtcggcctcctccacttcaccgtcctcatagtagtcgtcgtagaagaggtctgagccctcgtcgggcgccggcgccttggcctcgtgccg

SEQ ID NO: 181 - DNA, 561 bp, Rattus norvegicus
  Genbank Accession No. AA818774
tttttttttttttttttaagggaagtggtttatttcttggctcaggtgagagcaaacatgtatcaagcagaggcttgcccacctgactcttgtggaacccggaggagttttagtttattgtacatgcattaaaaagtctttcagctgctgcagaggaaacgtcagaagcgaggcctgaggccggagctccgagtctgcacgggacacaggcgtacacaggtagctcacagtatgcacaggttaatatgagacacagtgacaccggtggcttggcttggctggcagctgccagtacgatgacaatgtggctcttctgaaatggaggcagccctgtcctgcgccatcagccgggccttgcttggctgtacaaggcttcggtgtgtagtgtgctctgggttggtcggaggttggaagcaccaaagacccttaacctggtccctcggcaggcgggacaggggtcattatttttctcctggccagaaatggctgttcctcagaatagataaagttccttagccttagttatcatgcctttccctttacaaggcccccctcgtgccg

SEQ ID NO: 182 - DNA, 606 bp, Rattus norvegicus
  Genbank Accession No. AA818781
tttttttttttttttttggacacactgtatctttatttctcatttatctagcatatacaataaatgctgaaacatgcttaacgtttggagttgtgtattcaataaattcaataaacagataagcagtgatacaccaaatacaggcattataaggattttttttttaagtaagtatctgtttagaatacaatgttacaaaagcaagaattggattttaataaaacaatttaataaaacaaggcacaatgtttaaggcaaaatttatgaagaaagtatataaagttaatataagatcatattttttaatatcctttggggaaagaggcacaagaattagaaatagcttaaacatttttttagaatattagccataagaaagtaaaataaatttgatacaataggactctattttttccagaaaacaaactccactgttgaatcatatttctgagttccattttaatcatatatatatttatacagatatttctaatacacagactttaagtacagaaaattaagatgtcagagcatatgtaatgatttgaccaatataaaaggttaacattttttcagcatcttttgttgttttcgaaacccccgact

SEQ ID NO: 183 - DNA, 407 bp, Rattus norvegicus
  Genbank Accession No. AA818801
tttttttttttttttttaagtaaacactgttttatttataattacagaaggaaggaacgttttactcagtctcgcccgctgaaaatatacttaagtttgaacagccgttcaattatatcaagagtaattgcccattgctggtttgtggaattgatccaattccttgaaaaataagcatgtgtgttatcaaagcagaatttcattggacatcaagtcgtgccccagtggatttctccccaacaacaagaggcgtgaaatttccagagccagcaggagtgacttgccctttcatttctaagggctgttcctgcagctccagtgtgacatttgcttaaagatgaagccagccccattctaaataaaggtatctggacagcccttcagcgatgaatgttttcctcgtgccg

SEQ ID NO: 184 - DNA, 561 bp, Rattus norvegicus
  Genbank Accession No. AA818820
tttttttttttttttttaccagaattaactttatgtagcttgggtgatttgctactcgcaaatgatgtgaggcaggcagcttcccacaccagacccaaccaattccattcccctcatatcaccctatgtccaccaaatcaaggactccttcattctggggatgtgccactttcggtgagggttcttcctccatgttcagacttcctgacttttgactttttgtgtgttcaacaaccccatggcctcaccccaagtctctgacctcatctacctgtggctgctctatcaggcacaagacccggctatctcccttgcttccctagctccgagatgtcctgttacctaactaccaagtagttttcatgtccacttgaggacaaagcaacccaggagggctccccaaacctaaggtctatcagttctgcaaagaaccgtgaacccccatggtggggcaagcactagaaccttatggcccagacagctcaacaccagaaagtacgagcaaacatgacagacacacaaaccacagaacttcaggtcatgcactgctggtcaaactga

SEQ ID NO: 185 - DNA, 469 bp, Rattus norvegicus
  Genbank Accession No. AA818843
tttttttttttttttttcagataggaattatatggataatgtctagtagacagtgcgtacagaagtagggaacaccttactcattaattatacagataatgtcgagtagacagtgcgtactcattaattagataatgtcgagtagacagtgcgtacacaagttgggaaacctcgttcattaattttgtcacttatctagttcagtaaaatgctcacaaggaaaataaccacctaaggcagaaacttcattcacaacttcatgagagcagacagatcaatactgatcaacgtccctgcttcagactgaatcattcatcctcaaacaggtcattttgtgagatggacatccgtgttacgcttgaaaagctgaagcacaaatacaaccgtagagttggaatcttcaacagcctagacggaagtctgcttgtagtttttagtatccaaaacctttttgccacacatcgcacag

SEQ ID NO: 186 - DNA, 628 bp, Rattus norvegicus
  Genbank Accession No. AA818858
tttttttttttttttttaacacttctcatttagtttttattcataatcataaacttaactttgcaatcctgctagacttgaaggggaatgaggaaaatatggaacccaaagaacttcagtgagagcagagattacagggtattgcgagcagatggggtgggggtgctctcctgagctacagaaggaatggtttgatgggtaaaatgcccgcaagtcaaagaaattagagttgtccacagtcggagatggtgatcttcttgctggtcttgccattcctggacccaaaacgctccatggcttccacaatgctcatgccttctttcaccttcccaaagaccacatgcttgccatccagccactcagtcttggcagtgcagataaaaaactgggaaccatttgtgtttggtccagcatttgccatggacaagatgccaggacctgtatgcttcaggatgaagttctcatcctcaaatttctctccgtagatggacttgccaccagtgccattatggcgtgtgaagtcaccaccctggcacatgaatcctggaataattctgtgaaaggaggaacccttatagccaaatcctttctccccagtgctcagagcacgaaagttttctgctgtctt

SEQ ID NO: 187 - DNA, 503 bp, Rattus norvegicus
  Genbank Accession No. AA818888
  misc_feature (1)..(503): n = a or c or g or t
cggccgctctttttttttactgctccagtcgatggaaggggactttatttggtcccggggtcacaggccaggtatggcccagctctatttgaccttcttcttggggcgcaggttgttggtgtggccgcacttcttcttgcggcagttgactgcacgggggtgcaggcgtgcgtagcacttgcggcagatcatcttgtcacagttgtacttctgggcaagctgacgaagggacggctcgatgatgccaccgcgaagacgcagcaccaggtgcaaggtggactctttctggatgttgtagtcggacagggtgcggccatcctccagctgtttgccagcaaagatcagtctctgctggtcaggggggatgccttccttgtcttggatcttggccttgacattctcgatggtgtcactgggctcgacctcaagagtgatggtcttgcncgtcagggtcttcacgaagatctgcatgttggcgtctgccgccctcgtgccgaattctt

SEQ ID NO: 188 - DNA, 359 bp, Rattus norvegicus
  Genbank Accession No. AA818889
ttttctttttattttttattacggataggcctcaccatacttttatttggaagaacgtgaattttgtgactttggatttggaaagccaagaaatggtttgagtggggcccaatgagctatcctggcaggaagactttgtggctgtgagtgattttaactgcatacacctggcccaagaggcttcagggagaataatttcactgtgtggcctgcagattgtttttgtggtgttttggtgaagaatgtggctgctttttgcccctgtctgaagagtctacctgaggctaaggtgaagactcagattcattgcaccgacaaaggaagtctcagaaaagcccagcagagactctgttctctgg

SEQ ID NO: 189 - DNA, 613 bp, Rattus norvegicus
  Genbank Accession No. AA818911
tttttttttttttttttcagtataagtttttattaaaaagtgcattttgattaatttatgatttaggtaagttgtaagattatcagtatactctctggaataataactttacaaagatttaaaacaaacaaaaatttaaaagcctttttatttccttcaccattattgttttacaatacaaatatcaccttgtgagtagacactacacacacacatacacacgcacacatacacgcacacacacacacgcacacatacatgcacgcgcatacacacactcttgcacgcgcgtgcacacacacgaaacctacagaaggtaatcctgctgcacataaaatacagaaaggatattatatttatatttatatttatatatatatatacttcttcactcttagaaaactattttgttctccacgttggcaagtatagagtagaatacttccccaaacatacgtatgtcaggagtaaaactcagagttacatgcgctttctgcacaaatatattgtaaagaaatagctctctttttgctgttgttgcccaccagcaaacctgtcatgagagtgtggataactaatttatagctttcaagtttcaggtaagtgatcattt

SEQ ID NO: 190 - DNA, 565 bp, Rattus norvegicus
  Genbank Accession No. AA818915
tttttttttttttttttagtggtacagtattatttattatttataccatatcctgttcccagaaaggacttatagaggcaggataactgcaaagtggaactcctcagaactttccctcagagacactggcttaggagactagtgggagactacaggatcatttgggggcaggaggggagtaagaaaacagtggcatcttgtcccacctcaccttcgagagtctcacttggaagtcctacctcagaagaaagcactgtgggggcgtggcagcaggacagcgttatcagtaaagcggggaggctaactctcaggcacaccatccaccatccttccctccctttggtgctgatgtaagtaaagtgtcaggtcttctccagagtgctctggtggacctaaggtctcctctccatggagaacagccagatcgctcagtttgtaaggggcctctgctagctgcaaggtccaggttctgcccctccaccgtccccatcctcctcgtcagactgtgccaagggagtgtctcctcccccatcacttggatttggactgcgcaggttggaggagt

SEQ ID NO: 191 - DNA, 394 bp, Rattus norvegicus
  Genbank Accession No. AA818937
tttttttttttttttttggcccatgtcacagaatattttattattgtacatagaaaacctaacggttagcaaaatataaaatcctcagtagataccacatttggcagatccaggatatgtgtcctggtgtggtttgggtgcctctgaattccccacagataagaactcgaaagaagggaaagaccctgcttattttaaggcaaggtgcttaggagtggtcctgtggtccttgttctatgacctgaggcaaggtcggcagatggccttgtgctaccttcaaccataaagtgaaatggtggggcctctagtggcttgccctggacagcccccaaccccaactcccatgacagtgaaatggttcagcaggttagggggtaagggagcaactaaatgc

SEQ ID NO: 192 - DNA, 491 bp, Rattus norvegicus
  Genbank Accession No. AA818951
tttttttttttttgcttccgctgctgtttattgacattcaggtgggcactatagcaacaggcctggagacgctgcagagtacgaggtggagagtggaacatctgcagggacagcagtggagtgcacgaggagagaggccaaagctgttgggaaagcaagtcagggacagggccaaaagtcatctacatgggaaccctgggcccccagcctctgttcttgcggtctcctgattccaggccagggctgggaattctctggaaaactttctacaggagcaaagaacacagagataatgctgcccttctgtgataaagtcagagggtttccaatcctgcattcctccttcaaccctggctcaagtagggccatgaaaaatagctgggctctattgcatgtttcagaggcattaatttttcctggtgtcccagcccaccagcgccacactatggcccagagtgagcactacaagcgttgctggcctaatggatagg

SEQ ID NO: 193 - DNA, 428 bp, Rattus norvegicus
  Genbank Accession No. AA818971
taagcttgcggccgcggtacccatgtagacacagccaatggcggcggtcccgtagctgtgagttcgtgctcccagtgtcaggcctcccgcacaacctccaatgaagtagttcagggggtcatctggcttctctcggacctgggcactgacacaggtggtaaggccaaacatagctccaatagcagctgcagtgaatgtgaaccggccgaccctggccacggcttccaggggagaatctgcagggttgtgtgtgatgctgtaagcagagcttattaggccacaaaggccgcctaaggcagtagtgatgtaggccttgcgatgacactgggtgccgtcgggggtctcattgtaggcttcgaaaaaccgcttggccatggccgtacctagccagcctagcagactttacggcgtttgggcgcctcgtgccg

SEQ ID NO: 194 - DNA, 582 bp, Rattus norvegicus
  Genbank Accession No. AA818998
  misc_feature (1)..(582): n = a or c or g or t
tttttttttttttttttgatgttttatatatattgtgtttaatctgataaagtatatgatccatgtataatgatgtatttaacatatctatgaagcacccaacagaggggcagctacttccttaagacattataaggagaattcacttgctgatcactgaaggaaaggcaatagacagaggggaataggcacagtagtcagaaaacatactctccctattgctagtaagggtagcagaagtttccaaattttgtactatggtttctaggaggagccatttggagcagatgataaaggaatgttacataaatcctagaaatatgaaggggctaaattacatgagtccagtaccgaagggtataggcctgcttcaaactcaggaacttaagggaagtctangagcaatctgacaaaaaggagttatggagatctgttggccattcacactgcttccccagagcacagacagcagctctcttttgcagctggctgccatttattctctcttttcaatcaccttcactctttgctcaacatccaattacatcccccggcccaaccgacatcatcttgtgtttgagt

SEQ ID NO: 195 - DNA, 318 bp, Rattus norvegicus
  Genbank Accession No. AA819041
tttttttttttttttttagccttaggcatgtctttattcacttgaatgctgtacaaatattacaatttccttttactgaaaaaagtataaaaataatctttatataggaattcattcgttactgtaaatctttctaaatctctgcaatggctctaaatgagggtaagtgaataagtggaagtgaaggagaatggagggcaggaggtggagccactccaggtaccaacccacccagactcctagctagacacaccgattccctattaatccactccatggctacccagagatcccaggactcagggcatagctgagaga

SEQ ID NO: 196 - DNA, 589 bp, Rattus norvegicus
  Genbank Accession No. AA819057
tttttttttttttttttcattttagctttttattacaatgcttaggatacagactgaccttcttttgtaaatgacagttttacgtttgctgaaacaggacacgtgcactctgataaacagaatgaagtctcagttcattggagcccctggtcaaggccctggccctcaggtggagttgcactcactgcagcaacctcttggccagtttatggaagatggtgctctgtgcagcatgaagcagactggtgccacttttcagccatctctttctccagtggctagaataaaccactttcacaaagagccaccctggacagggtccatccagtcttctaggttgtttccgagcaattagggacaaacgagaaagacaaatgaggaacccaacaccgaggccatcacacctgtcatgtgcctggacagacatgtggacagtctttagccaaggcaatgaagggcacaccctacctacccagctcactcaaggctttaacaaaggcccctccgcactgacagttctcattccagctgtccgtcggtgaagggcacacatgcagtttgcagacagacaccccaacgagcctctgca

SEQ ID NO: 197 - DNA, 526 bp, Rattus norvegicus
  Genbank Accession No. AA819063
  misc_feature (1)..(526): n = a or c or g or t
tttttttttttttttttaaaattatctggatttaatcgctatcaacatcagaaccatagtacattaaagtacaaaacttttatgtacaattacacatacaaaaaatgttctttgtgacgagcaattttaagcaaatctgacaaacagcaagaagcatttctatttgaggtttgaaaggaaaaaatggaaatttccaagacagctttctcctccatggggccccggtgaccctcacagaacatcgatttgcaaaggcctgaggtangaaggcaggtattagcaatatgaagcgcccatccctcccctcttatggaaaggatgacgtcttaggaaacgttttccactatttattatactgatgttcctccatctgcatcattaggttcagtagttaccatgacaatacaatgcctacagcaatctaacttgatagccagatgtcagaatgtgaaaaaaaataggaccggctaagaaagtgagagaaatataattagtctgaaccacacagaaaatgtgcgcaaaacta

SEQ ID NO: 198 - DNA, 414 bp, Rattus norvegicus
  Genbank Accession No. AA819065
tttttttttttttttttcccaagagttagtatttcaaaactttattttctcaaatgagcaccaacacagatcagcaataacagaaataacgcacttcttactaatactgaatcattattatgtacaaataccggaaggaggtgaagacaaattattcaaaaacaatcgccttcgttattgaagcaaagtgacctgggaaaagaattcccacccaagaaaggaaaaaaaagaaaagaaaaacaaaagcaatcccaaacccaacaaatacagtttgtaaacagacagacagacagacagacagacatatccatggtgcacagtctctgcaggctgggaaagggaaactgactcctgttctcaccaaaccaccgtaagatgctgggcagctctaacccaggaggacaatgcctttct

SEQ ID NO: 199 - DNA, 630 bp, Rattus norvegicus
  Genbank Accession No. AA819103
tttttttttttttttttgtcacagtttgtttttattaatagaaaataaacactcattcattccagtttcaaattgctatacttgaaatttctagtttaaaaaatgaatttaaaataatcaataatgctgctttaactaagttaaaactgtggcttaaaaaagtattcagcaccatttgcacttaggtctttcagaatttgttcttaaagtatctgggaacttgcctgtctaagtacaagagttatgtgagaaagcctttctgaacagccagtgggatgctaagcagccatcataagagagtcagtggacactcggctgtcacaatggtcccctcccctccgcttcagccctggaagagcatgcacctaagctgagatgcgagaaggcagccgttatttactcggcttggactttctaaacaacagtacgtctctggcacagatgcaataagttcttaataccttgtggttttaggaaattctgtaaataatttcaacctgtttattcacaaattctatatataatgaggttttcttcttagcaagggccaactgtttgtaaatatatacacgagtatgcaaatcagtcttagacgcatactcagaacactgtatttatgccaatatctat

SEQ ID NO: 200 - DNA, 536 bp, Rattus norvegicus
  Genbank Accession No. AA819119
tttttttttttttttttacacttttaattctttattgtcttaaaattatacaggtcctttacaatacagaattttgttatttatgacctctaaatgttaatgtacaatgaatatcttcttctgaagctcaaccatgaattacgagttcatcaatatgattattttaaacagtcctaagatgctgagaggtctgagacctgcacttgaaaagatcagcggtacagacttttcctccctggagaccggatgatctgtgtgaaaagtgcttttgaagattgctcattatgtatggtcgatcttaaagtcagtcaaattacactttttttttttttgaaacattaaagggtatttttttaaaaatgaacaaattttctttagcagtcttctgaggcaaactcaaaattacgattatctgcatgcaataacactcctctttaaatagtttggaaggatttatacattttataaagaacatgttaaagagtgcaaggactcttaaaatcacaagaggacaaatgctggtaacaacactggta

SEQ ID NO: 201 - DNA, 502 bp, Rattus norvegicus
  Genbank Accession No. AA819129
tttttttttttttttttaagtttctcccaagtattttcctgcagctctctccagaagtcagataagagctgacgtcacagcacaaaccgagtggggacacagaggaagcaccggggatgccgagaggaaactggaccagagactctgtgtcctagtgactgccaaagacacagcctcacctcttcacttgcgtgtacacacacacacacacgcacacaccaagtttcccttgacttcaggctgttccctcagtgcagcaggcattgaacagagagcttcagtttctccttcaaggtcgggtccatcaagggaggcatatctttggtcttcaggacgacttcatgggcctcctggaagaggctctcccccactgcggcttccacccgctgacgccacgcagccagtttgggtcggctctcgaagattttgcagccagcactgacaggatgcatcagttctgtgatggccaccaagtcagccacggagatatggggtcctgtta

SEQ ID NO: 202 - DNA, 555 bp, Rattus norvegicus
  Genbank Accession No. AA819140
tttttttttttttttttcatttccatcccgtctttattgcttctgcgatcagtacaaactctcagcttcagtgctggcattccctccttcctgtctcaggaaccagtcattccaacttccaactcaaaagacaccagagacagctttttttttttttttttttttttggttttttttttttgtttgtttgttttgctttgtttttaataggcatgcaaagattaaagtagtgaaataaaaaataaatgaccctagattgggcaaagaaaaccatctttatgaagaagaaatttaaatgctggatcaaaaaatttaaaagacctggccttatgggtgtgtgtttatcggtaatttaaaaccaggcgaagttggtagtaggcaaatttttaaaaagtgatagagtagcgatggtattatttgaggtaaacattatgtattcaccttctgaaatctacagtgatcttaacttgtgctttcaatcaaatgtggtaaggtgggcacatgcctccatacccacatacatagcatggacccatcacttgtcagtaactcagc

SEQ ID NO: 203 - DNA, 468 bp, Rattus norvegicus
  Genbank Accession No. AA819246
tttttttttttttttttgagagttgcatgaattcttttaatttgcacaactgtggttcaccaggttctacatgcatcatgttccctgagggtttgttaaaacacacgttgctgtactccaccctggagtttcttattcagcagggatcagagagtttgcatttcttataaattctcaagtggtgcactgctggccagcgagctgtttcagaagtactgcatgcttcacatcagggaggcggtacacgtcaacctgtgtattactcgtctgccaggagtgacagctccgtactgttggcagcgtcataatcgtacagcaccctggccttcctggtgctgctggagtctttaaggtcactgaggttaggaggacaggtgattaccaggctacctgttgaagccacagcagaaggaccaatggtatttgacaaagtatacggcacaggtgtcccagaagtctgattgttgt

SEQ ID NO: 204 - DNA, 654 bp, Rattus norvegicus
  Genbank Accession No. AA819268
ttttttttttttcttttaatttaaagccacaatacacagaggaaaaagaaatgcaaaaaaatctctccgtgcaaggacaaagaggcctttaaccatggtgcttgtgaacgctttctgaagctttaccagctacaagttgggactttggagaccagaaggtatacagggccgaggagcctgcacctggggccgctcggtccagcctggtttagcctgggtgtcactgggtgtggtgatcccagacacatcgcactgtggattgtttcctttttaaatgaacggatgacatgtagcagagagccgcgtctgctcagagagagaacatcgatgcagtgcgttcggaggaaaaacaaaaacaccagaaaacctttttgttcaagcttgtcaaaccaacaacctgccaacagagaaaaagagtgtggacaaggggacttaaaaatgacattcagtatataaaacatgtacataataacgagtgactaactatcaaatagatggatttgtatcaataccaaatagcttctgtttttgttttgctaaaagctgaacgttcagcgctatgcaattctcgatttttagtacattgttaccagtttccgatcaccttcagagtaagctttcctcaccccaggattttgttgcttaaaaatactg

SEQ ID NO: 205 - DNA, 481 bp, Rattus norvegicus
  Genbank Accession No. AA819272
tttttttttttttttttaatttaaacaaaaaagggaatttattggttcacataactgaaaagtccaggtgatgtactattagcttcaggcacagttggatacaggggcataaatgtggtcatcagaactcaagtctcttcctcttttggctccatttccctctgtattggcttcattttctgcctggcttactcaacatagtaggccctgatggtttgagttctctcctacaaagctaaagcatctaagagaacttctccacaactgagaacacctagggttgattatcattggacaaacttgaatcatgcatccattcctgaactaatcaccagagtcaagatagactttactgtgattggtgaggttgcaacaaaatgtccagcacagaatagaatgtttaaaccacaaggactgaaaattggcagagatggttccaaaaaacaccaggaggttgttaagagtgagatggaaatggtcg

SEQ ID NO: 206 - DNA, 390 bp, Rattus norvegicus
  Genbank Accession No. AA819300
tttttttttttttttttgtttttttgcagggggcagtgggagtctttttttcctcagaagggtttcggtgattaaaatgttctacccaaaatgtagttcacaaagggggtccgggagacctgccgaactccttccggtcaatagttttaggatcacgagtcagatgagatcagttttttaaatcattgagagtacaaatgtatcttaagttgtccagatcttaaaatgcagcatttaaaacccgcctactcaacggctcctgattacacacttcttcattcagccaactaatggacaggtaggtcggtctgtactgggcagaggggtgcgaatgttgctgtatactacgatgtccgctcgtccagctataaacggtcctttgtcaccagt

SEQ ID NO: 207 - DNA, 561 bp, Rattus norvegicus
  Genbank Accession No. AA819338
tttttttttttttttttgaatgtactcatgtcaaatagtgactgtttattgaaagaagcaatggagggctgaggttgctgccctcaggcctggatgtggctctttgcactgaaagctaggtagtagatcactatgccaattgctgcagccagcaccccgtggagacccaaggcccattccaggtaccccgatggtccacactgactgtgaacagtggtgggatgatggaaacgtcttcattatttctttgagccttccttaggaggctgtaggactcttcatcgaagaatctgacctcataggtgcctgcatgggcgctcttgtgctccaggctccaggacacctgatatcgacccacatcctggccgcgggttacaggaaattgttttccactaacgtcggcataaagagccatattctggaccctgtttttgcaggtcagtgagatctccacgatgaatacagtctctgtagaaatgacggcatctgaagttgtatagtaagaaggggtgatctggggttccaggcaggcctctgagcagcaagataggccggacagca

SEQ ID NO: 208 - DNA, 562 bp, Rattus norvegicus
  Genbank Accession No. AA819349
tttttttttttttttttcattctgcatttatttgacagttcatccagttaaactgaaatgacacactgactctgatattggcaagagacctcgctaatactgatatctgccagccagtcacacacacataactatctctcgtcagagaactatcaacaagtcaccgcacaacattattgcacttcatgtggcttttttcttcaggaaaaaaaagtatttttagaagatcagcaaagattgccaattttcattcatttgttcttttttttttataaatcatgattaaaccacacagtgagtatcactatacaaaagcagtaagaggccgacacttcacaaaacaaattcaaaagagcccagctccatgtctactgcgcgtttctcactaactgggccgacacttggtgagttggaccatcttccaactgagtcttcacattctcagagctacacacgcactggggcaaggactctgagattggcttgatgaacagacctcgatgccttcagcttcttctgaaagtgttctttaagcacctgtggactctgccttgagctccag

SEQ ID NO: 209 - DNA, 421 bp, Rattus norvegicus
  Genbank Accession No. AA819359
tttttttttttttttttaaaggttcaccttgttttattacacagcattgttctagagtcctactgaggactgatatcaagtcttcctacttcttcaggcaaatcagaagaaagaactcccctacttaaaggtccctcaggatgtttgcctgtgaagaaaatcagctcagagaccctggaagctctcctgtgacagtatgtcctaaagcccaacccatccacctgtttacatgtctgtgcttctgagaacctagatgcagctacataggcactgctaccagagaagaggtgaggtagccgggtggtgaggaagagatctctcctttcacacctgcttacgatgatgacatttggacctctatgggcatctccattccattcctcagcaggctatgccacagagctctgcctcgtgccgaatt

SEQ ID NO: 210 - DNA, 422 bp, Rattus norvegicus
  Genbank Accession No. AA819381
tttttttttttttttttgatagtgaaaatatatttatttttttaatacaatagctgccagcaatatactggtgttgatgttccagagagaagaaaatgcaagcattttgtaaagagctttcattcctacccaaggaatcccatgaaatgctccaaggctgtccagcattaccgcctgggagtccaacttttatggcttgggactcaactttttttccttgataaaataatttgtttcccccactttgatcattacaacaatgaactttcagaagtctgtgagttttgctaacaaatgctctcttgctctctctctctctatctgaaccaaatgttgattattgccagctcaagaaactggtgaatccgttacaacacagtgaggtgtggaccaaaatcttcatgaaaaaataatttctactt

SEQ ID NO: 211 - DNA, 554 bp, Rattus norvegicus
  Genbank Accession No. AA819390
tttttttttttttttgtgttccaatgagtctttatttatagacacgcaaatcttcatttcataggactttcgtgtattgtgaaatgtgattttgaaaaccactcagaaacacagagaccattcttagctcacaggccatacagaaacagatggtggggccggacctcacgagcacagtcacttcctaacctttgttctaaatacttctgacacgtatttgctggcatggacagaatgtctacttccttattacgtgagatcaataatatacaattttcttaaggctttgtctaaactgctggtgtataaattttttaagacaaaaatttaaaattatttgtatgttaaaattaaatgctaaagaaacaaactggccaagtttcatttatttcttgacgcaacatctctacagctcacgcacgcagcaggacgcgcaccttggcttcacaacagcaccgggctgcacttgcggctatgatacagcaggggaaggtggctgggaaatgtacatctatacacttcatataagttagaggtggctactccatgaccta

SEQ ID NO: 212 - DNA, 477 bp, Rattus norvegicus
  Genbank Accession No. AA819471
tttttttttttttttttaacagtactgagtacttttattacacagactttaatagcttcagctggaaccagactaaacttagcacagtagattgctttcaattgtatattcttccttgttaacatattatggaacaaaaaccataattccatgcaccaatggtctttcctctaaaggtgccagagcctgagataagggttcgcctgaaggaaggagcatttagtcccacttggatgtttttctcctcatgtaccgatgcccttcactgtcaatggcttcatagaggtcctttttgttctcttgcgttgcatgcagataaccaatgtaagccacacagagtgaaagggctaccaatccaaaagccatcacaggtttgttaggtttaatgaagagctcaggattcacagctcgaaacaaggttgttgggtgcgtccctcggaggcctgggttttcaaagtttcctcgtgccgaattctt

SEQ ID NO: 213 - DNA, 558 bp, Rattus norvegicus
  Genbank Accession No. AA819488
tttttttttttttttgtctgtatcattactttattgcttatgttacatattccaatggataaaatttcgttttaaaaagtaaggcacatgaaaagccttctgtgcaagttccatattatattaacattctattggctaaggagagcatctcgactacagaattagaggcatctagaaaagaacatgatagtttgggagcagaatcctgaaccattattaggtctcacctcatggcacaatcagtcagcaaccccaacgtctgtgttctaacagtggagctagattgccactacagagtcactgaccagagtattcacatatgtacagccaggtccccaagaattagctatacagtcaacgggaagggcagcgtctcactgcagccatgccctgttctagcacaggtaaggaatttggcatcttcagttttttgcatgccgtgctggatgttcacaaggcctggttatacaatgctgaaaaccatggagagatactgctcgtaagacacctgaatccagccatcctgatccgtgtcataacgtctgaatatgtctgtca

SEQ ID NO: 214 - DNA, 575 bp, Rattus norvegicus
  Genbank Accession No. AA819527
tttttttttttttttttggagttatttaatttaatttatttatgtaatacagtgtagaaagctatcatggcataagcaatgattctgtacaatcatcctgcagaaaattatttttggagaattcttggtaattggagaccagcagaacactccctccccccacccgtaaaagtgcttacgatgaacagggattttttttttaaatttttttttatcaaagatccaaagatacatggacaaaaaaaagttcaaatcctcaatgcctaatgtgtgcacataaaacaggcacaaagaaatcaatgtgtatcctcgtattcctatatcgcaaagagagcagaagcagcaatctgtacagtaagatgcaatcatggaaaacgaacttttctaaatcatttggaatactcaaaaatgtccaaaatgcatagtgatcaggaaaagaatacttaagagaggagaagcagctaaacgcccacgttcacacgaagcatcccccatcgattttttttaagcgtatttcaagtatgagtttttcgggccacataccacaagaataatatacaacgggctaaggggct

SEQ ID NO: 215 - DNA, 529 bp, Rattus norvegicus
  Genbank Accession No. AA819530
tttttttttttttttttgtatttgaaacatttatttcaggaaatacatttcaacactttgttatttatacaaaaaaagagacttttccaccccccaccaggaagcccccagcaaagggccacgtggaatggcctggtgagacgaacagtttcaatacctggttacagaggcacaaagtcatcctgatgacaccggtcactgataaatccccagggacactgggatcggagaagaccggggtgccctgggtccagcgtgctggagatttccttcaaagtcctgattttggcaaaagaacttggcaagctagcaagcgaactgttcggccgtagagcgtgacgagggaggggccttccacgcttgggtgggtgagtaggcgcccaacgcagggaacaatgctctcctctcatctgtctgcacgcctacccctcccactacacttctaggctgcagagagctagcccggggtctgtagaggcaccttccccaagcgggtccgacctaactaacctcaccaaactcctcccca

SEQ ID NO: 216 - DNA, 549 bp, Rattus norvegicus
  Genbank Accession No. AA819547
tttttttttttttttttaaagggttcaccagtgcaactttatcacgaccatcaaataatgggtttatttgtactctaagataattaaatattaacatgcaccttcccatcaggtgacctcatgggtcatggccaatatagaacttggacaagaaatcttttggccttggtgtttctgtttcatggaagaaccgcataatgtgtgtccgctgcttccacactttaatggtttcctggagctccatctttcccttaatgaccaggaggtcaaccactctggggtcggtgacatgggcattcttcatgaacatttctcggactttatcccgtccttgtttcaccgtgatatccagctgcattaagtgcacagtgtttggcacctcccggtaccaagcgcggtagagctcgcgcaccctccgcttggcctctttcaggtcccgactgaaaatgggcttcaccgaggtactggctgcagaagcagcctggcgcaggccgctggccgcggccgctagagtttttttttttttttttgtgttgttttttttttttt

SEQ ID NO: 217 - DNA, 426 bp, Rattus norvegicus
  Genbank Accession No. AA819554
tttttttttttttttttggtgggcacatgtttattgaccagacacgtgtgaactaaaaaagtttaaaaatcagcaagggaatcaactcccttccctacaagcagacagaatgtcctcttctgcatccagaggctcttgaggttccagttaggatcagagatccctgtcgccctcgtgctgacccctctgttggggcatcgacctcttgaggcagccacctcaccaggaacacctgggatccagcccaggctgggccttgatgctagggcgtgggtcaaggcggtcttctccggatgtccgtggttaccctcagctggtgggtggggacagggtgtcagtgccgaaaagccccatcagctgagcagaggggctgatctgtcattggtcactgttggtttcagatggacgttggcaaagggattcctg

SEQ ID NO: 218 - DNA, 573 bp, Rattus norvegicus
  Genbank Accession No. AA819653
tttttttttttttttttacttctggttttgatcatttatttcagaaaattgaaatatactatactcgacattgttgggcgtcttcaggtcatcccgatgttctcagtttcccagatgctttgtgtgtctgccttgtgctattaattttcctgtggccttgttggtcagatccactgaggcaaatgccagcgttcttccttgcttcagaatatgtgctgtgatcactatttcttctccgatcttagcaggtgacatgtacgttatgttcatgtcaatactgactccgggtgcccctctttctgtgcacattagagccatggtggatatgctgtccacaagggttgccgtcaagccgccgtggagagtaccaaacttattagtgtgctgctcctccactttcatttcacagattagcttttcaggagcagcagagacaagtgtcaccttttccaaaactctatcaaaaccgggaactttgaacataaccttcattatttcccgtagattctgggtcatgttgctcatcgtggacgcaaagcaagagtctgggctctgcgagaatgaactttggaa

SEQ ID NO: 219 - DNA, 485 bp, Rattus norvegicus
  Genbank Accession No. AA819672
  misc_feature (1)..(485): n = a or c or g or t
tttttttttttttttttagacccatattaggtttatttaataacagagcactcgcttctttaaataaaatatctcaaagttctagctttgcctcaaacacaatgttgcacccaaacagaaaagcacaaatcaaaccaacagaaagatagttttttttaaaaaattatctccttaggcctctgtctttaacttccccttgttcctatttctatgagagagaccgtaacgcacaggctgaggagacacactgccaacaaggctaatgtgcaccagaccgaagagggacagctcggctttggccagccctcttcctgcaggataccaatcctatgtttgcgtcaatcctgacctgctcagatgaagcggcactcaggcactagtcagccgttgaccatacaagaacagagaacactggagtagacagagctttctccaggaatgctgacaggcgtcnctcccttttgagaagtcctttgctttcctga

SEQ ID NO: 220 - DNA, 485 bp, Rattus norvegicus
  Genbank Accession No. AA819708
tttttttttttttttttaatggttaaggactgctttattggtggcagttaatacacatcaataaatattgatccccatagaagagttcagttattcatcaggttcctggtccatcgcgcagtgaatgaaactgaaccatgtggagactgggatgacgatgtcagttctgcttcttggggaatgcagccatagctaacatatagatggcatacgctgttccaccaactgtcagaagcattgtggctctgtaaaggagggcatcagatgtcccgcctttcagatgaactggcatcccattatcctcctgaaacagcttttgcttctctggaactttgttttcaaaatgccttcgtgaagtggtgctgatggtcctctgggcaatctgacgaagggccagcacattccgcagcatcttagctcagttgttacccaccaaccgcgactactgaacgccaaaaatcgaaaacccctcgtgccgaattctt

SEQ ID NO: 221 - DNA, 145 bp, Rattus norvegicus
  Genbank Accession No. AA819776
tttttttttttttttttctcttccttttcttcagcctgatcaacattgacttccttgtcacgttccttctccacacatagagtcatggggtagccaataaactgggaatgtttcttcacaatttcttttattctcggttcctcca

SEQ ID NO: 222 - DNA, 517 bp, Rattus norvegicus
  Genbank Accession No. AA819788
ttttttttttttttgttagttatcatcaagatttaatcaacactgcttgagaacagtaagtgtgaaagctagtacagacagttcagcaattcaacacagatttgttattggatccattatgtgtgggccatgttttaggccattttcagagcatgcccaggaaagcaggtttattctctatacgatcccacatgaattcactgtcacgttgaaatgacatccattttattgatcaccacgggattaaaacaagatgataaacctattatctaatgaagaaaccaataagggcaagcgcagcgacagacaaaatcactaatagtggtgatgctgcttcaccgggctctctgacttcctgaaaaggcctgttcctaaaacctgtaatctcagtctgaagtaaaggaaggtggctccttgatggagaggaactgtggctctttggtgatggcgatggagatggagatggggatctgggtggcctcactctctgtgcaacggcacaccttccatgggggtg

SEQ ID NO: 223 - DNA, 514 bp, Rattus norvegicus
  Genbank Accession No. AA819798
tttttttttttttttttaacttatcccaaagtagcttttaattctccggggagtcatggagaactcttaacagagcagtgacctcagggcgaggagtgggggtggggctgaagctctgaagttgctcatcctgcaggatgaaagccatgacccacacgctggggctcatgggagcagcggctctggcctggtcctctgtgaggttgctggtgagctgtgaagggcagagcagaaggttcctggggtctccctgcgcactgtgccgcgcggactcttttccacagttttccagaagagactctcccaacaccgaagagtccacaaacttgccttcaattgcagcaatcctcctgcttcagtctccagagtactagatttcccctgcagctactgcaccaggcggtaggtgatgtaccggccggctgtctcactggggcggataatcttcacaaactgccctcgcttgatcccgaagtaccgtgccaccgggtccccagcctggatcctgggcagc

SEQ ID NO: 224 - DNA, 593 bp, Rattus norvegicus
  Genbank Accession No. AA819816
tttttttttttttttttgagttacaataaactattctttattatcccagcaatttccagggaaaacagcctactggcttagactacaccatctctgtggttcatgatttataacaattcatctcgttacagtacactctgaaatatttacagtatgatagacttaaagcagagaggaaatcacagcaaaggtaagccttctagatccacttgtgggtcattaagagtatatgcacaaccacacgggagagacaaccagcctctcccttcatatatattcctttttattttcttattttaccttcccaaaacagagacactcaacagtagttagaatggtcatctcccaacagttaaaaagctgcatcacccaatgggtgaacaaaggaagaagtggaaacctaaagttcagctgagccagccactgtggagcctttagtggtgaggtcttccgatctcagtgatgtcttcaacatacaccatcattttagtggaaaaacaattgatttggtgaaatgagattcatttccagacaggttagtaactgcattcactgaatttcacactcttctttgtgaactgtgaagaaaatga

SEQ ID NO: 225 - DNA, 510 bp, Rattus norvegicus
  Genbank Accession No. AA819870
ttttttttttttttttcgagattggctgtctttattactgaagaacactctgtgcttaccaagggatgaacagcttcttatcaatttactgcttcataattcaacacctactatgtgcctttgtcactacatggtgacccatggtgaccaagaaagtttctggctcccggaccatgggacggtaacaaaagtgcagtgagcaaagggagtttcaccatgcaaggacttagggttttgctccacccactgtttactggaattaacatgcactgaagaaactaaagcctttaaagggcagagtggcattgctttttgttgtggtagccctgggtgggagctggtgtgctaaagcctggctaagtgtgagagggttagagccctgctgatcacctgccggctgtgttccctccctttaacagttgagtgtttctgaagcaggacctgagcaggggctgcctcctctctgaggtgccgggttgttgcactgcctttgtcttgttttgcgtcctc

SEQ ID NO: 226 - DNA, 430 bp, Rattus norvegicus
  Genbank Accession No. AA848268
  misc_feature (1)..(430): n = a or c or g or t
gaagatactgtttcatggagaaggagatcaggagcctgagctggaacctggtgatgtcataattgtgcttgatcagaaggatcatagtgtctttcagagacgaggccatgatttgatcatgaaaatgaaaattcagctctctgaagctctttgtggcttcaagaagacaataaaaacgctggatgatcgagtcctcatcatttcgtctaagtcaggtgaggtgataaagcatggagacctcaagtgtgtccgcaatgaggggatgcccatctacaaagcccccctggagaaggggatgcttatcatacagttcttagtagtcttccctgaaaaacagtggctttctctagagaagcttcctcagctggaggctctgcttcnccctcggcagaaggtgaggatcacagatgatatggatcacgtggagctg

SEQ ID NO: 227 - DNA, 433 bp, Rattus norvegicus
  Genbank Accession No. AA848270
  misc_feature (1)..(433): n = a or c or g or t
gatggtggcctgcgaaggccaattttagtatcggcccccgtgcttttagcttagaaatacatttacaaagctgtgattgtgaaaatacataaaacacctgacaagatcaaagctgcaggaggatggacagtgaggtacagcgagatggaaggatcttggatcttattgacgacgcttggcgggaggacaagctgccatatgaggatgtagcgattccactgagtgagcttcctgagcctgagcaagacaacggcggcaccacagagtctgtgaaagaacaggagatgaagtggacagacctggccttgcagggcctccacgagaacgtcncacccactggaaactgatgctgggctccttcccacagatggggttttcagaaatacacggataaaaatgttttctctgtctccaaactcagatctttagtaat

SEQ ID NO: 228 - DNA, 672 bp, Rattus norvegicus
  Genbank Accession No. AA848306
ggttacaaaagtatttattttataaaacttgtatttaaaatagagcttatctgtctactcacaaatcctaatttaaaacataacacattatccttagctaatctgatgttaacctttacaatcaacactcatttttgtaattttattaagaacctgtactaaatgaagtttttaatcagaaaacattcccttttatcttaaaagtgcttcttaaatgaaggcaccaacaagaactactttcagatggtacagaatttcttatttcttgaagactctgtggttgaccacttcttcattagttacctgcagcaagacaccttcctgccaaaggaaaaaaaaagtatctgaagaagtttatcatgtttgtccaaagaacctaagtaacttcagtggtggttttaggattaaagcagactcactgatgtgtatacgccctgaatatcacatttctggaaaggcagtaaagcctagaaatcagagggcgggcggttttaggaaatttcaatagccaacctacaacattttagggcaggataatgggcaaaaattactaccacattttaacccaattatttagtcagggtacataaagggttttgttgctgctgttgcacagaaatttctactgtccttaacctatcagactcatccctgacaagcaggtaaaggtgg

SEQ ID NO: 229 - DNA, 675 bp, Rattus norvegicus
  Genbank Accession No. AA848315
  misc_feature (1)..(675): n = a or c or g or t
tgaaaaattcaaggcatatactggatctgttttcagaagagccgtttctcatacgaatggaggccgtgaacgccaccttccacctgagctgaggacgttctcttctcaaatttaagttcccccgagtacatcatggctctgacttgggttaagctcttggcaccaatgtcctgacaggaatgctggatgccagcaatcaaataagggacaaacttgtggatagaccctttgtcctgcactgcccctgaaactccttgggccactttgatcttgtcagcttcactgaaatatcggttctggctgctgaggtgtttgtccatggcatcaagagagcccataccacgatacttcttcagccggatcccatcggagaagaagtactcaccaggggcctcagtggtggcagccaagagggagcccatcatgactgtagaggccccaagagccaaagctttggcaatatgacccacattctggattcctccatcagcaataacagggacaccgaagcgacgggcatactcagagaccttgtatactgctgttgcttggggtcgcccacaggccaacacttcctgngtgatgcagatggaaccacttcccatgccgactcgcagagcgtccacacctgcgtcgatgaggttcttggcttgagcagcagtgactacattgcct

SEQ ID NO: 230 - DNA, 491 bp, Rattus norvegicus
  Genbank Accession No. AA848324
ccagttttcaataattttatacaaagtcacagtgttagaacttgtagaaaacaggctgggaagggttggggtgcagtgtcagctcaggaggtgtccattgtttcacctttgagctcattgaagaggaaggcgtcctggtattccttcatgtactgtgtggagcgggattcatccaggaagagggagtatacgcgcttgatgtcgtccacctgcacctccgtgccctttcgtttccggcacaccaggctggccgctgtgatgagctggatggcgtaacgcagggaggtctcgagcccaatgcaggtcagcactgtgtaagcgtcctcactcatctccacatcttcctcctcacatcggatacgtaggatctgtttggtggccttctcactgtagggcgatgttgacacaatgagcagccggtctagcaggtcaatggggatgccgtggggactttggtagctggtgcctcggatccgggtgatgcctcggtt

SEQ ID NO: 231 - DNA, 561 bp, Rattus norvegicus
  Genbank Accession No. AA848354
gagaaggcgtctgcgcggccagcctccccaccaccatgggagtggttgcagggatcttggtacaaaatgtattaaagtttctgttaaaatttgggactgtcagtttttacctcggatacaatgccatgcaggacttcttccctaccatgttcatgaagccaaaccctcagtgtgatgacaaaaactgtaggaagcaacaagaagaatacaagaagagggcaccagcgcagcccacgcaggagactgcgccccaagaggaggaagaggtagttcatgaggacaacgagtggggtattgagctggtgtctgaggtttcagaagaggaactgaagaacttgtcaggtcctgttcccaccttacctgaaggaattacagtggcatacacagtcccaaagaagagagaggattctgtttctgaagtaacggtggaagattctggtgaaagcttggaagatctcatggccaggatgaagaagatgtagacagtgggctggcacctgccgtgtttccttgcttgcgctattactcccttggaattaaacagtcagaactaataaaact

SEQ ID NO: 232 - DNA, 685 bp, Rattus norvegicus
  Genbank Accession No. AA848402
ccaggagtccattacttttaatttatataatttgaaacagcaatctcaatgtttataataaaggactcaacttgaattctaatgaagtatatagaaggcagaggtggttgctacatactgaagaaaaacaaaaccaaaagccctagtaggaagtactttaatcatttttcttagaaaaaaaaaaaaaatccccagacactcaacaacagtttacaacatttcaacaaaaggtactggttgggagtggttaggtttaaatattgggaatgtgtggcatctgcttcattacagatggacggatggcatatgcagtcacaaatgggagatttctagctgcttggccactatcaaaacactagaatgacattttctttacagtctgttttccttcctgctatctccctataccacagaaatgccaccatctgaagccccgtggtggctggctcaggctcattttcccttggggaaggtcactcctgagtctccatgctttcttcttcttctccctgaggcggctcttctgtgttctcttcctcttcctctccctccttcttctcaggcggcttttcataggccttttctgaaggtgtcacaatcactccatcccaggtagatatttcagaagcaagataactgggcgtcccctcctgcccaagggatcttccgaaagcctccgtgggga

SEQ ID NO: 233 - DNA, 476 bp, Rattus norvegicus
  Genbank Accession No. AA848404
actgaaaacatttattacaacaaaatgtcagcgctgtgtgaccgagttgatttgggcttgaccaaagttgtatagggcaggggacctactcgtgggactggggacctgactgcccgctaagggcttaggtcttcccaggagccaaagctgagtatcttcctcctattactagtgtcttcctccggtagagttctggcaggggcggggttcttggctgtcctgtggctgacgatgatgctgctgttggtgacacggggaccataccagcctttccagaactgtgtgtccttgcccccatgttgaaaaaggatgtgacggacgccaggagggtaattggagaaggtgtgggagatctcttgccagctggcgtcattccactgttcgatggtcacaggcggaggctcaaaggaggctaggacaatgtaatcggcaaaggccagctgtacccggaggtgataggtacagccgcagtctgc

SEQ ID NO: 234 - DNA, 580 bp, Rattus norvegicus
  Genbank Accession No. AA848427
ccacattaaaagattttttggagggaagtatcttctgttaaccacatgatgatcctatccagctgcccagagtcggacaccatcgtaagtcattaattaacatgccatatgagtctgaataaataaaagctacaaagcccaagttatatacaaatatcttaggcaataatgtttacaaacctatgtacagtaaaacaaatgtaaacagtaagtgcagcatgagaatagccaaagggtgcaagggacaaacacctctagccagtctgtgcccaagagctgacaccgccagcccacaatcgggcccctcaaccctccccagtgcaacttgatggcccttcagaggagaagaaaaaaaaaaaaaaaaaaacaaaaccgctctgagagatgtcactgacctgagggcctggaaagctggcaagaaggctgccacctgcctcctgagtctgaggcacagaggagagggcagcacagaggctcagccctggagtgcccatgtctcagctgcccctgcctcttgcagctcagacaggcatctcgctgctttgagaaacaagcattggaatggactgcttacataaag

SEQ ID NO: 235 - DNA, 458 bp, Rattus norvegicus
  Genbank Accession No. AA848482
gctagaccagtccacctatatcagcaccattcgcgaacgatttcccaagttattacgcctggatggccatgagctaccccctccaattgcctttgatgtcgaagcccctactatgttaccaccctgcaagggaagctattttggaacagagaacctaaagagtctggtcctgcacttcttgcagcagtactatgcaatttatgactcaggagaccgccagggtcttctggatgcctaccatgatggcgcctgttgctcgctaagcactccttccaaccctcagaaccctgtccgacacaacttagccaaatacttcaatgacagcagaaatgtgaagaagattaaagataccaccacgcggttccggctattaaagcatacacgtcttaatgtcgttgccttcctcaatgagttacctaaaactcaccatgacgttaactcctttgtggtagatataa

SEQ ID NO: 236 - DNA, 549 bp, Rattus norvegicus
  Genbank Accession No. AA848530
  misc_feature (1)..(549): n = a or c or g or t
cagccattcattttcaagcccccacatgggaaatggtaggggaatatctgtaggaatacaatttattgtctgctcctccactcagaagtagccctgtgtctgtccagtccacacttagaactttgtcttcatgtgcagctaggtcgtagagaggagccttacaacttctcgtatcccatagcttcaccatgttatctaaagagcctgagatcagctgctgatcatgggtaggtgaccacttcactgatgttacccagcctgtatgtgaggtgagggacagcgacaccaaagagccatctttagttcggggatcccacagcctaatgtgcctgtctgtgcttccagacgccaaacgtttacagaggggagaataggaaatacaattgaacaccttatttcctgtcagagttgacttaagacctccggactcaacatcccacactctgactgtgtgatcccaagaggcactgcagacttcgtcagcatctgaccagagtactgaggaaattgcttctgtgtggccanagagggtcaccaagggtgttcttg

SEQ ID NO: 237 - DNA, 467 bp, Rattus norvegicus
  Genbank Accession No. AA848563
gctgacagaaccagtttctggttccactcggagagaagcagagaagcagagcaagcggcgcgttcccgaacctcgggcaagaccagcctctcactgagcatccccaccgcgaagcgcaaccttctccagagcatccccgccgccaagcgcaaccttccagaagcagaccgcagcgacatggccaagaaaacagcgatcggcatcgacctgggcaccacctactcgtgcgtgggcgtgttccagcacggcaaggtggagatcatcgccaacgaccagggcaaccgcacgacccccagctacgtggccttcaccgacaccgagcggctcatcggggacgccgccaagaaccaggtggcgctgaacccgcagaacaccgtgttcgacgcgaagcggctgatcggccgcaagttcggcgacccggtggtgcagtcggacatgaagcactggcccttccaggtggtgaacga

SEQ ID NO: 238 - DNA, 437 bp, Rattus norvegicus
  Genbank Accession No. AA848595
acagaaacatgaaggcaatatacactaaatgagtgcttggcagtgaacattacacagattagaagtgaagacatcctcattggatggacatataaaagtaaacactgagagttgcaagaaagaattcaacttctatcccccaaacaagctgaagctttcaaagaaaagcctggtgtcaattcactatgaattgttccaatgggaagataagatgagctgctagataatacatgggctgacttttgcccttctagagagccagactaaggctctacttagcttctcaaatgacaacttctatctctactcatctaagagtcagatgaaatgaaaacagtaacagtgagctggagacctttcatggacctaggaaggttcggggaaacagatgaagttatactaatttatttctgattaaaagccattggtatgagtcc

SEQ ID NO: 239 - DNA, 644 bp, Rattus norvegicus
  Genbank Accession No. AA848753
gggtgtaagggggatttatttatcattaggggtaaggggggtgtagctgtcttcagatacaccagaagagggcatcgggtggctttacagatggttgtgagccaccatgtggttgctgggaattgaactcatgacctctggaagagcagtcgggtgctcttaaccgctgagccatctctccagccccaaacctgaactttttaacgtgcttcccccccccccttcatctcaagactgtgcagcacaaactagcagaattgaagacgaacatatgtgttaccagagcttttgtggacagctgcctacagctgcatgaaaccaaacgtctggactccgcctccgcttccatggcgaaatattgggcatctgaattacaaaacactgtagcttatcagtgtgttcaactccatggaggctggggttacatgtgggaatacccgattgcaaaagcctacgtggatgctcgagttcagccgatctacggtggtaccaacgaaatcatgaaagagctgatcgcaagacagatcgtcagtgacagctagacatctgcctacatcctgaaatcctactacatcacagctaatccggattcaaatatacttgagattaaatggaacctggaaggggggggggtagtaaagctg

SEQ ID NO: 240 - DNA, 591 bp, Rattus norvegicus
  Genbank Accession No. AA848758
aagtcgtatacgtggggttattcccatcccaggggttacagggtaaaagagggcatttgtagtagagtcagctcaggggcactttgtagcagtgatttctcctgaagaaatgagagagacagacagtgacggttaagatccgaacggccacgaagatgggccaagaaccaagctcacaggtacttgcccaaaactccaggagtcctgtcctgatgaggagtaaaaaagacgggacattttctgtcacgcccagaatgtaggctaaggctcgaggctgcgggctacaaatgttcccaggcacgcaaggcctctcaggtgcatctgtaggcaccatggtgcctgcccctggggttcaacgctgataaacacggcatactcattttcaggagacctgagtgaatgcggctaatgattgcttcttacaaaaagtggcaaggtccagagaaaaagatgtttgctccaaggcacccagggtatactgcttttcagaaaaattcacagagaacagactaaactagagaattagatatcagtggaagaaccccattaccgtaactagccaagagattacgtcagaggagactgcaaggg

SEQ ID NO: 241 - DNA, 616 bp, Rattus norvegicus
  Genbank Accession No. AA848807
attttaaaaataagtttattcatgtatatatttacaagaatatatttaaacattcatcaaaaactaaagagtttttaagaatttctcaaaatcgtttactgaagctttggcaatctctttacaaaatacttcatcaggaaaagatacgaacttgtccaaagacacatagttaggttttgctggatcatactgtgctttgcccaagtaggcaagaaacaagtgtctttctttaattttaaatactcttgtattaaatacctgtgggaacttgacaatgatatggtggggaatattcatcacattgtgtacataatcaaaagtctccgtaagttttcttttgtttgcagttagcatcttagggatcttggtgaccatatgctgaatttcattatgtttaaaaccaagttcaaggcggtaaaccttcatgttttccttcacaggctccagacttcctgttagtagccttggaagacgaacaaccagatctctagtcttcttcacactcagttccagttctttctgaaaaaatcccagtctgttatctagtctttccacggagaagctcaacagaaatggtgcatttttgaccatacaggcaatatctgtcttactgaaa

SEQ ID NO: 242 - DNA, 596 bp, Rattus norvegicus
  Genbank Accession No. AA848813
acaacacattccatttttaatacatcagaaagtttccaaggcaacattatccaacacctgtaccactgtccctagcataacacggagctctaagggggtgagtgggggaggggccgcccagccaggactcaggtgctcttcttctcgtcgcccagcaagttcaccgtagccttcttgacttctttgctgatggcgtctgcagtctctttggctttgtccttcacgtccttcaccacactgtctacctgggactcgtgcttcaggaagatgggacggatgacacgccggtacagcagttcagccccgttggacgggctgggagccatgcaccacaacaggaagccgcacttcagcatgtagtagaaggggaaccaggacaggaaaaggtcggagaagaactcggcaatgctgaacacaccatacaccacccagtacgtcagccactgggtgtcatcatctttgttggggctctcgatggctttcattgagatgtaggctgggtatccgaaacctatcaggttgcagaggagagaggctccataaccgaacaccagatacaaagccaccagtccgatgacaccgagcgcgatgaagct

SEQ ID NO: 243 - DNA, 439 bp, Rattus norvegicus
  Genbank Accession No. AA848834
aagagttagggtctcctgttcccccgaatgtattagtggctggacttggatttagtgtacacagtagagattgtatctcaaacttcaagagtaactctcacaggttgcccaaaggtatctataggcagcagaacttgcctttggggttccctgcagaacagggagcccaattcatcaaaaacagggaggtgcctttcccaaagaaagaaaagaaagggaaaggaagatggggggggggggcgagggcagaggacagggcaaagtgcctggtagtcagactcctcacttaggcagatgcagtgccccaaagtgccaggcagtcagcccgcttgaggttcaaggcctgcaggaagcctcgcactcgctcttcccgtttggcggagagtttgtgcaagcgtgtccgtcggaattgggcatccccattggcctgcagcccctc

SEQ ID NO: 244 - DNA, 316 bp, Rattus norvegicus
  Genbank Accession No. AA848929
cagcgcccttgaactataacaaagtgccctccctgcccacagggtgtagccccagctttgataaccgggtgtagggtccaggccactctgaaaagcaggacctcacgcccacaaaatattcataggccaagactctcacaaagtcggaaagcctggcgcccagagtcctgtccagcgcaccgtcagccctcggtgacaacagctctgaggtgagagggctgtctcctcaggtcttcctggttggatggctgaggttggaggcagccatgacagtcacctgcactgaacagacagtcctcgaagtcgacctcgtgcc

SEQ ID NO: 245 - DNA, 486 bp, Rattus norvegicus
  Genbank Accession No. AA848941
aaactgtcactttgcgggtagggaggctcggtgccgcctgggtcggagctctgtccccttggtggctgagctgaaaccaaacgcagacagccatactgggcggagcaggagcagggtggggcgcacgcgcagaaggccagggtggggggaggcaggggtgggttagaggtcactctcgccgtacagcgccgtggagaaggacatgtagtctagagcacccggcacggagtcagggcccgcgtaaggggccattctcgcgatgcagtactcggcttggtcaggtggcagctcgcggcgcagctcatccccggtgatgtaattcttatctccagccaggatcttgaaggaagcatgacctgatccgctgtatctgtgtcagccgtctctcgggacatgaagtcgatgaaggcctggaacgtcacttaccccaagcggtttgggtctacaatgctcatgatcgggcaaattctgcctctcactgggggt

SEQ ID NO: 246 - DNA, 346 bp, Rattus norvegicus
  Genbank Accession No. AA848967
gatccagaggagaaactaagtgcagggtggggaagagggggctaggcagggaggggccaccttgcctgggtgtcctggcccccaccccttatcttgggagccaagccatgccctcctggccccctttggagcacccgggctgttccgtagggcaagaggggaaaggagaagcccttggtctgagccatagccagtggagcacggggctggagggttgaggttggcaaggtttcttcctggaacccaagactcaacgtgttggtgagcctgacctggcttgggagccagggtgatgaacaggggtgggagtgacaagacgacaactggggcaaagagtggagtcatc

SEQ ID NO: 247 - DNA, 581 bp, Rattus norvegicus
  Genbank Accession No. AA849038
ggaggcaattctgtaactttatttgacattcagcagttagttctcatccacattgaccgtctgtagatttttgaatgtggtaacaggcacgtaagttaccagtgtgtagagcttgtttggtgaatcctcatcctcattacgctttctggacaaacgtactcggatgcggtacggaacattccttattcctttggcccagacggctttattgagcctggtgtctatgcgcacatctggagttcccatctccttcatggcaaatttccgaatttctttgagtgcccgaggagcacgcttcttgaagcccactccatggatgcgtttgtgaatgttgatggtgtattctcgggtcaccacctcgttgatggcagaacggcccttcttcttctcgccacccttctttgcgggagccatctaaacgcagggatagggaggtttaagcaggcagtgggaaagtccgggctaaggtgacctcggcaggctgttctcccaccgccccggaccgcagagaaatcacaccgagcttgcccgccccgcgcccggagcggatggagccggatttcagagccacgaccccgcaa

SEQ ID NO: 248 - DNA, 317 bp, Rattus norvegicus
  Genbank Accession No. AA849354
acagagcctgggaagagacccggcatccaccaaaacaagtgatttattaggaccgcctgccctgggagctgctgagcaccccctactgtggccaaggtcctacagagagttcatctcgctgatgggtgacaactctggccggcccagcactcactgctgggtctgggtccctgagccctcaggtcttgagatgcagtctgaacagatgggaaaggtcacttggccagctcctcagccactgcttttcgcatcttgtccttgaggtaggcggttttctgccattcagacttcaaatccagccactcataatatgggac

SEQ ID NO: 249 - DNA, 395 bp, Rattus norvegicus
  Genbank Accession No. AA849426
ggcagtccccagcacacttctttattgaatgcaaaggtatgaacgtgtaattacaagacatacaaacaaagagcctatgctgatcccctggggtggggtagtaactacctttcctgggacatgctaaaggcctgctgctcatccagttgtcggccctgcttttaacagggtctgttgtccatggcaaagcagctgcctttttgtctgcactggacagcagcagcagcagcagagtctgcagtgctctcttcccagtcatggaggctgtgggtccctgtccctgcccacatcctgcctctgcttggctgagcctgaaggagggcacgacaccagttagcccggcccaagcctcatctactgcagcccagacttcatcctgcagtaactactgtacg

SEQ ID NO: 250 - DNA, 496 bp, Rattus norvegicus
  Genbank Accession No. AA849525
taaaagactagcatttacaacttggaatggacgtaaattataatttcctgaacagcaatgttgatggtgtgctcaagtccacagacacagcctactctgctggctccgagtcatggttcacaaggttttaaaacagagagtccaaagatgctcccttagtaaacatttcttattaaaacgtgtgtgatttggtgacagccttgttcacttcactccaatgcaatgtgcacagcggtgaaccatcacactgtcactgtccatcatcctgaggtaaaccaattttaaatgtttgtttgcggtaaactggctgctgacatttatctgaacagattgaactagaagccatctgagagtttgaatttgttttttccatttttcagttttaatacaaaggcctgactgtgctcaatcaccaagctgcatgcatgagaaactggccagcccagacagtgtgttaatcattagcacatggaacttgaaggagtccactaagtgc

SEQ ID NO: 251 - DNA, 509 bp, Rattus norvegicus
  Genbank Accession No. AA849531
aaaacacaaataagtatttctctttcgttaatggcaaatggttcaaataatgttgaacacaaatcattgactaatacagggcattaaatatgaacagacttttttttttaaagcaaaagaatagaggttatatacaaaagagacctacaatctataggccaattcaaaaaaggaaatgtgtttataaatgtgtggtgaaaccagaaccttccacctctgctttggagaagggctatcatacaacattcagtcagctgaagatggattggtacaagtgtctatacagaaacttcaagtcatttgtgcatgtgcagaatcatccagatcttcccgactgaattggcagtcctgtggctttcttccttttccatattcccaacaaggctacatgaacttcaactcttggtgagccgcttacaacagcagttccttacgagccaacatgacaggtgattcaggacttccctacgagaaacaactggccaccacacaaagtatcacaatgaacg

SEQ ID NO: 252 - DNA, 504 bp, Rattus norvegicus
  Genbank Accession No. AA849619
ccatgtaccatgtatattcacaagtttttcctaattgcaggttaaacaaacatacacttaaacctgtatcagtgtaacaaagccaaagacgactaacttactatcaggaaatactgtcactgtgcagtacttgacagaggaaacactgccactgcacagctagcattttattcagatagcagtctcattacacatggtccaagataagaactcaaatcagaagttaaagattggtcttcaaacatcatagccaacaatgccacgtttgcctatgatctctccgatataaaaccacatccacacctcagtggccaccaaaccattcagcacagcttcctggaaaagaaaaagcacaaattttaaggtactttaaaaagcaaacaaaaacccaacacatatttgaaactgttctcaggattaacagagaatgtaaggatgatattaaaatcacagaacagttttagccaaagctaggaattactgatattcaatgtctaacttctg

SEQ ID NO: 253 - DNA, 667 bp, Rattus norvegicus
  Genbank Accession No. AA849714
  misc_feature (1)..(667): n = a or c or g or t
cacaaaatacaaagttttgcaccacattacagtagtgttttaacagggagactcccaaggtgtccactgggagaggggagttacacaatagtcatttgtgtcactctgaatactgaaggagactgacgaagggtgctgtccaggtagaacatgcaggttattgcttagaacttgcataaacttcaaaatggctcacacacgaagtatacaaacatttcaaaagtttaatgaaagtaccgaaaagacactttctatcccttcaaacaaagcacaaccagacaccaaaccaaagctcctaggttgtattttaattactgatacatcttagtaacactggtttacaaattatctggtcttatgttttgtaaataaaactcagtcttatggaaattattaagcatatcttgacaatatcatatattatagcatcagaaaaaaacgtacatatcactatagcgagtgcatgtcctgcggttcgaaagtagcgtcggcaaataagatctacgttgaaatgttattacaaacccaaacaactcaaaaacttcataatttatcctacttgtaagagtataatctacacaaaaaattccttaaggaaaaagcagacacaatccgcagaaactattcaagcaacanacaaaactacagggcacatttttatttacag

SEQ ID NO: 254 - DNA, 608 bp, Rattus norvegicus
  Genbank Accession No. AA849715
gcggcctttttcagagaattttatttgagtggttcttacaaagattgttgcaatatgaaagtcatttgtttgatagaaatatcaagctgtcttgtcaaacacactgaagtaacccaaaaatatatttcagagctcacagagcttaaaaagagcaaagattatatgcaaccagacaaaacctatttccacatttcctatctcttgcccaagactgttttactcaatctgttacatcaaccaccttgaggaaatgcagggatcattttgtttggaatcttaagacacactaaaacacatagtatttacaaagaaacttttacagatacagtaattgaaaaatttaccatcaagaaatattttgaaatcccccactttccaaatggtcaaggtcaaatgctaagcagccatttagcaacttagacttttcacactccaaaagtgtattctggaaacctttgctgaaccatgagccgaatacatgaatgtgaaatgtaactgctgtgtaaaaagttaagtttctgaaacattaaaacattacctgtctgcctttgtacagaaagcacatttgttcccctagagctattctatagatccttaatgtaattttc

SEQ ID NO: 255 - DNA, 528 bp, Rattus norvegicus
  Genbank Accession No. AA849722
acatatacttgtatgtgggcatgtgcacgtgcctgttgaggccagaagaggacactgtatcccctggaactcggttacaggtgagtgctgggaatcaaacttagatcctccacaagagccgtactttcttaattgatgagttaactctccaacccccaagggagaaattcttcacaatctgtcatgcttagagaagacacggtgtaagaaaacgagtcctttacatttctttttaataaaacaaacgtgccacagctccaaaccctggccccacatcagtctttccgaaggggaacagtctcctccctgatgccctctttggtcacgatgcagatcctgagggcgtctccagtgtacacatccctctcggctgcagaaatgaagacgtctttcaccagcctcatggctctgtccagagtcagggggacatgctccacattctgcatatttttgaagccaacctggttgtcgagcagcggctgcagcatggcacttgctgagcctccggctttgaaagagtctctctgc

SEQ ID NO: 256 - DNA, 608 bp, Rattus norvegicus
  Genbank Accession No. AA849731
  misc_feature (1)..(608): n = a or c or g or t
aaaatgaatcactttattgaactacaggagcaaaaatagtggatttaaccacatttttaagagaccaaacaaaaaaatgctacactgtttcccctttctcctgaaacagaataggctcactggaagcctgtgccaagggtaggatttgtgtcatagtagacttcaattatgtgtgactgaagctactgaccaggtgaccatgaaaacacattatacctcctgatcagaaagatcaaggctccctttacttccattgggaaatgaatcatttgatttagactgaaggttatttttctggtatgatggctataccagcagagcctggagaaactactaacaggtgatcgtatctgcatgttcagtgtgcagtgtttttcttgcaagtgggcagaatgctctggactttgacaggagtccctggttgtttctggcctgccttagcaaccttctctagtgtcctggtctcaaggggcacttcttgcgaaacatangtgcgattttaggaggttctggaactggggtttcttctgtttcctcactgtcttcatggaggagatcatatgaaatgtttccatactctctcaaaaatgggaatatttcaagcagaa

SEQ ID NO: 257 - DNA, 646 bp, Rattus norvegicus
  Genbank Accession No. AA849740
tttttttttcaccatgggaagcagcttttattgacaggttgtctccagaaatcaaaaagctatatgctgtcagttacaccccaggtctccaaaatgcctccagggctctgcttggagaagggatacaaaccgcctctttcaaggcccaaatctttcacctctctgtacagcttaatttagcaactttgtgaccttgcccttttgttgggttttgttatttgtccctccagctactttgtaatggccagaggtgacccttgaaggaatcatgagaaaggaggaaacagaatcagagtctagcaacagtccctctgtcctgcctcagaagcttcatccttcattggttgcatttttctttgtgctggatcacacccttctgaatcagatcagggacttccactgccagccaaggacccagccccagggccatgaggtgagctagtccaaacttgggcacattcctggcccacaaaggtttgaaatgatcagttagacatattttgccacccctgtacatctttgccgttttcccatccagctcagggactgcaatttctggagcagtagtgggatatgtgataggaatttcaaactcgatgtcaaactcgtatttgaggaagtcgtggatgtaccagcattttccaaa

SEQ ID NO: 258 - DNA, 604 bp, Rattus norvegicus
  Genbank Accession No. AA849763
gctcctctgactctaacaacgaaatttaaatagaaaggtctttcagtctctggagtaaatcaccgtttagaaaaataatactttcaaagtaaagcaaaatcttttaccaaaatacttatttcatttttcacattgttctgagacagttcacagctaccttctatccgcttaaagaacattgctcaaattaatacagttttttttcttgcccttagactgcgtggggaaaaaaaaactaagaaaagttagtgaaggggaggttccagaagatcagtgtggcatccacagaacaaggctctttggattgtctagcacacttgacttttaatgcattcataacagccataatcctacggatctggctaggatgctcacaacagcagcccagggacagtaaagtaataaatattatctgcaaagaaaataatttaacttccggaaactatgtttcttaaaaaaacaaccagtttctttagcggcatccttctcgtttggcgtaaatgctgcttgagtccacagtagtggcgcctccttgccgggtagcaggacgcaggaggtgctgagatgccacggacgctgccttggggactccccacagtaaggt

SEQ ID NO: 259 - DNA, 630 bp, Rattus norvegicus
  Genbank Accession No. AA849774
cagcatgcgggacactttatttgctttgacttctccacatcatttcctttactggtcagggaatgagagatgtggggaggacaggctgaagtcaaaggcactttgaatgttaaaatgggttacaaagaggttggtctgaaagtgacaagcctacttcaaaggcttacaaaggctgtgctcgggaaatctggcctcattcagccagtaccttctcctgcaggcatcactgggcccaggccttcgactgtccctcccccaccaacccccaacatcttcaggacctggctgctgcagtgagtgggctagctccacactgcacagccatgcatcctgacctgaactcacgagaagttctgtgcatacagaagtaacaaatgtggccaagccatgggagagggtgtgtctgcagccttaggcaacaattccacacttagtgacgcattgggctagaggactaatgtgaatagtttgccctgtgagcttgatctgacttcagaaccctcagagcagtgcttggtctcgggaatctcttgtgtaccacaagagacaacgaagaggaagtggtggtctgcacagctggggcttagcgactgctcagatctctgcagtcaagggagtttcaatcatctc

SEQ ID NO: 260 - DNA, 591 bp, Rattus norvegicus
  Genbank Accession No. AA849789
acattatatacaggtcataaaaggccacagcagtttttcaatacataaccctttaaaagtagagggcactatgaaggacagacaagtatcaagatgaagtccagtaatgagggtgtatactcagtgcagtatttctgaggagtaacaatgcagataccaacaagccatccacatttagtttacaactatgctatagttctttgtgactctagtcatttatggctccacatcagagagcttcccctgccaccatcagtgtcacaaacataagcaatggagacacttgctattatacaaggtcttttacttggagctctcctttcctgtggggtctccttagagtatactttagtaacttcaaattcttaaatgtgtaatactgtactctctttgaatagtaactcaaaagcattggtttttcactttgaaaatacagtctttaaacctataactggtatcggtagatcaatataaaaaaatacagtaccaagctacactggtatatttccatattaagaacttcaaaatatacttatcactgagaccatagtccttgcattaattttcagtccactatgaacaattatctgc

SEQ ID NO: 261 - DNA, 582 bp, Rattus norvegicus
  Genbank Accession No. AA849796
gaaacaattcaataaaccatttatttgcaaataaataatgtatgtctaccacacctaaataaacatttaagaactagtaatactaggatataacctcagtattacattgtaaatggggaatcaaagtccagagttaggatgcccaggctgaggcgctgcctccgacttaactgctaaatcatgtggggagtgatctttgatactttaagtcaacttcaatacagaactatcctttggttactccatacagttagggaacttgttttctacacttaggcatgacccttcaattaaaatggaagattcttattatgaatcaagagactcatctacacggttggaggatccacttcatccatgctctgatttagtctttctgaatggactggtttctaacctagactaagtacaggcctgaaacttcaacagccatcaggaaccatggagcgggccatgaaggtgcttcgaagggccacagactttttcaacctgggacagactgcaacactcgtgccacaccccatatgacaaaaagctggaaaacaaggtgtgtgttttcacttatgtatcaccagatgcaac

SEQ ID NO: 262 - DNA, 423 bp, Rattus norvegicus
  Genbank Accession No. AA849805
aacattaggaataaatcactcattcaatgcaggtgtgtatggggagctgggagcttccatgtagatgagggaacgtgcaggaggaaggtggccagaggggatgtccccactgtccagactatagacagcaacatcaagagagtcacaaagtagccccctcgtgtctcctcccatcttgtccttccagaggagtctatgtggtgcctagaggcaccagggcatctggaagtgctgggctgggagtggagtgcagtgtgtggcctcaaagttgtgcagatgcttccgagccagaaacagcgccagttgcctccgtccatctacactcatgtcttcccccacactccaggggaaatcaggcccatgctctgcctggtaggagcgaagcacagacacacaccagtcctcatccacctcccagcgact

SEQ ID NO: 263 - DNA, 350 bp, Rattus norvegicus
  Genbank Accession No. AA849809
gggggggacacagttacatcatatacaggcattctgtgcttcaccagaaatccaatctgataggtctccactcagggttgaatataatttataattcaccacccccaccccctaaatatacacaagaaccttaaaaatttacaaatggatgaagaaagtcaataaatagttttgctttaaaaaaaaacatcaaagattcatagttgaattgtgttttgataattcacaaagaaaacccattctttgaacatggttaaatcatcttctcgtttttccttacagcattccatttggtggtcctccaataggccctagatctgggctgtttttcaaatagtatttttccaact

SEQ ID NO: 264 - DNA, 423 bp, Rattus norvegicus
  Genbank Accession No. AA849810
gaataaacctgcagccatggtttttcctgtgtatcaaaggtatcaacttaagaggaaattattcgcttcatctgtgccaaacaaggatagtttctcttctgctaaaaggatatgaacatcttgaaattcagttttcattcatcacataatttcaaaattaatagacaaacagctcattcatggcttgtagacgttttccctagagctcactgtcgtccgagcagtagtcatagatccatttaaagacagagtcttctgaacgttctatagtttcaaaaagtcttttgaagtcgtgaggatacattttagcagccgtgtctccaggtcttttccttatctgccttagtatattaatggggtcaaccgtactcagggaacgtaaatggtgtattattggggcattgcgtttcccaaagcagtgct

SEQ ID NO: 265 - DNA, 392 bp, Rattus norvegicus
  Genbank Accession No. AA849843
acatataaaagagaagaaaataatatatatgctttaatcagattagtttcatgaacaaataaaataacacattagagaaaaaaagtccttaaaaatagttgtatttatattccacaatttgctcaaatactggttttcttagaaactttctacaggatgtttttaaacaaattcttcacatttcacgttgactatgtacttacggaacttcagggagatagttctgttttaatagcttaatctgtactaatggcatggcacgtgtcacatgcagtccatgtgggattctaacatgacactgagtgagttttctgacgtcgcccatccctttgatgctgaaggcagtgcatctgtggaaagaagggactgcagattggggtcactgctctctg

SEQ ID NO: 266 - DNA, 504 bp, Rattus norvegicus
  Genbank Accession No. AA849917
aaagatagtaaaacttgggatttatttattcagtcataacttaaagcttaactacttcttctccgagcatagacagtcttctgtaccatggtcctatgtaggtatttagtcaggagagtgaagagttaacagatggaaaaggtctctggggcagtccatttgctgagacctcaagtgggacagggcagtgagcagagacatctgaccagggcactgtgggtaaggtaggggtgcctcagacttggccctgctactctcgctcctaaagaactatacccttcaagcctcagcatctcacaccccaatccctcaggctctgcttcctggatgcccaactctcaacagggctgccaaccactaagacagacacagctgctatgtcccacctctcctcagcagttaaaaaggaagagactaacggggagcctcggagtttcacttactggtcacagttcgctatgatgccatcatcagtgtaaacaatgttgctttagctgtgtaaga

SEQ ID NO: 267 - DNA, 459 bp, Rattus norvegicus
  Genbank Accession No. AA849939
acatcaatatcaacaacactactgatgaggactgaatgtataaggttggggctctcttgcaggaacctcagaattcaaaaagcagtttctaaggaagcaatgtggggaaaaatctacatctgaagtatttctgaaataaaaactgaaggccaagaaatcaaatttctggttgcgagatgacaaaacatctttctctttctgtttctctctctcaggatgcacaggtaggtatgcacaaacacacacacacacacacacacctatacacttcagaaaacaaggaaggtatcttaataaattatctggattcatatatgttattttagtctgtttcacttggaaaaacagaacaaaaacaaatgaatacaaaaccccaaaacacagaagctaccagttgagagtcacagactgatttccaactggcagtgtaatcttccaacaggaaaataacacctgtgt

SEQ ID NO: 268 - DNA, 620 bp, Rattus norvegicus
  Genbank Accession No. AA849961
gaataatactttactgtcttgattccttcatatcataggtttgacaacttagctagtacgttagccgactatacaatttctttcaattctatctaaaaacagaccgaaactaaatgggaaaattacagaagtcccatttgagcatacataaataaggccatgatatacctaatgtgaaccgccactgcctgaggacatcctgcgtccacttccaagagagctcttgtcagtagacggtctgctaccgcgtggggagtgtggtgctcatattttaaaaactcctacaaagctcacatgcaagacagtacatctagatttgtgactggtatgaacatttaaggctgtcattttcaagtataaatgtttagtgttccattacccaatctgtgcactagaccaagcttaagcacaaaccatggcagataacagaagcttgctaaagacagatgtcgtagtttaagcaacagcaactttgaacctaagggaggctggtgccaatgtgtggattcgcttgcgcttccccagactgcatgaggtggttcatggaagctttgcctacactactgtctgttgcatggcatttagaataaggcagatccatagcagacggaacaagaaag

SEQ ID NO: 269 - DNA, 607 bp, Rattus norvegicus
  Genbank Accession No. AA849965
aaattacagggccagccagatattctgataagaaattcacttttcctcaggagaaaggaaacacttccatgtcattaacaattgtatacatctcccactttttttaagggttaaaataaaaaaatcacattaagtaactgccttaagtaaaattaaccctttacaacaccaaagaaaccacacccaggataatcgttctggtaataggaacctaggaaatgatcacactttaaatgcaacttttcaatcttgaatgttttcacattgttctgtttaaaaacaatccagagccttctctgccttcctcttccagtgcgttcattagtgacccagttctctgacacatggcacccatctgccacagcaaggctctagtactactctgtgtttgcccaagtggaagctgcattgttgcctcaagttctcagagctggctaggcaacaagacaccccttccattcggtgtaatggctgctgtcaccagatcctgactcagcgagggtggcaaggactgggtcacttagctcagctgagtctgcttcctacccagctgaggatttccttgtccaggacattgaatactttctctatctctactggagaacat

SEQ ID NO: 270 - DNA, 466 bp, Rattus norvegicus
  Genbank Accession No. AA850060
ggggttgcggctatttatagttgtgctacttgaatgatagtggtggctgggtggtcattgtttgcggggatttttattattattgaaatcactcgggattaagtgtgtgtaagataaaaattagtgaaatagtgatgagaaatgataggaaatatagtttgattagtcctttttggttggatattattttagatagttgggtttgggtgattgaggttgattttgggattgtcttttctagtcagattaggtctagtaggtttaaggataatttgtagctagaatttagagttttttgaggaataattcggtgtataattggtgggggtcagagtgtatatatcatgaagagaattgtataattgatcatgttacgaatagggctactgataggaataggattgagaaatagtcaattttgaaacttatagtaagtttaatagaattaatagttagtcaatgtcag

SEQ ID NO: 271 - DNA, 551 bp, Rattus norvegicus
  Genbank Accession No. AA850136
tttttttttttttttttttttttttttttttttttccctgttataaagtgattttattaaattgatttaaacatactgtaggtcaaataatatttctgaagataacaattatggactttaaagcttgacataaaattagtagcttcaaaagtgttagttgtatcccccagcaacagcatgataaaataattcaactatgtagaaatatagaactctaggactagctggaagttgggaaatcatttagtccggtgtcctcattctgtgagaaaactagacctgaagattaagcaattttcccaagcttatatacctaatagtaataaagctagaaatcaaaccaattttccctaaactaaaattctattgatgatatttcaactggctctctatcaactaaatctatccaggcttttctctaatgctccactctgtggtgacacggggaagtgtaagacactacaggaaattgctgtggtggccgtgaggccaggaaggggctttgttagccaatagccctctgtggaaagggggaaggcagtgaccagtgg

SEQ ID NO: 272 - DNA, 419 bp, Rattus norvegicus
  Genbank Accession No. AA850195
cccaacacaaacgggctttatttcaaccagacaagtgagttcttccattagcatcagcttcttcaaggctcaagggtatggaaaagaagggcggtgctccacaaggtagagaggcgaagactgaccaaggagtaactctattgcctttcaaaaagcccttggaagggtaccctcaatccaaaagaccattagctctcctgttacagtttgtgtacaacaccctcatttgaaagtgacgcgtctatcttaacgaaaacatcccagaatgtccatagatgtgagtgtatcataaattatatctacgttttagaaatggaataaagtaccaatctcagtttaaatactaaaatagaaataaaaaacaaaaaaacaggctttaacgttattacttgggatgtctcgttacacccttcctaggt

SEQ ID NO: 273 - DNA, 524 bp, Rattus norvegicus
  Genbank Accession No. AA850244
  misc_feature (1)..(524): n = a or c or g or t
gtaaagccattcagatggataactatttaatttcttaaagacagttgtaaaggtctctctctgaggacaatgacttggtaaaactggggcacagccagtcccagacactggtcgtggctacagtggctttttgggctcaggatcaacacgcatcagagtagactgggccaacatgtggtggcgtgtgcaaacaggctgccctagaccagcccaggccctttgacagcacgtcctctgcaccaaggcccctcccttctggaagtggaaaacttcacaaggaaattggagccatcttttatcccagaagcctttgctgctgccagggcaagtgggctggtgtggactcttgtttggggatgtttggaggctgaggttatatcactccttagctagccaggcctttagtatctttgtaaaaagcatgtatttatagtgttttagattttttctaacttttgtattttacagcattgtnacccattgttaaagagccatgttccctcttcttataagcgccttctaat

SEQ ID NO: 274 - DNA, 492 bp, Rattus norvegicus
  Genbank Accession No. AA850378
acagtggacgatgggaagaatgtacaggtatcttctttcaataaagtataaaaatctgtttatatacagtgaagtataataatctttaattgggaaacgtatttggtactcctgatctgtttatattaaaactgtgggggaaacgaatatctcggtaagcgctacatttccagtcgatcgcacctggcacggaaagcgtcattgcatcttaggtcctgcttggtattataagagactaatttgaagtcctaggattcaaaataaacatcatttggaataatagatatatacatcaaaaatacatctagaaaggcattggttagtgctattaaaaagctgtgtgctcatggggaaggtcagtcgaaagttacctggtcatattcttactcctcatctccactgtccatgtcaatgtctacttcctccgtgtccacggcccgggacaggatgtccgccatgagtgcttcctctagtttctttcggacttgttgg

SEQ ID NO: 275 - DNA, 294 bp, Rattus norvegicus
  Genbank Accession No. AA850450
ggctctcggggcaatgtcatcttttcaatatgaaaaaaaacaaaaaagccaagtttaacacaaaatacaaaggtagggaatgaccaatccaaggaacaggagggaaatggcaattaaagtgtttctggacatttagagaacaaggccttgctgccctgcccccacaaatccccatgcaacgtcccttggcgaaccaacacagggaaaacacctccaatggcaaatttggctcaggacagctaggacataaatggggataatactgttaatacctctcctgaggccgaaagatga

SEQ ID NO: 276 - DNA, 539 bp, Rattus norvegicus
  Genbank Accession No. AA850537
gcgggggcggcttcagatcgcgtagtgcagagcggtagcatcgctgacgctagtcagggacaagaagacctagtgaatgatttcagaaaaagtgcctgtttgcttaggatgtcagtgcaccaagcaaatctgaagcactcctttcgctgaggagcgtcctgtctgcaataacttcacagacctgccccagaggctttcctcgaattcccttgcgccttacctactgctccagactggaagctgcttgggactttttcacgtggatctaaggggaatgctttactatggctgctgttgtccaacagaacgacctagtgtttgactttgcaagcaacgtcatggaggatgaacagcaggtgagccagaaaaagccgggctcttgtacatttctttgagttttcatcagtgtcagaatatttgctttaggagatagtacaatgttctaaaataaaaatttagaaattaaatattaggtagtaatgtcatattttaattcactacatgtaaatatgactgttcattttgatgtggtaacacct

SEQ ID NO: 277 - DNA, 543 bp, Rattus norvegicus
  Genbank Accession No. AA850539
acgaaaagaaccagtgtcaacccacagaccctctgagaaacccggctggccgggccaagccagcagccctgtccctaggcccagaggttctaggtgaggggtggccctgccgagccttcagggtgggcgaagccccctcccaccaaagggttcacctcaaacttgaatgtacaaaccacccagctgtccaaaggcctagcccctgctttctgctactgtcctgtcctgagccttgaaggtcccctccgtcaaaagctggaacaggcagctcagagtgagtaaccctgggctactgtggcaaacaagagacctcaaagatctatcacaaggaaggcattctgtcctgatagctagcataggcctgtgtgttccctccacattcatgttccactcaactcctctcaagacagcatccctgggaaggggcctaacagggacctctccccagacgaaaataaaagcaaacaaggaagggtgactaataagcacaggcagtttccagtctcttcccctgttcccttgccctagagtctccaccttaat

SEQ ID NO: 278 - DNA, 547 bp, Rattus norvegicus
  Genbank Accession No. AA850550
aatgaagctggtacagatgatgtcccttcgaaaacccatgtcccaggccaaaaagtacaacagaatcaaaaggagcagtgtctgttgcgtacacttctgtatgagtaactttattattaactgctgatgaagattagaactttcctgggatcttctgacaatactgtcttgctcaagacactttctttctctccagtgaagccacttttggagttagctgttactctcactgtatctgttaccttgactacaaacatgatgttcttcttttggtccagaccctcagattttaaaagtagcttcaagctgagaaaaggtcattttccacagttcggttctctgaaaaactccatctcccactgaaaatcatagtccacgagtgaagcaacacataccggaactgcaggccattgataggtcacagggaagctcgcattactcgatccttttatcatcacaaccctgaaaatgcacagtcctggaaagggtggcctctctgtgtgcacacatgaaatctcttaaacgacaaaggcaatgttaagggagc

SEQ ID NO: 279 - DNA, 360 bp, Rattus norvegicus
  Genbank Accession No. AA850567
agtgctgtagaatgctttgggtagttggaaaggtcctgttcagctagaaaagcaaaattagcacaggctccatgagaagcagacaattcaagggaaccttccagggcccagacaaatcagagtctgagcacacagtcgtctcctcacccttccccaagcaatgacagcttcttttcagacagattaaaactcagcaatgttccctttagatgaccctgggaaggacccatcacacttgacaaggctggagcttcagggtgcaggtcactattccaggcgaccagaccaggattagcacagcaagggaggcacgagcggcagaaggaatgagagggctgggacttttgtgcaagatttaat

SEQ ID NO: 280 - DNA, 502 bp, Rattus norvegicus
  Genbank Accession No. AA850587
cctcgggccgaattcggcacgaggagcgtctgtttttattttatgcacgtggttgtttacacgcttggtgccacagaagacaggagcagacccccggaactggagatgctgtggatggttataagctgctaagcgggtgctgagaaccactcaggttctctgccagaacagcaaggctctaaccaccgagcatctctccagccgccctccgccccagccaagagcacctcttataactacagaagaaagtatgaatatctagttctttcaaatgatacaataatattcctaggctgcagagatggctcagtgttacacaagcataagcaattgctacacaaacatgagttctaatccccagtaccacggtaaaagcccctgttctgtgggatcattggggctcaagagtcatcaacacagctccaggctcagagaccctgtctccaggaaataaggcaggcagtgacagagtaggttacttgacatctttctttgtacttgc

SEQ ID NO: 281 - DNA, 451 bp, Rattus norvegicus
  Genbank Accession No. AA850686
gagaaaaaaatacatttgacatagggaatccaagtatgaatgccttactgctaatagtctgattcagctgtgaccgcaccaactcggctcataccaccccggaaccagggttcattctctgttaaccacttacgcgagaggccagtcctctaaaccttacaagtttatctacattgtaattgagcttaggaatttcaggtacccaaatagaactatgtatgtacaattctgctttattgcacagggtcacaatatatagcaagtgattataagaccaaccacgagataaatgctgataggcacacacatctgtctctaaccacaaaagaagccgaacaccaatttgccacaatgcagaggctgtgttgactctgctgcagtcctgagggttcacgggactgacatgtgttaaatgcaaaactcgtaggttcctggtgacatcacataagac

SEQ ID NO: 282 - DNA, 580 bp, Rattus norvegicus
  Genbank Accession No. AA850738
accaggcacagttatccaatacgcagaccaatacacatgacacggccaatccgcttattagcttctctgattaaacaaaatacatttcatagaaatgattataaaatgcatcgcagatagaatgttttatacttacagatcttatggtaccctaaatcattattaataaaaaccagccaacccatactgtaagtaaagttagcagaccaccacttacgctttattgtaggagaaagacatccaattaccatgctgaaatgggttttagagtccaacacagacatcctgcttcaaagctcccactgcacttacaaccccaggaacggggctttccttcccatattacatttctaggacagctttgggctgaaagattagttttggtttcagagcgaatctgatttagtatttcaatgtcacacctcaaagattcctgacgggaggttggggagaatcactccaattacgtactagtcacaggcgcaagacagcacaacacagatgggacatttaattcactttaccggacatgctcacccaaccgaaattgggaaaatttaaaggcacagatgaatagaaa

SEQ ID NO: 283 - DNA, 483 bp, Rattus norvegicus
  Genbank Accession No. AA850765
aaaaagtcaacacatttcatgtattgtagttttagtcaagtaaaatgtgatgaaatttggtaaaatcacgtccatgaggggaagagattatgtccaccttgccattttcctttttattaaaaaaaaattatacagtttatgctcagtaaaaatccaaacagtagaaataggcacacaaaggaatccacgtacccaggtcccagtcccgcgcccaggagttgtacatacggatcattctagaaacgctctgtgcaccggtggaggaagttcagtctcactgatcagaaatgatgccggcagagtctatggtgaactcgggacttgcaagcagagcggtgggggtggcgggtggcctcgagcttgccggactcactgctttgaggcacacagccctggctgtggcacttctgtcttcaatcagcaccttacactgagcaaccgcaaatcactcccaggagttaggactgtggaggaaggccactc

SEQ ID NO: 284 - DNA, 425 bp, Rattus norvegicus
  Genbank Accession No. AA850812
tttattttttttttccaataaaacatttttattctgtacaatatatatgtgtatttaaatatatatacatatatatatatatgcagagaatcttcaacaaatccctgagttcacgggaacccaggatgctaacaaaggtaaggaggagtccatgcctagaacaggaaataggacatccttccctttcctcctggttcccggcaacagagggaaggggtggtcactacaaaatactaaaacaagaaaattttaggttaagagcacggttggggatgaggaccccaggatgcacatactgcattaggtcctgtggctaccacactatttgatgtagcacggaagccagcataactgggggggggggagaatctgacatgcagctgggctttggtgggccaagtcatagcctggcgaacccatgcctg

SEQ ID NO: 285 - DNA, 473 bp, Rattus norvegicus
  Genbank Accession No. AA850864
  misc_feature (1)..(473): n = a or c or g or t
aatctcagagctctttattcaacagggacatgcaaaatggagcttgaatatatattctttctcttggccttgtgctgacaattctgctccatgagagggctttggagagcacagagaagttgaagggccacagcagccacgtgtcctttgcttctcatcttcagccaggtcggaagagccaacactagaggctaaaagccatttgcgaaggtgtccctgatttatctgggaagggcgacatctgtcattgccccagcgtgcattcgaggatctcattgccagagcagggctggcatttgcagtttgctcagggaggaccgagtgtaatgcattctgctcaggaaacttggtcncaggagacagacgttgtgctctggagtgacagcatgaggaaagactgaggcagaaatacctctgccctgctttgggaactcaggcccagttccattcctgtgctctacacatttggtgag

SEQ ID NO: 286 - DNA, 431 bp, Rattus norvegicus
  Genbank Accession No. AA850872
  misc_feature (1)..(431): n = a or c or g or t
gacaagaatgagactttaatcagttttaagtggagtttataacactaagagataagggttgttaacaaacacagtaacaaatggacatctgattggtttgaggcattatcctgtacacgtcgtatttgtgtatcctcagtgcatagcatttacacagagccactgccgcacagcacgagagtatctgaagaggctgggtcagggtaaggctgttgtacagactggattgttttagtatatatattctatatgaaaacagatcgaacttttgaactggcaggtaggagtcaactctgccaaatactagagtccaagcgcccggtttagtgcacagacccaccccttccgcctgcatgcangacacattaacagtatttaaaggcaaacgaggcacttgtggcaaccacagccgtcgttatccacatattgca

SEQ ID NO: 287 - DNA, 551 bp, Rattus norvegicus
  Genbank Accession No. AA850885
acttttacgcctgtaggaattgcgataattatagtggcagatgtaaagtaggctcgggtgtctacatctaggcctactgtgaatatgtgatgtgctcatacaataaatcctaggaagccaatagatattatggctcataccatacctatatatccgaagggttctttttttccagagtaataggtaactacatgtgaaataattccaaaccctggaagaattaagatgtacacttctgggtggccgaagaatcagaataggtgttgataaagaattgggtctccacctccagcggggtcgaagaaagtagtatttagatttcggtctgtaaggagtatagtgatacctgctgctaatactggcagtgagagaagtagtaggacggctgtaattagtacggatcatacaaagagaggtgtctgatattgggttatagcagggggttttatattaatgatagtggtgataaagttgatagctcctaagatagaagacaccccggctaggtggagggaaaaaatagttaaatctacggatgccccagcatgggc

SEQ ID NO: 288 - DNA, 496 bp, Rattus norvegicus
  Genbank Accession No. AA850916
caggatacaggcaagctgtcgtgggttttagagaagactatttaagtgagaaggtggtcgctatgacaactgcagaaacaactgtagtttctcaaagctgactcctgctggttctctgaggaaatgcaggtagaagctgatctgtgtatgccacagcattgactagatatctaatagggtctcttctcctggaggcatcgtagcctgggactccttagctacaagggacgctgccccaggtaggacctaagtactctctcatttcccagggcctggttaacccacgggcaatagggacctaccaagatcacttgtctattccaaccctgactttattccatcctgaccctagcttcccctagccttcctaaggggctctagatcaccctgatatgtgggtaaatctattaattatccccaaatcgcatcatcccttacctttaacaacatcctggtacttttttccccacctacatatatgcgtgcctcatcaaac

SEQ ID NO: 289 - DNA, 619 bp, Rattus norvegicus
  Genbank Accession No. AA850940
ttttttttttttttttttttttttcactgcatctttgatttattcaaataggctgtatctttttgctctctggaatttaacaaattttaatagtttatgcagcagactttttttcttctgtggtaggtttcttctctgctggtttcttggtaaccacctttttccctgcaggcttcttcagcttcttggcatccacaggcttctttccttttttgcctactgcaggttttttgtctccagcccccttctctggaacaatcttctccgatttggctgccagtgcagcagctgcggcttccagctttttcactcgaagtttgtgattcctagcctggcggagaatggtgttcctacgcatagtctttgcgtaagggttcagcttcaacatgatcctcagattcttcagtggattcttcttcaagactctgcgctgaatcttcttgcgtggtgctcgaagggctctttggatctctgggcttttcaagattctgctaaggtctgtgttcatcatcttgtgcatggggaggttgtagttactcttgagggaagcagccttacgccaagtgccatacaactcatccaacttccggaaagcactttcagtccaaatgcagaaacg

SEQ ID NO: 290 - DNA, 494 bp, Rattus norvegicus
  Genbank Accession No. AA850978
acaactaacattcactttattcaattctgttctcttaactcagaaggcaacaaatgaccacataaaaaagggagcatttttgaatatatacacataaaattgatctgggtacaggtgtttactgtaatagaaaactgacatcccacatcactaagtgttctagttcattcctacaacagacacccctaggccttagtcattcgtttccatctaaggttctataggactgtcatgattacaaaatgaggcactcatacagacaggaatggagacatacatatacatgtatactgtcttatttttatattaacgccaaagctattattggagagtatctgaaagaagcccttgctcacggcagctgtttaaatgttgacacaacagcagtaagctgaaacaaaacatctgattgacagggtaagttaagtgtgtggagactgggcagttagcaaagactgtaaagcccccacaggtgattttggcatggagaactc

SEQ ID NO: 291 - DNA, 481 bp, Rattus norvegicus
  Genbank Accession No. AA851029
atagaacaactacaaccatattaacaaaccaaaagcctgtgcacagaaacaagacaaggaaaacaaattgagatgttaacacagtctttgggtaatgaaaatatgggtgagtttctcttctacatgtccatatcttcaaggctactagaatggtcacatactgcatatataagcaataagggcagcctactagaacactatgataaagacccctcaaaggaactgagaaaacacacttcactgtaatccctccaccactgccccactattccacacttttccacatttcttcctgctgttgacactacatacttatcacggacaacctcacattctcacccatggtgcacagatccaggtgttaccagaagttcattggaaatacagcttttctccacctcagttcccagttttctttgagtatgccttacatttttgatgcagagtacatacataaagtttgttacccaaacactgaaga

SEQ ID NO: 292 - DNA, 491 bp, Rattus norvegicus
  Genbank Accession No. AA851135
  misc_feature (1)..(491): n = a or c or g or t
cctccctacgagaacatgcctctcgcaaaggatctccttcatccttctccagaagaggagaagaggaaacacaagaaaaagcgcctggtgcagagccccaattcctactttatggatgtgaaatgcccaggatgctataaaatcaccacggtctttagccatgcacaaacggtagtcttgtgtgttggctgctccactgtactctgtcagcctacaggtggaaaagcaaggctgacagaaggatgctccttcaggaggaagcagcactgaaagcccctgattcaagatgagtgggaacgttcccaataaacacattttggatatatagtgtttgtcttgtttaactggtaggaagtggtgcctcaagtattccagggcaaacagaagagtggtcctttggggtcaagaaggccttgaagattaaagtccattgaaaagtgagacttaagggccagcangatgattcagccaacagagacacttgacaacaa

SEQ ID NO: 293 - DNA, 498 bp, Rattus norvegicus
  Genbank Accession No. AA851161
ggtaagaacagattacaactgaaatagtctcataatagtgtggcttggattgttaggtatgcacgtctgacagtgctgcctcttcgaaatccaggaaacacagcagagtctccacggtacaacatcatttaatggtcagagacggttgtacagtattagaatcagccacagagctgtgtgaggacaggatccagtcctctcccacagcaggcaagcacttactggacaagagctggcatgtggctgggcccacaacctcatcccgtgatagctcccagctcccactcttcctcaggggagggtgtgcaccccacatgcaagaagaaccttgcccttgtcaggtgggatgggactatgagtatggtcaacgggaagctctgtggaagtgtctgacaaagctcaagggcaagggttaccccagctcgccaactcccagtggcgctcactttcccagcttcttcatacgagcatcaatgctggcaaaattcccctcaactg

SEQ ID NO: 294 - DNA, 412 bp, Rattus norvegicus
  Genbank Accession No. AA851184
ggtgacgccagatactttactcatctcaggcagtctggactagttcccctcccgtggactccagggtaacaccagaactgtcctagaccatagctgtcctctctggcggctggaggtaggcctgcagggcacggtggaggaggaagcaggtctgtgggtggagggaagcaggtctgaaggtggagggttccagtgtagttgtggctcatcctttcctatcacctctcatcatggttcacagtgttgcttccagggacatctacctagacaatggggtccccaaatgtgcaggcctcctcaatggcgaggttgtagctggaacctgtccctcccttataggtgctggtcacaattctcatccagcctcgctcaccccaaggctcgccccatgaattgcggacaatccaatact

SEQ ID NO: 295 - DNA, 405 bp, Rattus norvegicus
  Genbank Accession No. AA851192
aatatgtctgagtcagggctcagccttcctgcagtccagtttagtttaacagcctcctcactgaggtctgggctctggctcctgacggctccccttacagcagcacccgaggagtcccattgggagtagctccagtcttcttgggtaaccgactctgggccttccgagatttcaccatcttcatcctcacctcgaagacttcatggatggccttccggaagcagtggaaattataatcaataaggccttttctttcaaagctttcctctctgacaaagcaaacgagcgccaagaactttgtgacctcttttagataaagaaccgttgtattattcagttttataatggctgtcgagtccttgtcatacggggcgcccgctccatcttctttgagggcataaatac

SEQ ID NO: 296 - DNA, 494 bp, Rattus norvegicus
  Genbank Accession No. AA851233
tgaacgttttcgaacaatggcacaaataggtagacaaagctaaacaggcagcagggcttacattgtaagtttatagttaaaactacggatgaacatttcagtgcaccacaattccaaactgcaacgaagacggtaggtactcggggatccagctgaggagagatgggtcactgcagctgtactctgtaagcacctattagcaacttcaccttggcaaagggtgcttccgtcaaccttataaacaacttattggggccagcaacagggctgaatgaataaacaaagtgactgtccagaaaaacaggtagctggaatttatcatttagcaccacggcttgcacactgcatggtccacaaagccgagcaatgacatctttacccaagaagtttgcatggaaaatgaagaggaggacaccagatccttcaggcatgttctgagggggcatgtaattgaaatctgttgagaaatcgggccactcacagagccgatgaca

SEQ ID NO: 297 - DNA, 579 bp, Rattus norvegicus
  Genbank Accession No. AA851238
aaaagaattctaatttgcatgtttgcagtctgttctggagaatcagggagggtcccatccagtagggaggggtggaaagaagtcctttcctccagaaaagattcttgagagttgccaggaactcaaagtgacagatgccattcaaatacatcataagggtctgagcacagtgctggtacataccagcaatcccagtactgggaaggtagaggcagaagaatctaagttcaaggccagcctggtctatacagtgggctccaagccagccaaggtcacatagtgaaacccactttcaaaacctccacaaggccttgtccccctttcagagtctaaacagctaaagaacttctttcccctactcagtctggtttgaactttgattccttgataaggggcctacaggggcaggatacagagagcaactttgacaatgttacaagttttctctgtggaaatgaagaacactcccaggattccaatgttaactaaagttccaaggttaactagagatttccggaagggggtggtgcaagttaatttatcagttttaaatatctacaaagtgccaggatctgacac

SEQ ID NO: 298 - DNA, 567 bp, Rattus norvegicus
  Genbank Accession No. AA851253
cagtcttataaacaaaactttattaaatggtacaaaagatcctgtgggagacaggaccaccaaccgtgcctgtccagaacaaaagttggctgacccacaccttgcttttggggtgatggctggagactcctgggaatgtagcctgcaaaaacaactcaatttcagaatcactcctacatggactaatagcattctcaacatttagagatatcttcagaaaaccataggctcaccactagcaatctgccggtaattccagctatttaaggtgatatcatcatttgatatctttgtttcagagtaatgacagctaatcactgtacagaccaactcacctcagctgctgtcaacaccatctgcagtcccccagtgcgttctcaaacttgaaagggacaccctcatgggaggccatggctgctggcaatcttccaccctaacttcccaacctagaaagcacagcagttgttaaagtccagaccaagttaatcctaaacaccagccactagcgtgggcttgaccgcagtcagtcggggagaagttatcgtcagttatcgactctgacggcac

SEQ ID NO: 299 - DNA, 541 bp, Rattus norvegicus
  Genbank Accession No. AA851261
cgctggccatcaggtttattagaaaaaggttatcgtgtggttatttgtcctttgaacttctgggctcagcctttgctccaagctccctcccatggtggagccctggctctgcatattcacagacggggcagccatatcagactgcaaagccacacaacagagtctcaggcagttgggagagccaggcccactgcttctgtctagatggtttgcagagcagacactggggatgacactacagcctcctcagcagctagccagtctgctttgcctgcagggcttacgatgtcaccttttctttacaaacttctttctggaagcattgggatttaagcgtctcctcccaacacccaacatgctgtcccggacttgcaggatggctgagcggctggagatgtcattctctgcgaagggagaaaccccagctatgtactcgggggcaaacacgttggtcttctgcctggccttgtgggagagtcgcagctgagggaagcgctgatcctcggtcaggtgggggttgacggcatatttgccccctttt

SEQ ID NO: 300 - DNA, 619 bp, Rattus norvegicus
  Genbank Accession No. AA851264
  misc_feature (1)..(619): n = a or c or g or t
gaaatacgtttattgaaaacttacatttaaacaattagtaacttgaacatgagcaagatagcttcaggaacataaaacataatatcttagagtgttctaaatactacatctcctctaatgtaaaaggagataatcaagattttatcttgcataagggcctgggtaccactagcccaacaaacggtttataaactaatacttatctgacaagtaacacaacaagccccagcctatggatggtaaagtcttcaaacacctagcaagcactgagtttcacaagtgcgggaagcaggagggggaagattaacaggtgcttcaagatcccgcccttctagcaagggtcagagagtaagtgggaagctctgtgagggttgcagtgagcagtaatttggctaagcgaaggccttgtagcaaatgactactttgtaaacttactattgttgccttacaaccctccatcataactgtttggttttcaatgaccagaacatatgctctaagtaaaacaaaatcgacttttctcaagaaagtaacagtggtgagctgtgccaaagtgtttgatggccaagaacagactgaattgttgctcaaatatccgagggttgaagcnacgtatttt

SEQ ID NO: 301 - DNA, 230 bp, Rattus norvegicus
  Genbank Accession No. AA851265
cctgtcccaccagacacacgcagtttattgacacagattctggaaggttctccatataccattttttaagaggaaaaaaaaaaaaaccccaaacctctaaatagtctcagtccattaaatcaacaagcaatcgagtctgaggtcaaggatgtgaacattcaagttcacactcagatccttatcctcagtgtgaagtgaggagctgcgactcagcacagcaccctcgtgcc

SEQ ID NO: 302 - DNA, 499 bp, Rattus norvegicus
  Genbank Accession No. AA851273
ggaaaggaacagttttattagcctggagttgaaagtctttgggaggccatatggtgggtaccgccacggctgtacaggaagtaagatgaaaccctgtccaaggcttatttggattgtagagccctggagaaggcaaactgcccaaggaagaagtagatgcgggagtcctcgccggcctgtgctatcttactgcactgggattcctgaggctcctgctgaggcccttgcttcagtattgggcactggaccatccggcctagaactttacccttggggtccagtttgatgcaggccaggcatttccgcttcctcccatttggtttgattgtacactccggctttttccagtccttcttcaggcagctggtctgctggagcttaaattccagcctcacaaaggtgccagctgataagaacaggtcatcagcactgtccacaccgatctcctggaaggcccactgcacaagcgggtgtctgtggaactcctccagagccacct

SEQ ID NO: 303 - DNA, 534 bp, Rattus norvegicus
  Genbank Accession No. AA851352
caaaacaactatggaagtttgtctagatctccagctggtgacttattgcttgattttacttctaggccatcggtcaaagcgaactaaagctctttgcccaaactgagacagtcagacagggaaagctggagggagaagagacttcctaaacaacatcactatttccaggaaggctcttctgcattcccaaaacctgtactttgattcctaatatcaaagctggctttggttttttgttttgtttaaaatgacctttacactatagagaaacagtactgcaaattaaggattcttctcctggcagaaatgtccggcaaagctttcccttaatcaagcaaacccactatgcctatctatgtcacatggtctgctatggcggaaagacgctggctcttctaggccttgtctcaggatccacacatcagacactcctctctgttctccaaagagcacaccatggctgctgtgttcctctccttctcttcttcctccttcagtgccttttccttatctttcagcttttcccctcgtgcc

SEQ ID NO: 304 - DNA, 581 bp, Rattus norvegicus
  Genbank Accession No. AA851376
attggaaaaaaattatattttggaagaactcactacataaggtgacaaaattccaaaatcaaattacatgaaaatatacatcgcaatttctttgtacaataggtgaggaaaatctgctgtaagaagaaacaaatatgggctaaggagaagggtaataggacaaatagcatttgtaatagcaatcccagatgtagaaagcctgtagctgcgcatgctatattcatccaaccttaatatcagacaacttaagggcaaaaataaaaccaaatctggatttttgtattgtttggaataaatttcactaagatgaacttagaacagactttacttttttttttttttaaagttctcaggagatagtgactaggatcaagagctctcaacagccagaaaatgttattgctacatccaatccaagagatgggtgaatcagagtacaaaaaggacaaagcacctagtgatgaccccacctctgaagtcatcgtgaaaatcaagtaattttctagtatttcagtattttagctaaatgatttgagaactttctggcagatagaagagataaaaggaagggggagtgtgcc

SEQ ID NO: 305 - DNA, 393 bp, Rattus norvegicus
  Genbank Accession No. AA851403
aaggtgaaacctctaggaacaaggagtcccattcagagggcacgagagcccacggagcctcctcagatctcatagtgaaccacgggctcaggttctttggaaggatcaccgcctcgctccaggtacagattattgtacgggtactgcttcggaccctaaggaaggacacaagagaagagaaggtgcacgtgtcagcaagaacaatagccagccagtcagccaatacctgactacaccctacttgagttcacaatcacgcagagcaaaagggggtacagtagcctctggtcagactccgaggagctaaactggcagaaggatgctcttgccctgctcaacccacagcagagagcgcctcagttatgagagaagtagtgtctgccggcaagtgag

SEQ ID NO: 306 - DNA, 488 bp, Rattus norvegicus
  Genbank Accession No. AA851404
cactgtaaataactcaaggctttattataagaattaatagctattcatactgaagaaccagaaataaagaaatgaaaaaaaaaactggaatgtaatccacactcctagggcatagataagcatatagaaatattttcttaattattagactagaaaaatataaatgatggaattgtgtaagttattttgtgcttaatcttcctgaatgtaccttaagtattaaatacacagaaagtgcatacacttattcttttgacagggctggggatcaaacccagggcctcatgcatgctaggcaagtgctctaccatcaagagacaccactagccttaaaattatgcctttttttttaagcaaacaaaacatgcacatctttggttattccgcactaggtagaggttggcatggcacttatggctttaagcccgtattcttgctggactggccgctggatgaccggtctcgttctttcgtaatttccatctcga

SEQ ID NO: 307 - DNA, 534 bp, Rattus norvegicus
  Genbank Accession No. AA851417
  misc_feature (1)..(534): n = a or c or g or t
ggagacaatgaaactttatttaaaaaccaaaccacttgngaaaatatattgcaggcttaacacagcaaacagacaaatgtatcactgtttcaagtaattaaattggtataaatacaatatagtactcatccaatagataaggtgccacattgggccagcaacactgcactgcaaaacccccagtaaaaatggcatttggtaagaaggtgtgtgcttctcctgctgtagtggccctagctttccttggcccaagttgcttacttttaggcctccttgtggctacaaggctctgtaaattcagagctgattaatactgggtttgcacttttattttgtgaacccaaggccaatacttctcaacagctcctgtttattctagcgactggcgtgtgagtgacaaccaaccccacttgcttttcgtgaggatgtgtcacttcggtgtacaagtcagtgaagaaagctgtttcccatgtacactgtgacactgtctggcttttctggggtttctagaataatagaatttgaagaaatgga

SEQ ID NO: 308 - DNA, 247 bp, Rattus norvegicus
  Genbank Accession No. AA851569
acattaagccaatgtctgtcatgcagccaccaaaaaccttatagaaaattacacaggtttatagtccagtttggactctagcttcttggagtcagccacttttctgactgctttcatgaagtcttcctgaactacaagatcatgatcagcacgaattgcaaacatacctgcttcagtacaaacatttctcaggtctgctccattaaagccatctgaaagctttacaatggcttcataatctatttca

SEQ ID NO: 309 - DNA, 375 bp, Rattus norvegicus
  Genbank Accession No. AA851620
cataaaccaaatactttattatttgagaaagaggaggccaaattacaaaaccttcatacttaagaccacgcctaagacttctgaggacttccatgactgttagattcaaccatgtaaaaccgtcatcttagctgacaaaactcgggctaaacttggcaatttcatgtggctcgactgcgtataaactgactgaggattaagcttttgactcgagtatgttcctagtcccatgtctgtttatattacacacagatgtcccggcgacaaacaggtccctgtgctaaaccgcaaagcatttctctctgggcatgcaggccaaggcaacccaggactggcacagcaggtcccagctggtcctgcatcccctgtgtggtc

SEQ ID NO: 310 - DNA, 292 bp, Rattus norvegicus
  Genbank Accession No. AA851650
gaaatgcaggagctttattagaaccaaaatcttcccaacgccaaagattcagaaattcattcgggcaaacctttagggacccaaagtccacagacacacaccggggctagcccaaagtacacggaacacggggtagccccccagggggctgaactaaaagggattgcggatgcaggcaacacgtgggaaggcccgcacagggaactggcgttgcggtcccaaagggcccttccaaaatttggttccaaatgacggagcaaggctgtaggctgcagccaagtttgggtcccca

SEQ ID NO: 311 - DNA, 439 bp, Rattus norvegicus
  Genbank Accession No. AA851658
acactatttcacacaatcattcattaaaaaagttttacaatgaagtctgtaataaaaccatgtaacgttcaccaatgcattccagcccgtcacacccatggagtataacaaaccactttaaaacagcagttttcgttctctccaggtaagggtgttgtactgatactgaagtcttcctgtaacaagctgtcattcaagagagccactttatgtcaccgtgtgtggcacactggtgtaccccagagtagacatggtcatctttgcagtctctttcaaaccagtttcacaacaggaaagtatttgtgtgtgatcagagattgcatgtgcgcacacacagtgacccaactgtatgctttacagatgcatgcaacgccccgctctctcatcaagccagctgccgcgctctcaccagtagatgtagtagtactcgtgcatgcct

SEQ ID NO: 312 - DNA, 487 bp, Rattus norvegicus
  Genbank Accession No. AA851733
cagtcaactggtaaagtttatttcgtcagtataaggaatttaaagccatttactaaactataaattccagtgcattagaaatgactgttggagcatttctgaggtgttgctgtcaatttaatgggaaatgttactgtctggatgttggtatgaaatgcagctgtcatgccttttattaaacagaactgtcatcagtggtgattatgatggtgggtttttatagctttcaggagttagactgtgcatgtgctttacatcattttccaaacattagtggtgatttggttgactggttatttctaactaagcttgtggaagtgaggggcagccatgatatgtgtcacaggagctgaggaatttcaggcacacaacactacctgtcagtcacccttcatcagaaactcagtgacatttacaagacaactagtgcaaaaagcatcaaaaaattatgcatggcagcagattaattttcttgaaattttaaaac

SEQ ID NO: 313 - DNA, 499 bp, Rattus norvegicus
  Genbank Accession No. AA851739
  misc_feature (1)..(499): n = a or c or g or t
gcacttcaaataaattaaaagggacaaccgtcaagtgttcaaattgtgaagaaatatctgaaaacctagagactccaaactgcggtcttctaacctcattctttgtccgatggcaaaacccacgcatctcagaaccccgtttctccctactgaggtgagagaagcattcacaagcggagcccagatggaggagaaagctgcatctgactggaatgaacattgccacgtactcgctaatacgggtttcactttatgaccaaatgtattctttaaaaataagaaggggcgagggagctgcacgttttagagactgagcttactcggggctagcacactaactctagtgcctttaatggcagtagcaactttgtcctccgaagtcaaacgccatccccagtcaagccttgtgctaccagctttttaggagatgttacctaaactttattaanagaaaagagcaagtttanatatagacactggactagcccagtctgtattt

SEQ ID NO: 314 - DNA, 435 bp, Rattus norvegicus
  Genbank Accession No. AA851754
gacaaatggctcaggtttattagttttataggaatcacatcgttcagaatttgcagttatctctgtactaaatagaaggaactgtaccaaattatcaaaaacaacttaaacattcagaatatgtaatacaagaaagaaaaagacaacagattcccttttcaccatacaagtgaaatacgaccctttccatgctgttaaagtaactgtctagagaatggaattagggtggcccacctttattttcaattaaaaacctaatacagtagactgaattattatttttattaatatgcacagcaaattactgaaaacggtgacttcatgtcttctccttaaagatggcacttgtaggtagcaaggaggcagagatgtctacacacatcacatgttaacttggaaagactcttccacagcagtttgatattgggtttcctc

SEQ ID NO: 315 - DNA, 520 bp, Rattus norvegicus
  Genbank Accession No. AA851791
ctctctcttccgcttgggtttagatatcgggccctgggatagggcagccagttgttcatgaactgcccgaagctgctcttgcagctctgccaggcgatgagccctttcttcctcggagtctgagctttcactctcctcctcctcatcatcctcatcctcttcctcctcttcctcagaggagctctcactgctactttcctcactggaggactctgaagaggatttggccaacccgggaggcaaggcagtagagacaggtaaaggtcctggttccagtggctcatctggcatcttggcatagcggaactcaaacacatcctgtaacttccgggccatagccacgacatcgtggtctggaggattgtacttatagcagttggagaacatgagccgtacatcagcagcaaactcctgtgcatcccggtaatcgcggttctccatcttccgcttgacagtgctgaggtccatggggtgcttaatgatgtcatggtagtcatgaaggccaagagcagaagcgtcc

SEQ ID NO: 316 - DNA, 294 bp, Rattus norvegicus
  Genbank Accession No. AA851814
aatgagtatcttatgtacacacacacaccatacaacaagcttggttccattataattccatcaggcgctcaggtatgttcaatgacctgagatagagttgatgaagcatggcctttaggtcacaatgaagtccatcagtgagttgtcaggctgcagtgtggggattgggacatctgctacctggatgatgttgacttctaggattccatctacaattgtgatggtggctctgaagtaaccatatctgtttattcggcagttttcattggaaatgtcactcagctccatggattt

SEQ ID NO: 317 - DNA, 477 bp, Rattus norvegicus
  Genbank Accession No. AA851873
cccctgctgtctcgctaagcagcccacacaggacagaaacgggtagcactgaggaatgatcagattgttttttcctttcccccaatatttctgcccccttccctaatccctgctccaaacctatttagtatcaggaatggttagtaaatctgaagaaacagctaagatggaggccgggcattcagaggcctgggcctctcctcactagggcttggactcccagtgactgctctgctcatgggggagcatttctccttcaaatactttttttttttttacactggttcacagatcagatcggcactttgactctgaacctggcaccaaaaggcacaatatctgataccctgtaaagagctactacagatgctgcgtatggacaggcaaacggagccagtcccacttaggaacgggctcagacagggaggggagatgaaaggagtgtggggagaaaacctaagccaataccttttacta

SEQ ID NO: 318 - DNA, 596 bp, Rattus norvegicus
  Genbank Accession No. AA851926
ttcagtcttcaaatatcttttattggaaggccatgcattgccttcatttattgtatttgaaatcactgtacagttacttttgtgaaaacactgcctgcattttctagtacaaaaaaaacctaaaaattgtttcaggaatgtagagaaatatccaacttaaatagcgaaaaaagtgcaccataattactgctgcactgcagtcatttctgcatttcccatgtttcttaaataactatcttgtctgataacacacaatataaagagcaattatgaaaaacagacatttacatatacttctaaagtcttattgagaataccctgttggcattggatagccaatcataggcgcagcagctgcggtagcaggatatgcatatgcctgttggttcatcccattgtgcatatttgcaacattacttccatattgctgagtgctatcataaccgttctggtaagtccctgttgggttaccagtcctaaaactggtctgtatgccagcagatacaaaattacttccaaagctcccattggtgtaatttgcagcactgtaaacaccattctgagttttagccccaaaatctctcttaagcagacta

SEQ ID NO: 319 - DNA, 591 bp, Rattus norvegicus
  Genbank Accession No. AA851951
  misc_feature (1)..(591): n = a or c or g or t
attgtaaaatctttttttttttttttttgagacagggtttctctgtggaaatatttattactaatgacgagtatatgaaattttgtcttgaagcacagtgtggcacgggtaacagtcttactagaatgaggtaaaccacattgctacatttcagaacactgtttgtaaaaagccaacatcagtgtgagggttgagactgcttctttctcaccagatcagaaattcttggggtagtctttgcgagagcacaccggaggtcgtcttccacgacaagcctacttctgtacttggacttgatgaccaacaagctggagaaccctgtttcacaaagagatgttgttgcgaatggaaggaggagtcgcaacaccgtctcagacagaatcgggtatgactgcaaacacttgacccagaactgtgtcactggcattgtggagaaattggctctcgccgcatcactgtttgtaagctcgatgaactcgtcctgtgctgtcttggggacatcttcagctttgactgtgaatgggtttctggcaagtgcaaacgggacgtcaggtanattgggaaagtaccaagaaatttcaccggcaagca

SEQ ID NO: 320 - DNA, 432 bp, Rattus norvegicus
  Genbank Accession No. AA851967
agaatggctgattcacccctgtgacttgggctggatgtcactttatgaaatggtagtttgtcacaggggtgagtgctgttaacagcagcagtcctttgtcagttcgtggtactgctttcttgttggcatgtccaccaggtcttttcctgctcatctctgtattgctaccgaataggactggatgcctgtatggagagtgtttggttgttttggttttggcttaaagaacaagcaaaagggactgaggggaggggacagctgccggttctgctgtcccacaggcattcccttcatgcagattcgaaggtgtggtctagtggttggcgcctgcccctcccagtatccccaggggctccgttacccaggcgacatagaagctaccacctgaaaaaaaacgcgtcacacgggatccattttcatatgagccctggc

SEQ ID NO: 321 - DNA, 481 bp, Rattus norvegicus
  Genbank Accession No. AA852038
ccacaggtcagaatttatttcatagcatctcatttatagcatttttcaagtacaagatcctgtccgacatctttgacacgggaaagagaagagcacacgttggtaaggcacctgcagaggagcgaagcccccccttttggcttgagacttctgggtagctgcttgcacgtctgtcgagcagaaaacaaagtcatcgaaagtttgctctcacccaggcttgaggtgacgattttggagcctgctacagtgtggcttttcgggtgaggtgagtcggcctacaccgaggcaaggctgaagaggcacctctccacacagctcacagaatcctcccagacaccaggctgagcctccagccgcttttcagctttgaagagaaccaactttaatcccacccaggcacatgcttttaaatttctcagcccaaacttctattttcaaaacgtaaaaatgcaggaaaacctcaagtacagtcagaccttac

SEQ ID NO: 322 - DNA, 424 bp, Rattus norvegicus
  Genbank Accession No. AA852046
  misc_feature (1)..(424): n = a or c or g or t
cagagctggggaccgaacccagggccttgtgcttgctaggcaagagctctaccactgagctaaatccccaacccccaaaacactatgttttaaaaattaactttggctatcaaccaacacaccgccactagagcggggtccacaaaattaagtttcttactcactaagcgttaaggggaccaagtaaaactcttcgacgaacaaagcaaacagtttcatgatttcaaacacagtcgccggtccaagattttaaacacagtcgtcagtccaaattcaaacacganacanaagtcaaaaagacactaagagacacaacacgtccagaaaaccacagtcaggtcacaaagaagacaaacaattccaacagtcaaacaagtaacaagcagatgtgccgcgcggcttcggtaccaaactgaaaccaaaa

SEQ ID NO: 323 - DNA, 421 bp, Rattus norvegicus
  Genbank Accession No. AA858478
tttttttttttttttttggctcttatgtgtctttaattactggcttgtggcccctgttctctaacactggcatctctgtccccaacaagcagcggtcccctccaaagttcaggtggtggttgggcctgtgacaagagggcatattctctgtaacctttggtggcttctaggtggaagttgcagtaaggggatcccaagcacagggcctttgggtgctacacatctcacagccagggcggtttgaagcattgatgaaggtgcaggaagggcaagaccagccaggctgagggggacttgggagactggaactggatgcctggaggttatgaggcagctccaatgactgaggaaacaagcatcctaatttcctatccatcttggagtgttgagggctgtgtcctgaaacttctcggggggctga

SEQ ID NO: 324 - DNA, 522 bp, Rattus norvegicus
  Genbank Accession No. AA858548
cggccgaaattgttttatttttttggttttttttttgaccactcagacacggatttaataattgtagaaatccaaagaataagcatcaaatctcgaagtcagagtgaactcttgcctgcgggttggcttgactacgcccagccactgagctgcctcaaccagccagggatctatgaggctgacttctgttttcatgatgtcaccatatgtagtatgtattttgtctcaataaagcatttgtaccgatggctctggagcttggaggaagactaaaggaatgtgtagtgattctgagtaaggtgtggacctacacggcagaactatctgggggagggaaaaacaaaggcctttcttcccgtgtcaggacagtcttgagtggctgaactaagcacatgggccactggggctacactgtctgaactccgacaggtcctgctcctctagggagagcttgcagttgggagttttagcagataagcaccgaaacaggtttccgattccttcctgcagctgttgtgcctc

SEQ ID NO: 325 - DNA, 417 bp, Rattus norvegicus
  Genbank Accession No. AA858566
tttttttttttttttttaggaagaaatatgtcttttattagaaggcttatatgtacagggacaggggacagctgtccctcacagcttagggaggctgcgagaaaaaccactgccttccagggtcactgcgcttacttacactggaaacaccacttaaacaccaccgagagtcgttaacagataaagccattacacacagatgcagagacacacggcggcgtgccggtggacacttgcgttattttccaaaaacgagtctacacaaaaaatacaatgtgccggtaaaaaaaacataggcatatcaatacatgtctttttctttctttctttctttttttttttttttgttaatacatggtactctgagctttttgcccaaggattttttgttttttgttttttatatcgagattctca

SEQ ID NO: 326 - DNA, 472 bp, Rattus norvegicus
  Genbank Accession No. AA858588
tttttttttttttttttccatttggctctttttattagagaaatcgagaagacagcgagtagggaaatccccatagtgaatggaaccatcacatagatgcctttctggaaccccaaccttctatgatccccaaaagtgtgcttgtgatttcagcaacttacaaaggggagaggaaatactgagaaaggccactatttaataatgaaggagtgaaggtgtctctaaactgggctccaaatctccgtggtggttgtcattgttacctccccttgtatcatcaagttggtgcccttttctgagccttatatctggctctggagtcctggtgcaccccaatcggtgttcggttggctcgttcatgggataccaaagccttccttacaaagtggtctttctttctgtcccttcttcttgggagaatggatttctaagggatggtgagttgaccctccttccgacccaggcaatctgt

SEQ ID NO: 327 - DNA, 410 bp, Rattus norvegicus
  Genbank Accession No. AA858590
tttttttttttttttttgcagatacaaagccgtatttatacatttatttatatgtctattcacttacgaagaggaccatttgggggacaggaagcaagtaggctgggtggcacctccctgccttcctcagagtcagagtgagtacatgataaataggagtcagagccatggagaaaagggagttaaccagaagggagacgctctatgaacacgcaggctgctaaggggtacagcatgggcagggatctgtgctgcgggccctatatacagcttaaagcgagggggagattagcccagtggctataggaacagcagaaggaagagaggaagggagtgccagctaggctgtcagcttccagcctgtggcccttacaccttcccctaagcccttctacatttggggcttaagg

SEQ ID NO: 328 - DNA, 480 bp, Rattus norvegicus
  Genbank Accession No. AA858640
tttttttttttttttttcaggaatgtacaaatgtctttattcaaaaatacaaaataaattatctgtaggcatggacaatgacagcagtaaaccattatgtattgtcaaaggaaaccagtaactgatggttacagtgatcagccagccttctcttcagtcattttcttcaggtgacttctctgaagttattggtgaggaacctgccttgagcttcctgccacagttcattgataagggcggcgataatgaatgggaggatgaagtggaatgcgaagaagcgtgttagggttgctttgtctactgagaagcctcctcagattcattcgactagggtagtcccaatgtaagggatagctgataataggtttgtaattactgtagctcctcagaatgatatttgtcctcatgggagtacatagcccatgaatgcagttgctatgactgcaaatagtagaatgattccaatgtttcaggtttcta

SEQ ID NO: 329 - DNA, 495 bp, Rattus norvegicus
  Genbank Accession No. AA858651
tttttttttttttttttggaaggttctccacctgccatttatttaaaacaaaagaaaacaaaacaaaaccaaaaaaaaaccctctaagtattctcaataacgtaatttaaaaagccatcaacacgtgtgtcaaggatgtgaacagtcaagttcacactcagattcttattctcagtgtagaagtgaggagttgcagctcagagcagcactgagtgacaggatgcagacgtccccaatccctagccccaggctggaccagcaaggttgaatgtggaaggtaacacaggcagtgcagggacagggtcctgaagtgcagggcaggctgggctccacagttcttcacactgaagccatagaatcacagggaatatcagacactggtgtctaaagagaactgccaggtcagggtgatgtcagcagggtagaagcccagggcccagcacctcagggtgacatcaccttcaggtctggggtgaagggtcacacctcgtgccg

SEQ ID NO: 330 - DNA, 587 bp, Rattus norvegicus
  Genbank Accession No. AA858657
tttttttttttttttttgaatgaagggtggtattatattttattaagaacaacaaaactttgtaccacacagacaacatcttacttcagtggccaatcatatacatatgaatatgcccatatgtagctctagggccaactttagacatggaacattaggtaccaagttcacaaccatcaaacaaaacatatttcacactccttcagtaaagtttaattttttcagtgtaatatgagaccatatttaacagctatgacaaaaaggtgtactttttaaaaaccaattctcatcctaactatggagaaaggcaaagtgaccttcagatctatgaaggggattatcaagtcttgaagtgactttttctttgtttcaaagatccatgttaagttagtcgtagacaacctcaaatatagtgtttctcaacgcccattacatggctaagcacatctgtactggaaatcattttaatactcaaactgtagctgaatagggttgatatcattaagatagatgaattgattttctaagaagcagaggggagtaaactgcaaactcaggaggttttcaatattcaacagttcaatgtt

SEQ ID NO: 331 - DNA, 520 bp, Rattus norvegicus
  Genbank Accession No. AA858660
tttttttttttttttttaccaaccttttcagacatgactgatttatttgatgaattcaaatttcacttgtcaaagtatattgaggggcagggtttgggttaattatttcattagaagcaatcacattttttttttttttacagttaattgacatggggtagtatctagaggaaaggcaaaactctaaaaaacgacagcaaaacacaacgtcatgtatgtgggtgataattacaaatatcagcaaaggaaacaactagcttatactactgaggtgtgaagcatgctaacactagtagtgaccttttagttcaactcaacccacagtctgcactgagttggtgcaagacactaggtactaggaatatggtgaaaacacacgcacaatcagacatcctccatctccttagcaagtacactaagagcatttataaaagtggtatcgtgaggcataaagcactcttctaaggccatggatggagatgtttcttcaggtgacaccactgagttccacttcaatctg

SEQ ID NO: 332 - DNA, 400 bp, Rattus norvegicus
  Genbank Accession No. AA858673
tttttttttttttttatgttcagatgcatttattcagcaaaccttcttgctaaacattatggtagccctaaaagatttcgaaatcaggacattcagcaaagccctctcctctgaatgcggatagatgttccaaatttcctgttttcaaagcatagaatgcattcattggcgtaagtttttccgtcagtaccacacacaggatcataatccctggggcatccaacaagtgtattagggcaattagcctttttcccaatcaccttagctgtagtgttacctgctaaattgagcagggccaaagcactgagaagaaagataattgctaccttcatgggtgtagacctaggtccaaaactcagaagaactgtgcagggtgcttctcttcaacctcgtgccgaaa

SEQ ID NO: 333 - DNA, 275 bp, Rattus norvegicus
  Genbank Accession No. AA858674
tttttttttttttttttcaaacaggaaattctttattgcaaagatacaaaagcagtcacggggacatgtacagcaataaattaggtgggggccatgaggcagggtgcaaacggggccaaaagtctgtgatcttgatcccttcccaataatttataacatgggggaaaaaaagcacaaaaaaaaaataaatattgaaatgaaattgccaagtggaaggcggctgaggatgccaggcctcggaatgatcggcatgtgtccctgaaaccctcgtgccg

SEQ ID NO: 334 - DNA, 609 bp, Rattus norvegicus
  Genbank Accession No. AA858695
tttttttttttttttttccaatcttaaacaaatcactcaacgatagtttatttattccattacagaattaggcacgcttcagattacaaaaccaagctcattataatcctgaaggattagagtatcttcaagaaaccagtcacagctcaactgaagtgaacatggacacagggttggtgtctactgagggaaatcatgttcctccaatacacggaaagataatgagatgcattttcttagtcaccgaggaaggcagtttcttccttgataagctgaaactatttcttttttgtagctcttttcccttctcctttccttggcttccccttcccccggagcttctttagacgtctttgctcatccttaaagtcctgatgctcatctctgtaaaggccaagaaaacggagggtgcccatgagcgcaaaatacgtgttgtgattcgggtaccagtcgtacgtctctttcttcttggccaggggctgctcgctgaacaggtttaccactttcatggactttgagtcagtaggcctggccacttcaccaaagatacgggcactcagacgggacatgcgcactgcatattctgaaagcgacatttccccagcagta

SEQ ID NO: 335 - DNA, 539 bp, Rattus norvegicus
  Genbank Accession No. AA858758
  misc_feature (1)..(539): n = a or c or g or t
tttttttttttttttttcaagctcccttcatgctctttattaaaactatgcaacattctccatcctttttatctccccaagcaattccaccctagtccaaaaagaaataagaagaaggagaataatagaaattggaccagttcttaagtttcttcttccatgtttcttggaaaacagtgtgtagtcaattcttcttcatccgtggcttcactgtggcaccccatttccagtgattgatcttctctccaaacaggtagaggctggcactcaggatgtaactggctgagaagaagagaataatacccagcgggctgagggaggcaaacacggggtacacccagtttccggtctgaacgtagcgccaaaggatcctgataatgtaagcaaaattacaggcacccagcangctgagtcctagcttcttcgatggatagttgtgtggtctgagaacggtttcagccagggaaaagggaaatatggaggtatgcattgcgtgattaaaccatgctggaaagaaatcatccaagcccttggggtaa

SEQ ID NO: 336 - DNA, 359 bp, Rattus norvegicus
  Genbank Accession No. AA858788
tttttttttttttttctgttcagattcctttattgtactgcaaagtccaatgctccccagtcttggctcctcttcaggtactacccagaaacttgctggagagggcagatgtgtcttgaggcgcctctctaggtgtttggcaactattttccaatggtctgtcctgtccagcgtccctctcttcccttaaactgcctgaggccaattctgccatccgcatagcaagagggcagatgctgagaaagtgctaggaggcagcgaggagacagagcgggaacaggcaaggtgtgttccagagagagatggagatgagagggtgggaggaggctgtcaccagaggcagtggaaccctcgtgccg

SEQ ID NO: 337 - DNA, 515 bp, Rattus norvegicus
  Genbank Accession No. AA858816
tttttttttttttttttggattgacagttgtttactgacagagaacagcaggctggagaggctccaagtgaagggggagacttttgggaagactggagtctgaagttggaggagtccacagttgcaagagtgtacggggtcagctctggtccatcttgccggggtgagtgggatcttcacccccttctggggtggcaggtggttcagccacctccagaatcagttccaaggcaccgtcaccgcacacccggcgtacctcctctcctctggctgctaggatctcttcaatgttcctcttccccttcaggtcagagaaccagcttaggttgtctgcgatgatgtggtggttctggcaaccagggcaagtcacgatgaccacaccctggtgataggccaactttgagatgtgcttggatgaccgagtcccacagaccttgcaggtgtagacgagctggtagtggtccgctttcacgcgccctaacgccgccgcatgctctgattccggcgcggagctc

SEQ ID NO: 338 - DNA, 553 bp, Rattus norvegicus
  Genbank Accession No. AA858817
tttttttttttttttttcacagttatgaagtagcaacaaaaataattttatggttggggatcacacagcatgaggaactgtattcaaaggtcacaacattaggacagttgaaagtctgccttatggggctgagacccttcccttgcccctttgcccttggtttcttgtgagactatggcagccaccctgaactgtgtactcttgccactcagagtacagcccgcatctccttattagagcaatctgagaggtagtcattccgcctacactcactttaaccgtgataaaactaaggaagagaaactaagtcacttcaaggtcatgggccagccagtcacaaacagacagtaccagtcaagctgcattgtgggagctagactgtcatcaccgtttaaagaatgggtctccctaggaattaattgcccaatccctgcagaccaggaagtgtccaccacaggagagagaagctggggaggtcacaggaccctccatgttctttatgagtttttctggggaggggttagagttcatgaatcactgggagatgcaaata

SEQ ID NO: 339 - DNA, 484 bp, Rattus norvegicus
  Genbank Accession No. AA858862
tttttttttttttttgtagttactctttattgccaagagttgacactaaccaggactcagggacataagttaaagcaactgtggcatctgaaaagtattgccacgctggggagaggaccaaaccgcagagggaacagatcccgggaaagggatgtgaggaggtggtaatgtccacggagaacatctcttttcttccttagaccatagaaatgtctaatccctctttgtgtccaaagagacaaagtgaggtctgggtcttagctacctagggctaagtgaggggctaaaggtagagggagttcccagcgtaaccacaaggaaacaaaggtttaaaccccagaaccaagcttccaagagtcgtttttagtcacaggatgacacagggaggtcggctgttggtgatcttttctaagggttctccattgctggctcttcggatagcttccatgagatctttctcataaggaaaacccccattctccag

SEQ ID NO: 340 - DNA, 496 bp, Rattus norvegicus
  Genbank Accession No. AA858903
tttttttttttttttttagaaataaaaccactttactgtttagaataaaggacacactataaaaagtgaacattatgcaacattacaagacaatatacattcacggaatataaaattcataaataacatggaggaaaactgtaaacagtgctacaaaatttagcaacaaatacattccttctagatgggtttttctctggctggagtctcttcatcactactgggcttcagcacagctgacttgttagaagaaaagtagacagagaatctaaggtatccctgtccccagagcatggtcttttcatcaggtcctctcctcctcagtcccaacagccaacttaaatctgttgagaccattctctcctgccttctcccatttgattatgtttctgtgacttttctttttttttttttttgagtttctatgatacaaatattagagtgattaattttaactttaagtagctaggagccaaatacctgaatggcaccttga

SEQ ID NO: 341 - DNA, 467 bp, Rattus norvegicus
  Genbank Accession No. AA858910
tttttttttttttttttccagttgccgttgctggttttaatgaggttttttttggccacagatgagggagggtggacagcctctggtgtgaggggacaggagacccaatccagacagtgctcaagacatacatctgaaaaagccaccccccattagaaggaatcactgccaaatacttctctgtacacacacttcaatgacacagtggctttccccagaacacagcattcacattaccgaaagcagcaaaattcactttaaaaaacaaacaaacaaacaaaaaacaagaaacaaacgacaacaacaaaaccaacaacagaaaaaacgaaacagaaaccagaagtgagaatcacaaaaataaataagtcagcacattctgggtcctgctggcctgagaaacagacatatccatcatagtctggttatcaggaacagcttcaaggctcaggtctctgaggtccccttga

SEQ ID NO: 342 - DNA, 551 bp, Rattus norvegicus
  Genbank Accession No. AA858928
tttttttttttttttttaaccatttggctagaaattttatttcagaaataagcattcagtgtactttaaagtgattaaaagttatttatggattactgtaataaatacttctcaaaaatagttactctgtaaatacacatacaaacttcagtgaagaactccttgccacaaacaagtgatctgtatcaaaatctgatgtcacagggaagctgaacggtggcctggacgggggacagaatgctcagggagtctaagaagcactccccattacatttttcattcaaatacttcccaaggccaacttaagtttgttttgttagttcatgcataatctgacagggaacataggaagccaagagttttagaagaaaaagcaatcctaatcttagcataagccacaaagaggcttttctgagagctgtcaaagctgtgttgagaaaagcaagcatgctttcaacgagacactgaggaaaacaccctgtccgactacaaatattccaaacatttgaaaacaagtgaatactgagcttcggagtatgttacactgggca

SEQ ID NO: 343 - DNA, 513 bp, Rattus norvegicus
  Genbank Accession No. AA858930
ttttttttttttttattcatgcttccgtttattcagctcatataaaagtctcttaagaatgcatttgagcacaatatataatagtaataatattataacatacattgtgagaaacttttgaaaacaatataacgtccacctggaacaacgcagtgttacagacgtaggaacccattggtcatgcacattttgtgccattttctttaactagttgtcacaatgctgaactgaagcatgacacatattttacaaactgaaactgacaccaggaagaggcctaacaagtgttatcagaagcttcacatttgcataatttatgacatcagttcacattctacgataaaaattcacattgtcttcttgttgcctttgatgaatttgaacagggctcccctgcttgtgggcagcatggagactagctctgccaaatcagtagtctggggctactcagtatcatctgtgagcaaatgtagtgttgttttattagaaccaaagccacaattagagcagagc

SEQ ID NO: 344 - DNA, 512 bp, Rattus norvegicus
  Genbank Accession No. AA858982
tttttttttttttggctcttttaagtttttattatttaaatacaccatactagagcaaatgtctctgaaaatatcacaaataaaagatttttttttcttcattcagcaaattagaagtagggggggatttctacatagtagcggctgtgagcctcatttttttttcttcttttctttttttttaacctttgtcatgggcggagcaacatcaggacaagaacactcacatgcatacatacattgtattttacagagatacaataaaagtgtctgtgatagaactatcacaaaagccacgtctctttcctttttaactcatgttcaggtttgattgaaacacatctcattacaacacttaaatatacaaagagcaaacagaatgtagttaagagtaaaacagggctcacactccggccggtgccctgctaattgttaatgagggtagaaagcagattcgtgatgcctcttctaattagcttcattagtcattgccctcccccccaagcaccctc

SEQ ID NO: 345 - DNA, 440 bp, Rattus norvegicus
  Genbank Accession No. AA858997
ttttttttttttttcattgaaaagtttggaattccaataaaattattggtaagaagcaaggtattagaggacaagatacagagtccaaaacactgacaggaggggctctggcttcccaagtgaccgaagtgaaccacatggtctgctcttggctgagggatgcgtgggtgggagggggaccgaggccgggaagcagaggactgggtagagggaggtgtcctcgcgaccagaaggagtgagtgggaacctgcactgagaagggtgggctgccccctcccctccgcccttgcacgtcagtccataaagaccctacccaagccaaggctgccctcaccgggacaccactgagcttatggaattgtaggatgtgccactgttacagcttgaggcataggcctcctggccattgccgtcaaggttgatcttgaaccctcgtgccg

SEQ ID NO: 346 - DNA, 423 bp, Rattus norvegicus
  Genbank Accession No. AA859019
tttttttttttttttctgaacagaaagaacttacatttatttttttttgcttggacatagtttgtccttagacatatcatattttggattagaagctttgaattcagtcttcttgcattgtggcaacagtcgctaagattaatcaccatataacaaaaaagtttatatgcttattagaagaaatgagctaaacaatatttcaaatgtaaattgaaattgaattagtaataagcatgtgtatttctaaacaaaggttcatccataaggtttactaataaatctattgtgattttacagacaagtgggataattgatgtgaccatcaatgcattttgaacgaaatggaggtgatcctcttaattttctatatccaggtttacacatgaattcaatattctcccctgattgggaataaatccttcc

SEQ ID NO: 347 - DNA, 147 bp, Rattus norvegicus
  Genbank Accession No. AA859114
tttttttttttttttttgggttttaatttaattttatttttgtcacatgggcagtataggatggtgttagcccatccttactccgcttgcattgactgtgcctcgggtcttaagacgctaaagtgtcatttagaactcactcccaga

SEQ ID NO: 348 - DNA, 376 bp, Rattus norvegicus
  Genbank Accession No. AA859130
tttttttttttttttttagcttttgtttggcctttagtctgaaaaagtgttgcttgaaagtgtacaacagagagcgggtgcaagcggctaggggtcacagagccgccaataaaaaagaatgtccttaaataaagtgttcacagagtaaaaatcagaactaccagtccttccctccaacacaacagagcacaggcacagaaccgatagtcgatgagcccaaggagtaaggaggaggctggagaggacagcagaggctaaaagaaaaggacaaaactcagtctcgggtccaagggctcagaacagtccaagtgggcagggtccggttgactgctagtcccgcttggccttcttcttgtcactgttgccattctcttca

SEQ ID NO: 349 - DNA, 353 bp, Rattus norvegicus
  Genbank Accession No. AA859145
ttttttttttttaatttgggtttttggtttaattaattttggttttaaagaaaaagggccccactgtttaacccgggcgggaatggaacttgcggtgtgacaaaccgggcctcggcccccaaagtgaggggaaaaaatttgaaccccacctttaaggaaactgaggccaaagaaccaaaaagtgtcggacaatttcaaacaaaatgaactttggccaatgtgggcaaaaaaaaaccctgaaaacaaacaaacgcttcccaggttttgaaaggtgtaacccaaggcaacctgagcacccgggaaacaaaagggccaaacccaaatgccctttgaccttggcccaaaaccaggat

SEQ ID NO: 350 - DNA, 497 bp, Rattus norvegicus
  Genbank Accession No. AA859201
ttttttttttaatttttttttttaactgtacacaggtaagtttaattagctgctaagttagcagacagatgttaagcatatgaggataggtccacaaacttaagagagtcaggttacatttatgtcacgagaggtttagacattcaacagactactttttaatactgaatataaaaccttttgccccaaaaatcaatgtattaaacctggtttctagaattatccaaactctgttttaaacacaattttaatttttttatacttaaatattttctttagcaaacatatccaaaatactaagcttcgctttataattttgtgtcagaatatcccgaactgttcaacattcctccgcctaagccacaacaacttaaatcttttttccctttaaatcatttctcttttcattgccattctcaaagatattctgtaaaggggctaactgtacagctcaggaacagagcacattttttgaggcccccaagaagagaggggga

SEQ ID NO: 351 - DNA, 477 bp, Rattus norvegicus
  Genbank Accession No. AA859252
cggccgcaattgtttatttttgttggttttttgttttttacctttccaatgcgattttattagtgcttgcttccggaaaggagatcgttggtatttccccacactggcctcccctgggcagactccccacagacataggcgagtcattcttctgggtaagaacaggacattctacgctggggctgggcaatgactcaccgttattcagaatggtgacacagagcctgtgcgccctctctgctaaggcatgcaagaccctttcctctctgatgttgcaactgcagaaggctgagtccgtaaagaacagaggaaaacgcactgggccaagaagccagagaggcagatagcgataaataaacccaaagaaaagacgtttggcactaaacccgcctcctgggtggaatgtgagtggtggcacgtgggctcccccacgtggccaaaggtgttattgcacctgcagctacctgcctcgtgccg

SEQ ID NO: 352 - DNA, 425 bp, Rattus norvegicus
  Genbank Accession No. AA859519
tttttttttttttttttacagtgtaaaagagtaaaacacattttattatatatttttttttctttgaggaaaacagatgtgtgatagaggctgttatgaagtcttgaagggatcaaaactgggcaaggtgttttcaagccagcaagctccagttttgcagaacagctggatgacagtcgccaccagtgaagaccgcattaatacccacaagacagattgcagccgccatcacacacccgagacacagcctcagcagaactgccgggacttccagccctgggaagtaacctcggacggagggagccatcgcatctgggcatgcagtgaagcgggataggtgaaagcggcaggaggaggaagagcatgcgctaactccgctgggtacagagggtacggggcccacacttcacggctactggggtaaa

SEQ ID NO: 353 - DNA, 448 bp, Rattus norvegicus
  Genbank Accession No. AA859529
tttttttttttttttttaaggtttttagatagctctttattgatatcctcagcccctggtcagcacagactcccagcactggctcataccagctggactcaggtgccatccccaagagcaggagtaggccccataggggcagagaggcctcccagactaggaggagtgtgcaggcagccaggaagccctccagaactccaggcccaggttagggagggctggcctttggcagtagctcaggcccccactggggcatcatagttgagcacgtagtagtcgtggacatacatgagcacagccaccggttgcccaatgatgagtgtcacccacacagctgcattgccatagttcccttggaagaagcggttcacaatccaggccagtgggacctgagccatcatggctgtgaatgcccagaggcggaacatcctcaggggaatgctcacta

SEQ ID NO: 354 - DNA, 423 bp, Rattus norvegicus
  Genbank Accession No. AA859593
tttttttttttttttatgatttgaactttattcaaaagaacgattatcagaagcagtcaaacaaagacacatacagggcagggtccagcagggtctcgagcacagaggctccctgtcctgccatcacgggacaagaatgcatcagtctgaagcagagctgtgtgttcatctgcagggaagctgctctaggtctcaactggagatagaattgaaccatcgtttgtaggtagacaggattcacagagatgttgaactgaagtcaaccccctcttcttccctttagaggtccttctagctcaaggcctcaaccctgtaatcgatgacaagctggtagtggctagctaccatcctaggtcatctctcgacataaattctgctgtgacacacaaggcagacaagtaacaacgacactccatactctca

SEQ ID NO: 355 - DNA, 283 bp, Rattus norvegicus
  Genbank Accession No. AA859648
tttttttttttttttttgcgactttgaaagattgtaatatattctgtggaaaacattcggcagagcaaaagccctccctgggccctcccgcagtatgcaaccagtggaacggtctggaaatctgcagctctggaaaggtccctggctcagtccttgaggaatgcaggcagctatatgggaagaacctgctccaggatggttctggatgagatggggatcctatcagggaagatgacttcaaattcgataacaaggtctccacgtttctcaggtgttttgggga

SEQ ID NO: 356 - DNA, 504 bp, Rattus norvegicus
  Genbank Accession No. AA859667
  misc_feature (1)..(504): n = a or c or g or t
cggacgcgggtccggaacaatagcccgggtgtcccgaactcctggagcgagactccgcccgtccggctttgggtccggcactggagagagggttgctccgtgggcacaaggcatgatgcatcactgccactctggccacaagggctacgttgcgagcggtgcagccgagaggccagaacatcgtgccggccggggcgctggggctgcgcgccctggggttgcggcaccggagctcctgaagaccctcagccgctggggaccgaattcgggcgcgagcagagctgagttgtggggacctagcctctccgcgccgatgagtccctagctagtctttctatggcttangagccacaaacttttgcggactcgcgcggccctagcagttcggctcccgccgcgttacttgtttaaggtggcgcgggtactgccggccccaacccggctgcggaccgcgcttttgtcttggctatcccgcatgggcgcggacctccctcgtgccgaatt

SEQ ID NO: 357 - DNA, 448 bp, Rattus norvegicus
  Genbank Accession No. AA859705
tttttttttttttttttaccaacgggagatgcaatttatttacaccagcagccatgggggcagaggggaatacacagcgtttacaaagttagctacctgtacaggatggattacatatgcaaaaataaaaatctcaagaccacaggacagcgtgatgtcctcatagatgctgggcgctgggggagccggtggctttggctttttcttcttgttggagcccaggccagaggcagtccctaccaagctcagatgggatttctttttcttggttttccgtgattcagagctgttggtacctaaaccccatccctgattttcactagtcttggaggagcctgaatcagacggtgagagatcagaagaaccgtcccactgaagccggctgaggagggcctggctgtcagtcatgtcaaagccatcattgtccaaggagctctctacctctgga

SEQ ID NO: 358 - DNA, 477 bp, Rattus norvegicus
  Genbank Accession No. AA859722
tttttttttttttttttgacaggtacacaattttatttaacagcatttaaagtccacctcagaagagggacaccagagaattctttttttttttcatttaataaatacaaatgaataaaaatactttgttttgtacagagaccgcctctcctctcttcctcccccgcttgcttgccaggaagggctgaggatggcaacatgccctgtggccgctctgcatgggcatctccccacacagaccgcttctcacagagagggcttcatctcagtggcctacaatactatttcggtacaatcccctcctcctgcacctaccaacaccagactcttgcctttcaaacagaccgactcccctgggagaaggaaagcacaggcccccacaggtgcccgcctggagccccatagctggggactcgtgacaccatgggacatgcacgctggccactgacatgtgggcacgggacagaagcagacagt

SEQ ID NO: 359 - DNA, 497 bp, Rattus norvegicus
  Genbank Accession No. AA859783
tttttttttttttttttaccagtaacaataacttttattctctagcaggtcatttttctactgcttcagtattttcctctaagaaaacacaagttttagaactggatcacttgaccctttctcttcttgtcgcctcccagttcaaaatgcttgcatctcttaatggccagcatcctcttagatctgcagttgggctcaacacactcaagcctgagcacaatcttctttgtggttttggccttctttcgaaaaattggctttgtttgcccgccatagccactctgcttccggtcgtagcgccgctttccttgggcatacagggaatccttgcccttcttatactgggtcactttgtgaggctggtgcttgccacatttcttacagaaagtccttcgggttttaggtacgttgaccatctttgcagcagaagtgtctgcgatgaaaacgagagaccggcagcagcgatcccgcctcaaccggcacctcgtgccgaattc

SEQ ID NO: 360 - DNA, 518 bp, Rattus norvegicus
  Genbank Accession No. AA859796
  misc_feature (1)..(518): n = a or c or g or t
tttttttttttttttttagtcttgtaccccatggagcccttgggccaacacaaggcccgtgaggctgtccaagttttggggcttctctggcactggcaccgacagccagtaagaaggcctgcgggagctgcaggcctggctcagggtcaaagtccctggttcctggagagtatcacagcgcatcctcttcagtgcagcccccaccaatcatgaaacgaaattcctgcaggtttgagactccatggaagtgaacaaaggcaccagcaaccacaaagatgtggaagagctgatgagagtgaaaccagatgtcacatttgccaggaaagaagcgctcagggatacgggccgcgtagagggcagctcctgtgatatagaggctagccatgagcattagccagcctatctgccctatggtggcagccttcaggaacccttctgagatgacataatgcaaggtanggatgattccactcagacctaagcccacgaacactcctgctctgaccccccgatactga

SEQ ID NO: 361 - DNA, 472 bp, Rattus norvegicus
  Genbank Accession No. AA859804
  misc_feature (1)..(472): n = a or c or g or t
tttttttttttttttttggtttagcaccatttatttgtgatctcagctgttgtagtagttgctgctgtcagcctgttctcaaaggtaacatgctcttccgttcctcttgtccaggacagaagggtcttccaggtggcacgccaacagaacaagagactccgatgacgccagcttcaatgatggtgccatccagagagggagagtgtcatggcacattcaatcgcggcttccagaggttttgaaaaaggagcctttgggggcccagcctgcctggcattttgatgctgtcggtgtgagttttgtattccataatggtgttgggaggtangttaagcacgcgccgaagagtgtcccggattcgggctgtggttgcttggtcgctggcagtcttattccatatagaaataatgtcctcctggaagcggacagagaccacagccccgcagatttcctccccaaccatgaactgttc

SEQ ID NO: 362 - DNA, 477 bp, Rattus norvegicus
  Genbank Accession No. AA859806
gttttttttttttttttgttttggagctgacttttattgtacttgttgctttaccaccaaacagaggcatgacaggcctgctgtgtgatatatacatatacacatatgtacacacactgacacacaccacagcccacactcacagcatgtgacaacacacactgagcttgtgaggacagtaaagatgtagattttgccacttccataggaggataattcaaccaaaataaaaaggaacaggccaatgctgggacacatgggttcacagctcaaacactggaaaaagagtaagatcagtcacggtttacactgttcacagctgtccctcaataaaaggtgtactgaaggccagaggatgatgctcatggcctaccagctctctgtaccacagcacctacaccctccatggagagcttgaatgattaagtcactatcgctggagactgccagctccaacactggcagctctgttgcaca

SEQ ID NO: 363 - DNA, 504 bp, Rattus norvegicus
  Genbank Accession No. AA859829
tttttttttttttttttgagaaatagaaagctattttattaacacgctttacatttacagttcattagctaatcaacatcaacatgcaaaaataagcgctagatacaaacctctacaatatggttttgtgtgaattacaatggttcatgtctggaaaacccgtcagtacttactttagctgaactatcagtttccgtaatgaaaagcatgtacactctaggactacggaaccacctggcaaggcctctgcagaaactcagtccagtggctttcccgtgaatacattctcaaagcaggagataaggcggtgctggaaggtgagacgctgaacctgtgcacagacacagccccagacaccctggccacaagggcagctcggaagcgtttattcagtgtctcatagggcaccttgagggtcgggtactcctgcaccttcagggtcatggacagctgggccgccgactcctgcaccgccatcttgggccggccctcgtgccgaattct

SEQ ID NO: 364 - DNA, 426 bp, Rattus norvegicus
  Genbank Accession No. AA859877
tttttttttttttttttgctggttcaactatttattgtggagtactttacatgcaagaacacaaattagagacagtgtttggaagcagaaccagtggggtagggagacacaatagttgtcactctgagccaccctccagaagcagctctacccacagaaacaggacagggacaagaatctgactcgtgagacaacagaataacaaactcaacaccatcttttcagcagctccaaagatcctcagatcctcacaaaggaagtgcaaactttaggaagaaactacccagctctcccagagagcctgagggcatgagtgtggcaggagggagcagtcaggacagaggattgacagttattcttgggagctaggggaagcctagcttagaccccatgaacgtgaagggctggggatgcgcactgggctaa

SEQ ID NO: 365 - DNA, 491 bp, Rattus norvegicus
  Genbank Accession No. AA859919
tttttttttttttttttcattattagccaaacctttaggcctgttatattttaaagcaacccaatatagttacaacagaattgcaggaggcttagaataacagagccatttgtcgggggtcatcagggagaatactgatagtatcttcggctttgccacacaacagacacagcatggtatattcctgaaattcatccatgatgctgaatgtatactcatgtctggctatgacatgatgacaattcttacacaaatggtcataggtaactatttcttctccatcttcctctttcagggatctgtttgtgatcagcataaagtcccgcttactgcacacggcgcatcctgcaaagttcagtaagaacgagccattctccagacaggtgttccccttatttggatggaaaatactgcatccccattcctgatcagtcttccttttcacatcgattaaatagcactctgtcaatcatacttcccaaactgcaagt

SEQ ID NO: 366 - DNA, 331 bp, Rattus norvegicus
  Genbank Accession No. AA859921
tttttttttttttttttgtttttccaagttgcattaatttaaagcggtagccaacaagcagctcgagcacatggccatcggcgaatgctccccgtggctgggtgcagctgcgagtggggtccagcagcacggtggagagcgggacgaggcatttggctaccttaagagagtcatagttactcccgccgtttacccgcgcttcattgaatttcttcactatgacattcagagcactgggcagaaatcacatcgcgtcaacacccgccgcgggccttcgcgatgctttgttttaattaaacagtcggattcccctggtccgcaccagttctaa

SEQ ID NO: 367 - DNA, 380 bp, Rattus norvegicus
  Genbank Accession No. AA859938
tttttttttttttttttgctttaaagtaatttttattgcccaggattttttttttccttgtgttttgccttctttttttttttttttttttttttttttccctttttttggtttgttttcattttataaactcaagctcagggaagcttgtttttgtcctggaaaacaaaacaaagactaaacaaagctttcatagtattatttgcaaacctgacctcatttagaaagagatgtaattgcatggctagaacacagcttctagcatgaatgatgcaggtgtgactagtggtactaagaggagacgatgcactgttgacaagattataatctgctggtggcgttgctgaaaaaaaaaaaaaaaaacctttgccctcgtgccg

SEQ ID NO: 368 - DNA, 536 bp, Rattus norvegicus
  Genbank Accession No. AA859954
tttttttttttttttttggaatgatcaaagatgtctttataaagtttttcacgacttcattctaaatatacagaataaaaaatggcgtactcatttgtgagacaccaaccagattttccttatactgtctcaaaatttaaagatcaatttccccagagggtgtgcaatgcatcataaaatggcctttttgagggtgggaaaggaaggcatattacattgttccatgataggcatgcaagactgctatccaacatatataacttatatacatttggtgacttagaaaaaccaatcatttgtgacaagcctgaaaagcctggcatatttaacatacgtcagaaggttctgtgtggccgaggttctccagttggaccatgtggccctgtgaaagtgtcagaaggccaattttgttaagtttgcagcagaacatcatatccaccctaaagaatacaatgtggattgaatcgaaggtggagaccttaccttaacaaagaaagcaaaagtatgtcagtgtaaaatgtggactaaactgcttt

SEQ ID NO: 369 - DNA, 480 bp, Rattus norvegicus
  Genbank Accession No. AA859957
  misc_feature (1)..(480): n = a or c or g or t
tttttttttttttttttgactgattaataggagatttattgatgcaagaacagaggcatccttgccgaacttagtaggagatgctaaattttctgtccagttttccttcctggataagtctttcctttttgtccctgtctgttttgataacgtaataccagaagatgagaggccctaaacctgccactgctcctaaaagtgagttcttgggaatgggtctgaaattaggataaacatttgctgatcttgcataggtccaacgaatcaaggcaggatcctcgatgtgcgtttggcgtttggggtcgttgtactgaagcagatactcccgtttaagccgggcccttatgctcatgcgctcgacctgcgcctttcgggtctccggagacacgtcatactcggcagggtccagggtattggggagagcggccatgggtgcaagcttatacttggnaaacgacatcttggctcccggcctcgtgc

SEQ ID NO: 370 - DNA, 409 bp, Rattus norvegicus
  Genbank Accession No. AA859966
tttttttttttttttttcaactttattccagtaatttaagagaagattaaaataatagataatatgaaacagatgaagataaccgagctggtacaggtccaggccagcctagtataaagttaaggaggcatggagaatggtgaggcaggggagtggagatctctgttgcaatggcggaaagcagcttggagtatggttgatggtactgtctccttctacacgtgtgttcaatgtgttaacaaatgggaaacggaatcctgcctcattctaaaccagatggtaagagaaatatggcagaacgaggttgtggtatccaggcggctcgggcctgctttgaacactctaattttttcaaagtaaacgcttcgggccccgcgggacactcagctaagagcatcgagggggcgcc

SEQ ID NO: 371 - DNA, 499 bp, Rattus norvegicus
  Genbank Accession No. AA859980
tttttttttttttttttgcaagggagggaagagtttatttggctttcaattccagttacagttcatcattttggggaagtcaaggtagacgtttgaagcaagtaccatcctgtctggtcaagcagagaaataaatgcactgaaggcgcttgctgctcactttctaacaacccagaggcacacttgttggaacggccaatcttctgactagaatagctagaatacctaccccaccacctcagcttagaagaggtcactgaatccaatttccattacaggattggtcttgatttgatcaatgggaaaccacaagacaacaagcaagcaggggtgtttgagcgaagagcctgaagttcaaaccagaagccacatccccattccttgaatggatcatattgggggccgtgcataacggtgcatgtctttaattcaagtactcaggaggcacagaaaggtggatctctgggaattgaagccaagctcatctacaaaacgatttt

SEQ ID NO: 372 - DNA, 487 bp, Rattus norvegicus
  Genbank Accession No. AA859981
tttttttttttttttttaaagttctgatttattgcattctgtatcaccacgggcaggggagggcctgagagctcgttctaaagctttattacctgagatttgcattccgaacaaccaggatgggtgactaacacacctcacaagatttgggtttggctctgatgaaagaccatgtaccgacctggaaaggggctacccgagattagagaggatcagctaagcaccgaggtccggggacagctatggtagactatcccggaactcaagcccccggacagctctttcccagggagctgctcatgtcagccttagagctctgtacggctcacttctcatcgtcccggccgtagttaatggtttgtagggcctgagctatgagcactgccatctctctggtgccagcagccaccactctgcacgacatgaggtcaaggggtccacctgaggtgtcaatcacaatgccacctgcttctctgatgatgactgt

SEQ ID NO: 373 - DNA, 607 bp, Rattus norvegicus
  Genbank Accession No. AA860015
  misc_feature (1)..(607): n = a or c or g or t
tttttttttttttttttgcatttcattttttattaccaatcaaaaataaattccatatattgtttagcaaatattataattgttttgtgacaaaagacacaagagtcataacaacaaaactccccgagagtcaaactcataacaatgccaaaataaatcacaaaaatatacagattaaaatcttaatgcaaaataaataggagtcatctgctatggcggctgtgacttgcctacccacttggacgccgtctgtggagtcctcccctgctgggaagacacgcagaccaggccagttccagggtatggctctgcccaggaaccagaggttggaagaagtgaaaaattgcactatgaggaggaagtcatcagaacagtaatatttggaaataattatgaccctctgcaagaagtgattctaagtgaggaagggaggggcggggcccggctgtcggtgactgtgtatgcacagaggtanctgtggaagtgtgtgcacctgctacgtttgcctcacacccaccacagggttttgctctacctggcacttaggtctcacagtaacacagctatgcacctcatctacagactcaggagcatgccgcacctacag

SEQ ID NO: 374 - DNA, 442 bp, Rattus norvegicus
  Genbank Accession No. AA860030
tttttttttttttttttgacattccacaaagaaatatttattgagcgcctgccacgtgccaggcaccgtttaccccccaatgagaaaacaaaacggaacaaaaacaggacagaggcagcagaaagaaacaaagggcagttggaaaaaagctaagggaactaagcgcttgaagagctcctggatggccgtgctgtttccgatgaaggtgactgccatcttgaggcctcgcggtgggatgtcacagacagccgtcttgacgttgttggggatccattccacgaagtagctgctattcttattctgcacgttgagcatttgctcatctacctccttcatggacatccgtccacggaagacagccgcaaccgtgaggtaccggccgtggcgtgggtcacaggcggccatcatgttcttggcgtcgaagacctgctgggtgagttca

SEQ ID NO: 375 - DNA, 459 bp, Rattus norvegicus
  Genbank Accession No. AA860044
tttttttttttttttttggaggttgcgtaactttattgtgtagacataaatattttgtttaaatattaaacattaaaccttttcctgacatccagacagaaatagggagagcaggaacaacaggcaagagaagaaacagtccactgaacagacgtgtgactcctatgccatccacaggagggatttcagcatgggttcaaaatgccaagaagctaagtttctaaaaaattcacctctactcagcataaacctctttactgttttcccctacacagaggagaagaaacccagaaactgaaaactgaaccgaggtgatctgctgcagacctcttaccactctacagccctcattacacatcctgccatgctgaagagctcttcctgagaaattaaaaactttaaccctggttattcccaaagaacaccttgagcctggttcggtactaaagggtcaagatt

SEQ ID NO: 376 - DNA, 533 bp, Rattus norvegicus
  Genbank Accession No. AA860062
  misc_feature (1)..(533): n = a or c or g or t
tttttttttttttttctgagagccacagaagtcctgctaacacctggacaaggagcctggtgtagcctcctacaccacacagcttcgccaaagccacgaagagaaaggcatctactcacgtgcccaggaagacatccttggcctcagcatagttcttacacacttccttatcctcaacaaagtcagcagctattgagggcagatcggcaggaatgttgtcatgttctgtctcagcgagacactgggatttctgcagcactggcttatcacagcaagcctgcagtttgctggagatagtggcctggttctcacacatgtacttggcaagttctgcctgtgagaatggaaggcaaaggtttcagagaaattctcttggctacattttatccccgcaccactgttgggctgggatagcctatccatcctgctctgagccattcgcaaccaaagtggcttctagaaacacactctcagccacgaagtgcttcagtactatgaccagaacattccaatgggattcgaganagactgtt

SEQ ID NO: 377 - DNA, 503 bp, Rattus norvegicus
  Genbank Accession No. AA866234
ttttttttttttttattcacggaacagttttatttgccaacctctcttggcgggccactcactccttgtgagcaggattagaaatgtccataggtgtactctggttggatgcagcttgtgtccacaagtgggaatgctgaccagggcagctttaagctcaacaacctgagcagaagtccagactcagctccatttgatgttcttgtcctcctcggtcatggctggtacatcagtgacaaggcctgtgccaatggtcttgttgccatccctcaaagtgaaacgttggcctttctctaagatcatgggctgccgcaagattaggctaagcttcaagtcctctccaggcatggcaagttccttccctggaggcaagatgactcgacaggccatgtcccaggtcagggagaacatgacgggcatgaaatgagatacaaagggtttgtggcggccaccctcctccttgctgaggatataaacctgggcctccaccttctggtggggtt

SEQ ID NO: 378 - DNA, 477 bp, Rattus norvegicus
  Genbank Accession No. AA866237
tttttttttttttttatattctttctattttttattaagtgcggcacagagaaaagaagtcaaatgttcaaagaaatttgtgttccttaaggtgttggttttacaccaacagaagagatgagtcctgagtcttcatgtcattttttctcagggtagcctgagatggttgtgatgtgtttaggctaaagcttctttgcttccagcaacaaggtttggaccctcagtggcgaagcagttatccttgtcggcagccttgcaacacttgtccacgaattgtgcgaagtcacccatcaccgtcttcagctgatcatctgtggccttgggcttgtgtttcaccagctcagcgagagccgtttgcttctttatctgcttctccttgtcagggagtgtgcagatatcagagtggaaggtgaaggtctcagctttaaactctttggggacatatgtcccgtcaactgtcagagcatacaaacatgg

SEQ ID NO: 379 - DNA, 574 bp, Rattus norvegicus
  Genbank Accession No. AA866248
tttttttttttttttttactctttaaaaaagtttattttttaaaattgtgtgtgttgggtggaggaatgtaacagaatctgagagcaggtgcataaggaagccatggggtcaaatcccgggttaaaggttatttattgtgaggcagtctacatggatgctgggagccaaactcagggcatctgcaggagagccatactggttcttgaaccacagacacattgctccagttccataattacatatttacccaacaatgactatatagaaagcgagatgtaatttagcagcgttgtgccaagatcccctccccagcaaatacagggtctcaatacacaattcaggctggccttgaatttagtgatcctctagagtgctcaggctacagggacatatcactacatagagccagaaaataaactgaattgttttctctgatgtgaaatcattttgcttgatttttttttttttaaatccaaactaggaatatgtaacttttctcctacaaattaaattgctttattacaaattgcactctctgattttcttatcagcctgctttaaggatatccacgt

SEQ ID NO: 380 - DNA, 493 bp, Rattus norvegicus
  Genbank Accession No. AA866276
tttttttttttttttttcatctttatattgagattttttctcttaaaaaaaagaacattatagatgtgaggggtgggaaaggatgactgacagcaggtgctatagaaacccaaagctccagaaaattaaaaaaaaataaaatatatatttatacatttatatatatatatataccaagtaatgcatgtgagtcccagagaagcagaaagcagcagcaagaagcaactagcacacaaggacctgggttcatgtacagcacacacaagccattccaatcctgataacccaccccaagcccagcccccacccccaagaaaagatgtttaagaaacttccctcttaaatggggctgcacaactggggtactgtggcacatctgtaatctcagcacctggacggtggagacgttaagataagggttcaatggaagccttagcgacacaattaagtttgagaccagcttgggctacattaagaacatctccaaagctat

SEQ ID NO: 381 - DNA, 405 bp, Rattus norvegicus
  Genbank Accession No. AA866302
tttttttttttttttctgggaaggcatctttactcgaaacggatcaggagaagccttgccgtagagggggcgtggccatggtgtgggtggagccctgaggtccagcctttcagccagttggagctgattgacttgtccagcgccttgcgcggtctgggtgtgggtggagcttacattccagacctcacaccgttggtctccaggtcagtgaggttaccccgtagggcttgctcctcttcgaaagctttgaacagagagttgaagttacctgctccaaagccctgtggcgatagaaggcaagtatgagctggaaacttagcaagcagttggtgctacctgttgggtgcaggctgtacctggtggttgtggcgttggatgacttccaagaagagcgtgggccggtcc

SEQ ID NO: 382 - DNA, 398 bp, Rattus norvegicus
  Genbank Accession No. AA866371
  misc_feature (1)..(398): n = a or c or g or t
tttttttttttttttttgagagaattatttctaattataattttctgtataaaaacgtccatcagacagaagtcaaagggtgaggtggttatcaggaacagggcgggtggctccagcagccctctgaccctctctcgtgcagtccttgcttagagtcccaggcgatccacaggtccagggtgaacaatgagggtcagaggtggaaggctcagcangagagtagaggagcatcagcagaggtcgagagaaggccagagtccatggtcaggctgtcctaggcagcaactccacagccctcaccagccttctgtttctttatgggaggacccccagcttcagggacactggagctgctgggcggaggggcgtttggaggtgagaggacaccggatgtcatc

SEQ ID NO: 383 - DNA, 462 bp, Rattus norvegicus
  Genbank Accession No. AA866383
tttttttttttttttttaaaaatagtttatttatttttaaaaccattaaggcaaaactgtaccctgaaattaactctttacattcctcagcttacagtaggatgttccaaacatacaggttcccataaattcaggatataaatcaatgcatacagtcagttcggtctcctacggagaaaacgaagactcgattttttttttttaaattaagattaagttatagccattttctaattgcccggaaccaatcagctcatgtgactagaaaattctatttgcccttctgtgttcaccctgattcctgatgtcctggcgagccctgtatccacaacaagctgggggttggggtgtgtgtgtgaggatgctggtaccggctcgacaagtcttattcaggcctgttagtatcacaggggtgaagggctgcaagctcccaggtctgataggatggcaccaaggacatta

SEQ ID NO: 384 - DNA, 543 bp, Rattus norvegicus
  Genbank Accession No. AA866414
  misc_feature (1)..(543): n = a or c or g or t
cggccgcaaaggttttttttatttttttttaaaaaatatattgctttgtcaaaaataaaaatagttgtttatccatattttgaacaagctactgtctcctactccaatgggtcaaaacttgggtttcgctcccccaagactcagtttagctggggttggacacagcaagtctctcatgagggctgagtgtgtgggcaaaaccaaggcacggaagaagcactcagaaaatacacagttaataaattacaaccctcccatcctcccgctatccccatccatgtccagagcagacttatgtattggcctcaccccgcaaaagaagcttgaaccagcccctctgtgtccactaggtctagggcctttagtagatggctatggaatgtatgaatgaatgaatgaatgaatgaatgaatgaacacctggtgagagagagcaagtacttaggaatacgagcctcagtcnctcacctgtatcttactctcatcagaatatctctctagatgcagagaagggagacttggggtgggggtgggacagaaaatg

SEQ ID NO: 385 - DNA, 265 bp, Rattus norvegicus
  Genbank Accession No. AA866439
ttttttttattttttttagatgacatactttatttccagtctacaaccattaaaaacactttgtaagtttacactgttcagttctcatatctgaaataagacacagggcaaagacagctggtggactagatgccgtcctaccacccaatatgtcctgagaaggagcctttaaagatagaaaggcggacgggggtagtggaatgcagaggagtacgataccccagccgtatggagatgtgtctaaattttgcacagggacccttag

SEQ ID NO: 386 - DNA, 534 bp, Rattus norvegicus
  Genbank Accession No. AA866454
  misc_feature (1)..(534): n = a or c or g or t
tttttttttttttttttcccagtgtgtgtcctttattctccccagaagccatgttgactcccttctgcaggctgatggaaggaagggcgctgcccttcatgtggactgtgctgtggacggatctgactgagaggagccccagtaccaagcagaatggagttgagaagccagggcgctcactaacagagcaggggacaagtggcctccttagaaggtgtgcatgttctgggtgttctgaggtaacaggcctgtccacatggcctgcatgtccattgatggcctcccaggctgctagtagaagtgaggctgttgctggcacgacgttactgcaagcagcaacagagttcgcgtatccacaaagctgagcatgtctaccacttagacatgcagactccttgtgtcgcagagcccctgggtcaccagcggaggtatcacctgncgggcgcaggcatgcgatcgtgaccgttccctccaacttagtcgaaacctcccgctgccgtggtgctaaaaaaaaaaaaaaaaaccctcgtgccg

SEQ ID NO: 387 - DNA, 523 bp, Rattus norvegicus
  Genbank Accession No. AA866459
cggaagcccaggtttttttttaattttttttacttttctataaggatcatatcattaaagccctagaggctacttttggctttaccttaggaatgactcttgatttgttttcttttgatacagaagcaaactttgttttttaaaagtgcctgagggagaagctatactgtacccccaccaggtaatgcactaagtgaacagcatactctaatacccctcaactatcttctgggcaatttatatagtaaaacgtgtaataaaaaaaagtcatggttatcaaatacaggcaatattacctcccctcatttaatctcacttcaaagtgctaactgtaaactaaggactggtttctgatgagggtgataactgcttggttaccagtgcattgtgttaccactttaaccacattccctttaaaagttaaaaaccaaagacctgtagtgaattttcttgactctctgcttcgtcctttaccctgcctcagtcagctcccactgccagcaatgggttaaccatcacagcc

SEQ ID NO: 388 - DNA, 551 bp, Rattus norvegicus
  Genbank Accession No. AA866460
tttttttttttttttttgtttttaaaaagaattgtttatttactgaacttggggcatattagatacacaaccgattttaaatttacatcttttaattcaattctgaagtgttttcacacatacacacacaaaaaaattggcatgcaacagctgccctagggtgacagagtcaccaaccaactgttgcaagatatcatcgaaggttgaaaaattatttgtcctgaacatgaaaacctgtaacaaatttaaattaaatttataaaacttacttgtagttttccccttgcaagatccaaaaataaaaataaaatatccaggtaactaacagacattagtcaccacataatcctggaccgcccacacccaaagcagagtgcctttcattaagcccatcatcagagagacagtctcttcatcttttataaacaaaactgacatgtgccaaaaaagaaagaccccagaggacaaataaaccctattgctgacactgaagaccagggcacgaaggccactgactaaaaagacaacagtggctgccatcactgcaagca

SEQ ID NO: 389 - DNA, 505 bp, Rattus norvegicus
  Genbank Accession No. AA866477
tttttttttttttttttgaaggtttcaaaggtactttatttctttattttttttcttcaatatgccatgttttaatgagtacatgattctttgacttggcattcatttatgagttggttttttgaaacaattccttgattattgtatcagctggcatgactactgatctctccattcctttggggtgactctgccaacaggggacaggttccattctattccaatttgtgtggctgtatatgtccatgcagaaatacagaagatgcttccacctgctaatacagcatttccatatttgtcatggaaagtaggtgtcttcttctgatggctctgccttgccaccacttgctgaatgcttcgaacttggagacgacttagtgcgtttttggccaagggcaacatcgcggagacaaggatggaactgcggtgactacagctgctacctgggtgcaaattcaccccagctacccttgcagagtcctgaaaaacaaataaaaaaaacctc

SEQ ID NO: 390 - DNA, 483 bp, Rattus norvegicus
  Genbank Accession No. AA874784
aatttttttagatgttcaggcctgtgaggctgagatttattgaaaagtttaaatgtgaacctttacaatgttaccaagtcatatcgtcctgccttccttaggagtcgacacaaagcgatatccctgaatctgtggtgactacgtcagaaaacttatccactgtccagctgacggcagccgtcgcccacgagcccggtgaacagtcgagggcttccccatatgcaggcgcagagcaggctcactaaaacattgtgcacataaacactgattctccaagcgaaattcctgagccgagctctgtctgaaaacatccgcttcatctctggggaaaggaactgggatgcttgtcaccggcagccagccctgcttctcagatcagaggcactgtcgctgtcactacagccacattcacttggggcaaattagtggtttgtccctccacagaacgttctccacagaaaagggatccgactacacatgcgg

SEQ ID NO: 391 - DNA, 499 bp, Rattus norvegicus
  Genbank Accession No. AA874797
tttttttttttttttttcaccactcacattttattgagaccagagggaaaggggtgctggctgttgtgaaggagtgtgcccaataggtaaggggaccagtcaggcatgctccatctggctctaccttgaaaagggcctgaggcataggcactggtcctccctggaagctcctagcagagctatgtgcgggcctctctgaacaaacagggagtggttgctgtaattcccacagtgcccacccaagagtgagatggtcatctgtggcgaggaggcaacaaagccctggctcctcttcaagtgtcctgcccagcctgtcaggtttctggaagactggtgctcctctttggagattgtaaaggacccttgctggaccactgcagctggtctcaggcaagactgggtatcctaaattatggagcagtctgtcatctgccatattgttagtctgagaaaggatggtggtctctgtcctgataaagacaggcatcgtccacacatt

SEQ ID NO: 392 - DNA, 553 bp, Rattus norvegicus
  Genbank Accession No. AA874802
tttttttttttttttttccattccagttttattttaaagttttaaaattacaaccacagtaattttttcccggcactagttacacttgtttaaaaagtggggtagggtacccgagtttcctactttattaaaataagaggacaactgtacagagtttttctcccagctcccgaggtgagactaagtactagtcttagatatggatatatacatatacacacatgcacacaatcccgcttctctaaagctacctagcaaattcgaatccacgggagtatatcccacagtccactccctgcctctccccctcctcggctacttagaaaagactcaaaagcttggaggggttttaagtggcagaagagaaaaagaaatcaggtcccccaacttaccaccattggtagggcagcccagggagtttatcctcttctcccccacaaccccccttggccaggtagatggggtatcacctgctcatcaaaggttctgaaacgctcactagggacaagcaacctagttcctgggtcctcacctacccagaactttgccagtt

SEQ ID NO: 393 - DNA, 462 bp, Rattus norvegicus
  Genbank Accession No. AA874813
tttttttttttttttttgagccaaaattttatttattcatttcttgcatttgaagtactcctcgatgacatccttggcctgagattctttgccatagtccttaactacaacgcaactgcaaacttgcaagaagggaggcgagtcccttgtcatcacaatgccagacaccaacctcactaccacatcggacaccctagttcacataccgtcccctgagctcttactttgctctggctggcaagggtctccagctttccctataagctggttgagtctaaagcccagggtgtgtgagcctggccaccaagcacaactgaaagactctgcaagtgggaaaaagtgctaaagctgagggccaaatgcaagacacaagttcttcagtaccctgaacttttctggggagtccagtcacccccaacattctctctctgtaggtgtactcgggctgaaaggagtgcctgc

SEQ ID NO: 394 - DNA, 504 bp, Rattus norvegicus
  Genbank Accession No. AA874889
tttttttttttttttttatagactaggaaatataatttatttcataaaaattaattttgttacaagaggaatgctaaaggttatttacaagttgtttacagaatgaacgggtggggctgggactatccccagtggatcagaacccacagacacacagccatgttcacagcctgacatccaagctcccacacacccgacctctactagagtcccagaggagtgtgggaacctaaggggcctcgtggagcatcccaggataaaaggacacttaagcccagagaaagcggttatgtgcctgaagtcacacagcatagctacaacttggttcccgggcttcccatttctatgtgcgggctaacagtgaccagcaagagtatgcccacggggatgagcatctttggcaggaggagctgaggacactctatgaggcaccattcacctagatgccaggagcacctcggtctcagtcttagagtcccacttcaggagccactgcggaaaccc

SEQ ID NO: 395 - DNA, 492 bp, Rattus norvegicus
  Genbank Accession No. AA874927
tttttttttttttttttagcaatataacatcaattttattttaaaaaacaaaacccaatccacctgacctgtctgtccctcaagggacctaatagagacctcaggaagggctagctctggccaagcaggggtaggttgtcaggtgtcaaagaagacactgtgctcatggactctgctccctctctcagcccttgtcttttgctcctgacaagaggaacaactgatctgtggtcctacgagctctgctgtacttgaggaagacagcacgcccatcctcctggtctctttgctcccccttcaacggatactatccttctctccgccaccctgagcagatggtgaggactaaagtggtggccggggacaccaagtgtctacggagcccacagggctcagaccgtctgccccagtgacctctagtcactaccatcgggcaggatgcctgtggtgccaggcactgactgaattcctctctcacgccagccacactaa

SEQ ID NO: 396 - DNA, 443 bp, Rattus norvegicus
  Genbank Accession No. AA874941
tttttttttttttgtattgaaattaacctgattagattagaaaagcagctagtttgaacaaaggtcctcattatggtcattcacagctcacttatggtcgtgcccccgctggccctgacacatgagttcttcttacccggctggtatgtggagtgtgttagttttgtgaggacctcaccagaaccttaaagctcaggtgcgcttacagtcttgtccatggcctttgtgttcttattggctgtaaacgtctgtctgttccgaataaagatttgttcatgcggcctctgctctgaatgggcatctgctcctgtgtggtccgagcaggcttcatcactgtttccctcaaggcatgttcttgtgtggcttgaatttagtttttttccatgtgaagaaatatcacctttggacccaataaaattcataacagggtaaacctcgtgccg

SEQ ID NO: 397 - DNA, 516 bp, Rattus norvegicus
  Genbank Accession No. AA874999
tttttttttttttttttataaagcaattccaaagtttattgccatagaaaaaactgatttctcaaagtcaattcttattctctgtaaaataatacacatgaacagaaatcactatacttttggtccaagatatgttgggtttttccttcttcttcagatgatggatagatgcagccaaaatctatgaacgcgtgtacttgccccaaatgtgcagcataaacacagaagcgatgaacagaagactcatcaccagtactgggacagggccaactttgagccctggggaatcttctgtgtagaatcgccacatccccccagtccctgcagaggtggtgcggcctgcactccgggttccgcagctggcattttttctctgccggacagtggatcccgccgcccgtgcggccactgctttgctaggagaacgcccagaggagcccacgttggtggcactaggcgttggacccggcatgctgatgtctaagaacagtaggcacaagagatatgaagatgaaa

SEQ ID NO: 398 - DNA, 580 bp, Rattus norvegicus
  Genbank Accession No. AA875032
tttttttttttttttttctgatcttaattcattttattctacaaaatgctactcagtggaaagtaggaaagccaacaagacaacaagaacataaaacgagaacaaaccccgagggaaaataagttttaatatgttcttccctccatagcagcaagctctaaacagctttccttagtgcaaatactgtaggcttgtgtcacacacagtacacagaacaacgcaacacacaccaccacagatgcttctgagcagagatactcctcaaaaatttaaaactatacaaagattttttgagcacgtggtcctgcctggagaattcgactagagagaccctcctaggaccatttcaccattactgtaaaaacgggacaaaaggtccccagaaaggaaattagaattccccatggagccataaaaccttgtacaactcgtttgcctccagggtctaatagcaaatttcactgcacgtcattgacatatcccaaatacggatgcataaagcttgagtttctacgatataccaaaatacgatatatatacaactcccactgcaaaagaaaccctgatacctagtctttat

SEQ ID NO: 399 - DNA, 459 bp, Rattus norvegicus
  Genbank Accession No. AA875042
tttttttttttttttttccaagagaatgtcaaaatgctttgctgcctaaaaggacattgaaggaacaagcatcagccaggtcctgacgtcccaagttgggcagcttttcagtcctcgagtctgactgtgtccggggtttgagggacgtgcagtcatacagagaatcatcatggcgagtgaatggaagcaacatcaggcgtcactgggcgcagtcacacagtggattcctaacattcagtgcagccgcccgccatacttcatttacaaggctttttaccctctcctggctgagtggagaagtatccagtgacccagttcttcacggtgtggaggaagcgtggaacttaacaaacgcaatggccgccagctccttgcagaactcctctaacacaatcacaccctccagcagcgtgatgtggtcaacgatggggccttcgggctccaagccaagcagtcgct

SEQ ID NO: 400 - DNA, 549 bp, Rattus norvegicus
  Genbank Accession No. AA875047
tttttttttttttttacaagagtgcagaagagagagagaaactagtaaaggctgaaagaaaattcattgaagatagagttaaaaaaatcgtagaactgaagaagaaagtctgtggtgattcagataaaggatttgtcgttattaatcaaaaggggattgaccccttctctttagatgccctcgcgaaagaaggcatcgtagctctgcgcagagccaagaggagaaacatggagaggctgactcttgcttgtggtgggatagctctgaactcctttgatgacctgaatcctgactgtttgggacatgcagggcttgtctatgagtatacattgggtgaggagaagttcacctttattgagaaatgtaacaatccccgttctgtcactttactggttaaaggaccaaacaagcacacgctgactcagattaaggatgcaatcagagatggcttgagggctgtcaaaaatgctattgatgatggctgtgttgtcccgggtgcaggtgcagttgaagtggcactggcagaggctctgattaaatacaagccca

SEQ ID NO: 401 - DNA, 547 bp, Rattus norvegicus
  Genbank Accession No. AA875050
tttttttttttttttttccaagaaacaaacattttaatgcagaaaaccatgataatctacaaatgaatcacagtggaggcctataccggaccccctcaggaactgtaaggactgggacgtggacactgaactgacaacaccgtcagcatctggacatgcccaggcagctgtgctggcctcacggcacctaggccttgcccccttgccttccaccattcattccccaatgggaagaccagaagttaagttcagaatagaagggggagaggtggaggatgctgctggctctggtacctgccccatgactcaaggccaggcctactcccaggtctctgtccctctcctctgcagggacctagcaggaacacgaggaggggacctagggaaggggtggctggatggcatctggcttggagaagttggcagcctcagataaggcagctgctggaggaactgtcaggtgcagctgggacctctccccccaagatgacagctgaattggcttcctgctggcttggagctcagcacctctcactggggcatacat

SEQ ID NO: 402 - DNA, 335 bp, Rattus norvegicus
  Genbank Accession No. AA875097
tttttttttttttttttggggaaaaaatgtaaaactttatttttttttcaaagcagtaacgcatctcagctgtgttcagctacagtacaaagaacaatggaatagcaccagggaatttctaaaaagttcacaagatccgtgacaccttcctcttctgatcattcttctcggctaaccaagcaaagaaagcagagcccccactttccattccttcagctactgtcccaccagcggtctgattttcatccgaacggccctcagagaataatccgctcctctgaagggaacccagaccactccgttctctatctcatagggactgttgttcctggggt

SEQ ID NO: 403 - DNA, 511 bp, Rattus norvegicus
  Genbank Accession No. AA875098
tttttttttttttttttcgttagaaagcactatttatttcttcttactcttgtttcgtttctcttctttcagcttctttttggagactctgggtgtgctggcctttttgtataggtgatacccaatcaggcccaggagtgctggcaccatggccatgcctaccagaggcaaaatgcccttcagcagcttttgccagtagttggctcgaatcaaggcgatcagctccacatcatactgcaccactgcatcggctgggatagatggtgggtaccctctctttccataagccaagtgagaaggaatgactgctcttcgcttctcccctacacacatgtccagaaggctctgctccagacctgggatcacctgcttttggccaagttctatgaccagaggatctctggtcagagaagtgtcaataatgcgtccatctgccaagctgcccgtgtagtgtatgtggagcgtgtctccaaaggcagcggattccgtgcacgattcagggggctgcacc

SEQ ID NO: 404 - DNA, 465 bp, Rattus norvegicus
  Genbank Accession No. AA875099
tttttttttttttttttcgacacactgaaaggatttattggccttaatcttcctcacaaaagtttcaagttacctagaagttctcagaatgtcacagtacaaagaggaaagaatgtgactaagtttaggggcaaagggaagcagcaacatggtgacgtgccctggtcagcctcagtgctcagacgtcctttttctgcagtaaaatcttgtgcaactcatcagcatcctcgctcgtcttcacccgaatcagcatggtgaccgggagagtgggctgcttctcatcaagtggggggttggggacacagacgataaggacattgttcttccctgtccgggtgcacggcatattgggtgggatcagaacattcagcagaatgttgcctaggttggtgtctgcccgcaccaagagctgggtcttctgagttgctgtgggttttaaatgcagggtccccacacccttctctt

SEQ ID NO: 405 - DNA, 559 bp, Rattus norvegicus
  Genbank Accession No. AA875107
tttttttttttttttttgtaggattattagttttcacatttctattggagggcaacagggaagggacggattccatcaacagaagcattcacaggttcttgagccattccaagcttggacccagaggttcctgtgggtggctgggcacatcaggcatgttcccattatctctcacaggcactgggtagttgtagggtgtggccttgttgatcatgctagcatactgggtgtaggggctaatcatgggcataattatagcgaggccccagacagtgaaggacaccaccagcaccggctcctttgcccaggcattcttaaggaaggcggagattcctagaggtgagaaaaaagtcgcccttggggactgctgcggtgacctctaacactctcgtatcaccctgctctgcaccctattggctgctgcgcccctcttctgggacggatcctaccactccccaaggctctactgagcctcagccacgggtcaagccacggtttcctggaattacatggtccccgcgcgcccagaacgcgtacttactagccctcgtgccgaatt

SEQ ID NO: 406 - DNA, 569 bp, Rattus norvegicus
  Genbank Accession No. AA875126
tttttttttttttttttatatataaaatcacatttatttgagactgggactttcgaagcccagtctggcctgatctagtgtccagaagcactgattagcagatgtgttttcctctagctggctacaatggctgcggttcattctattcagatgtcagacaataggcacagctgggttccttattcaaaatctgaaggagtctgggaggaggacaaacacatagatagaatcaagcttaggccaggaaccagaaactacggattgctttgttaaaggccaaggaggcttcaaaagcgaacacagctggagtctcatttcagtctccattttcgcaccacttcagtggaagttccatgaaacagcccgatggttctgaagtgccatcaagtcacttcgagctccagcaacttaggtttccaggacatcttctagaagaactcgatcatcccttccacgttatggggccactcacctggcctcgatgcccacctggactcgaagtagccctgcaccgcgcctgtaccctgatgacgacggatgcagaaaaggtgagggccgccctcgtgccg

SEQ ID NO: 407 - DNA, 598 bp, Rattus norvegicus
  Genbank Accession No. AA875135
tttttttttttttttttatgacaaaatcaaatatattcaaatggtttctcttacggccagttttaccaagatatcaagagaagataaacaactttcaaaattagtatcaaaacaggacactttaaatctacccacatgtacagaggtataatctttgttcttttcaaagctgagcacagtgaggttggatgagacgtttacttattaacacctgaaaccacaggacttgctgagttctgccctatgacatgtgaactgtcagcatggtaatcaggggaccctccggattcagacctcattaatactgttaacgacagctgtgatagttcatatattaatctttttactcagtaataattttgtttttatgtacaagtacacaggtatgatattatttgagtctaaaatagttaaaaaccaaaaaaaaaaaaaaaccaaccaaacaaacaaaaaaaaccaaaccccaaatccctcatattttgtaaatgtggtagtttcatgctttcttatgtcatgtcaatacctgactacactaagacaactttaacagtggagtaaatgctttaaacatctaattaagaataaattctagccaata

SEQ ID NO: 408 - DNA, 537 bp, Rattus norvegicus
  Genbank Accession No. AA875142
tttttttttttttttttccagtgccacccacctttattcacagaccctcggtctccaaagctacatagacacttggattcaagagggcacgagaaaagggggtcttggtgatcctcccagtacaccccagaaagccaggacacgcctggcagcaccactccttcagggtcagccttagtgccctgtccaagagcactgctgtgaccacagggctgcaggtaccaggacaaaaggcctagttgctctcagagagccagtactgtcctaggcccagagctgattcgactctgaaactggggcaaggaagggtcaggatggacagtggggatggaagggggagctccccaaatgtccagggcagaagaacagcaagtctccatggagagagccacactggatgcaggtgggactgcacatgtcctactttctggtcacttcaaggttccacagccgaagaaacagaggtccccttttttccttcctgaccttaagtagccaggaaggagagtggcgaggcatggcaggtaacagcagaga

SEQ ID NO: 409 - DNA, 503 bp, Rattus norvegicus
  Genbank Accession No. AA875146
tttttttttttttttttgataggcattaacgttttatatttttaagtgaccaaatctaataaaatgaaaaacaaaacaaaacaaaacaaacaaaacaggtttactaaacaggttcaaaagacaacacaggagataagcagtaaaaccaaagcgtgagtggcactgtccatgtcaacctccaatctcctccagatcacattttggtttttgctttctgtttaaggtttttaaaaagtgaagcccaggagtccggcaggccaccctgtgctcagcagcatgtccgtctcgcctgcatcaagctctggcccctgtgtccctcagcagcaactgcaggttgtggcttgtgaacctcactcctgtgctatgcttctcagcacgtatttgaccgtgtaggcaaaggccgcaaacccaactataacaaacaagttcgccaaaacgccgcccaggagtccatgatgcctgttggcctgtgggagcccagcaaggtttgggccagcagcagg

SEQ ID NO: 410 - DNA, 517 bp, Rattus norvegicus
  Genbank Accession No. AA875148
  misc_feature (1)..(517): n = a or c or g or t
tttttttttttttttttaggattttgactgtaaatgttttaatagaaatacacaatctttcactttctcagacagcaacagagggggtcctaacagcaactagaacatggggttttgcacagggatacagcatagctgactgcaaagctgaactgctaggtttgccccacagtcagtggaaggagcgccagaaggtgacacaaaaaccgttgacagaagctgcagacctggaaaatacttgggtgagatgaggtgtgtcaaagcagccagtttagtgctaatccactctgggctcatttcaaccacacaagatgggagcgtccaccctcgagctctttttttctcatgtcacttcaccacttggttacatggaatgtggtgaagagactcaagacctcttgtggtggccctaagatgtgtattctgaaccagttcctctttggggggctccctgcangaatcctggtgatttgcaagctcaggttcctactacatacagtttttaccaaaaacaaaa

SEQ ID NO: 411 - DNA, 559 bp, Rattus norvegicus
  Genbank Accession No. AA875205
tttttttttttttttttcacacagggttgcttttatttccacatccaacttgagcagaggccctgccacaacctgaacagctgtgaggtgctgggtgcctccagagtttctggcacagtaagtgttgggtgtgcagacttcctgatggccacatgacactggcccacacaggaacagcaagtccatgaatggaaatcccactgagctggaagtggaggctctggaaaccccatgggcagcagcaggagttaaaggagccaccaggaacactgcagtgaggctccaatgcagacagggctgataaaaacccaaacagggcattgtgagagcagaggctcgagtgtccccgctgaggacccggggctgaaggcacagagctgtgtcgggatggaagaaccctgggtgcactcgcagtccagagcacgaaagcacaggtgagaacccagcccgaggctctctgtgaagagtgtggccttggatcttgggcacggcacagtgacacacagtgctgaggtcaatcctgacttcccagaggaatgacctcttcagtgacaaaaaa

SEQ ID NO: 412 - DNA, 527 bp, Rattus norvegicus
  Genbank Accession No. AA875206
tttttttttttttttttctgctttttaatgcctttattctacataaattactaccagagggctatgtttaaaaagcaagttagttggacagatgcaggacaaaaatgtgttcacccaattagaaaaggtgatgtttaaaagattacaacaaatgccaagtgtttgacgcatgcagcggccttaaccagagacatcgattcccactgttccaaagacacagaaacccgcacatcttactgcactccacctccagagacttcctattggtttcctttacaacagcacagaatcccaatgaaataaagcaggttattttaaagatttaagagccgttatcaaaaataaattacattttttcaggatacagaaatgctgctatgacggctgggaacccagcaacctttcaatggccgcattgatgtcgccccctgttgctatcagtgcttgtaagtttgcttcacggttcaagaatcccattgcactgagctgttccagatgctgttgaaatctgacttctggactctgca

SEQ ID NO: 413 - DNA, 422 bp, Rattus norvegicus
  Genbank Accession No. AA875217
  misc_feature (1)..(422): n = a or c or g or t
tttttttttttttttttcattagaaaataaagtgtttattaagaaactatacactgaacactcctataagtccctgtggaaacacaatgccccattgtcatagcacaaagtgaagaaatgccagaataaaagatgctgtgatggatggagcccgagaggctggaaatgaggtcatgatttacaacaattaaaaacatcatcctcaagcttactccttaaagccacactcaggagtagatctgaacccgagggatcatctgggtgatgagatcactgagaggacaacatggagaccccatgcttccaagcaggaaagtgagactggaacacggctggacttcaggctttctcgtgatggttgggtcaagagaatggctantgtgtttaaaaggtanctcctggtgcttgggtttggattttct

SEQ ID NO: 414 - DNA, 438 bp, Rattus norvegicus
  Genbank Accession No. AA875225
tttttttttttttctttctacattttattatttcaaatcatgtgaacaattccataaaacatgtgaaaaaagcaaggaagtgttcaacgctggaggtcccgggcctggggcgaaggcgtgaggggcctgaccctcagcaggcagcggcggttcctagattagcgctaaggagctacatttaggttaatggagcctgggcccaaggcttcagggcagggccctcagtgacattggcagttgtctggaacagcccttgggatccaattccgtggagggcagggcatggggccgcccaaagagggatgggtgtaaacaggcagacacactcaaggcacggaatcactggaaaggggctgggggcggcgggagggatgctggtcaagacctgacagttttaaataggtttctccaaaaagttttctagatttgcaattttcc

SEQ ID NO: 415 - DNA, 483 bp, Rattus norvegicus
  Genbank Accession No. AA875233
  misc_feature (1)..(483): n = a or c or g or t
tttttttttttttttttctggttaacagaactttattaagtcacagaaactttagtgcaaaacaaaatctaggtccatttaactgcacatgcccatcctgctggctgtctcctcaccagaacgatccacgattcttacacccatgaggtgaacaagcagctcaacagagctacgggtacgaaaggcgtatgggaccccaaacagccaggcagagaccccatttccgggtctcacaaacaaaagatcaggcccacgactgtcacacggcacaggcaagttacattcagaagttccccctccccaccctaccccacagatccccaacaaggcanggaggatattcttgatggcctcagtggcggggaccagagtcctcattggcactctcttgacctcatcacagaagccaaccatcacacagatttccttgggttgcatgtgcatcatcatctggacggcgacctcagaatactggtcaacata

SEQ ID NO: 416 - DNA, 540 bp, Rattus norvegicus
  Genbank Accession No. AA875253
  misc_feature (1)..(540): n = a or c or g or t
tttttttttttttttttattaaaactgatttttatttcttttcatgtgcagtttttgtattgtgtggtgaactcctcaaacagccatttgggatccttctgtatcattttactagcatagacaagagttcatacaaacattactttgaatatccgtaacaacttgagcatgaatgttttggttggttggttggttggttttctgttttgttttgagacatagcctcaagctgcccaggccggcctcagactcaccacaaagctgaattcttggtcttcttgcctctgtctcctgagtcctaggattacaggcgtgtgccaccacactgtggtgtctgtctatgctcccagtgttggcatttccgatacagtctgatttaggacagttcctgacccacaagcctgactctgaaccctataacacctcactgtanggctggcaaagcaatctagcagaaccccaccttccttacagagttcctgcacaaagttcaggtcaatacagaaaacgcttctgatgaagcgttcctcgtgccgaatt

SEQ ID NO: 417 - DNA, 483 bp, Rattus norvegicus
  Genbank Accession No. AA875257
tttttttttttttttttaaaaaaaaaaaacaaaccaaaaacgatcctttaataaaattagcccattgaatctccccacttcttaaggttctaaacttgtaatagctgcaaaagttccagttcagaagccagaggctcagtccagacagggattcaccgacttgtgctggtatctgggtgtttgggttgtagtttgagttaagggagagggatagctaggcccggctcctctagtcttctgcggcaggtatacaattcttctgtccacaggccaataggcgttccctgaccctttccagtttatcttggaaaaattggcttcacgttataacatgccggcctacaaatgacgacagggtcaactggtttgagaggccagtaagggggacacagagtgaaacagtatgatccgcttctcaccaaagtccggcaatcaactcacttctgaaaggtccaagagagggctaagcaccaagctgaaaac

SEQ ID NO: 418 - DNA, 514 bp, Rattus norvegicus
  Genbank Accession No. AA875286
tttttttttttttttttgtgggttaaaaggctttattagggaaacatacaggggcaaggaccatccttgggagacctcaggacgctgtcctccaggttgctgggcaggtacagtccccaggagcccctgctcagaagcatctgacctgggaggcagtaggaggggtggcttctactagtgaaactgccccctgcccccccagtacttaagctgtggccctggcacccattccttgccagggatattggtaacaggaggcagtgactcatgcagcaggtctaaggccagggtcaccctgctgcttcccacaaacacaagtgccgctcaccagtctccactggggcctcgtctgggactgtgacctgcccagcctaggagtccactagccacccatccctcgctgctgctgctcctgctccaggcttcgctgcaggacctgctgctggttggcaatgacacgacggataccattgacaaagttgctctggtcatgcgggatgaggccaatgaagat

SEQ ID NO: 419 - DNA, 394 bp, Rattus norvegicus
  Genbank Accession No. AA875327
tttttttttttttttttgttatgtaaggttctcttttatttaaaagatcattcacaaaataccatatccatagactcactttctgtcatagaactgaatgtgttaagtgtttggaattccattcttacagagtcagctgggcgcccagcagtgtggatggacgtgcctgttctgtcttttccgcattggagatggattagatcatctgaaagcatcagctttgattacaaccacgcaatgcatgtctccaattctgtgtgctcatcccagctggatacctaccaacaggccaccacagccgcctagctagtggccccagctctttcccagaagccaaggggtggctggcaggaagctgctggctaacgagcaagctgcgcacctcagcccttct

SEQ ID NO: 420 - DNA, 427 bp, Rattus norvegicus
  Genbank Accession No. AA875390
tttttttttttttttttaagcttggcaaagtaatgacttttatttacaactgcatgtatcaagattacaatagaaacactagtattaccatctgaacaaaagcaatgatttattggtactggcaacaaataaaagattaacagtttccgaagagaatcaagcaattatccaggagctgcaaatctgactgcagtagtcttccagtgtcttttgtaccctaatggctttccccctttttgccaactacctagaaaaacaaaaataaaaagtacaattatgtataacttaatgattcagtttaaaatagatactaacgtagtaagttcaaaaagacttttgtccttttgtccttgtattaatttttaaccttgaatctttttcacatgcaatgtgattttattgtggcagcaaactgtaatatcccctt

SEQ ID NO: 421 - DNA, 497 bp, Rattus norvegicus
  Genbank Accession No. AA875431
tttttttttttttttttgagggtgacaaaaggtttattctgcattgtttacagagtcaagcaggggataaaactggcaaagactctcttgtgaacttcattctcatgacttgaagtcagtgggtggtaggccttcaggttgaagctctgggagacggataggtggaagggctcaaattgcaacaagtgagatgggcccaggcagtcacgggttcttctgaggggtgaggtagatgtgtcagccagctcgagcagagaagaagggcaaagatcggacataggagtctagccgggatcggaagagttcactttgcacagtttgtcccagcgggcacagaggattcttcacaacaaactccacatacagcgcactgtagatatggtgtagaacatctcggatagggcccacgcccaagtcagtattcatgacaaccttgattccagtgggagtctcgtagtaatggagtttgtaacggctagtttggaaagatagaaagc

SEQ ID NO: 422 - DNA, 437 bp, Rattus norvegicus
  Genbank Accession No. AA875470
  misc_feature (1)..(437): n = a or c or g or t
cggccgcagttgtaactttaatggttttcttaaggttggcaacctcactctcgatctgctgcttcaggcccagctgctgctccttgtgcaggttggcacggctgacttgctcttcaatgcctgacagcacaacctcacagcctacgcaccactcttgcagggtttgggcgatggcgctgaggtcctggcgctggatgtcccgtccaatgctgtagtcaacctctagccgctgattgcgctggtccagagatccacgaaggacatcggcatacacttgactttggcagccagagtgacaactgacagatgtcgaagcttgttcttctgagcctcagtaagtggggggaggttcctggcttcagctaagtagtcagcataggtcccatangcaaacactgtgagcagccggaacgtggaggcaaagtcgctgtctgcca

SEQ ID NO: 423 - DNA, 451 bp, Rattus norvegicus
  Genbank Accession No. AA875509
cggccgcgttctacgtcaggagccgctgtcgcttcgctcgacctcccgagcgaaatggtctctcaagtcccggccaccgggcctccgcgctccccatgaagggtcggaggccgcgcggggagtagcagcggtctgcaggcgagcggagacggacacaccggggacctctccgaccaccgtgcttctgctgcgcgcctccaggccaatgtgcaataccaacatgtctgtgtctaccgagggtgctgcaggcacctcacagattccagcgtcggaacaagagactctggttagaccaaaaccattgcttttgaagttgttaaagtctgttggagcacaaaaagatatttacactatgaaagagattatattttatattggacagtatattatgactaaaagattatatgatgagaagcagcagcacattgtgtattgctcaaatgatctccta

SEQ ID NO: 424 - DNA, 403 bp, Rattus norvegicus
  Genbank Accession No. AA875523
ttttcttttttttttttcaaagagcaagttttatttggtgaaggcaaacatcatccaaaagaaaccagacaggcaaggtgctgtgattagggagcctctggggccacacaggaatctcacactgggcaaggagcaggctcgagacacgtaaatgtcctcagccattcagcaccatccggacaagctccgccccatgggcccgtcaccccgacaggatatgcctcacaaatgcttcatagttaatgcaaccgttgctgtcctcatgccccgccactagcatctcgacttcttcctctgtcatcttctcccccagtgtgactaggacatgacggatttcagcacccatgacagtgccattcccttctttgtcaaacacacgaaggccttcaacataatcctcgta

SEQ ID NO: 425 - DNA, 519 bp, Rattus norvegicus
  Genbank Accession No. AA875552
tttttttttttttttttaacgtgtgccaggtgccactttaattgagtcctcaccacagtgaggaagggtggaagacagtgattgcttccaggctaagccccatcggccctgaggtaaccaacctcgctccccacagtagaaacatgccttccttcccctgagaatcccatgcctgagccaacacagggaaggatgtgcacagaaaaataagagaagctcatcaagggagccaggggcatttctgaaatttttccagtgcaaagactagttgacctggaggtgtccctcctaatggcaatgataaaccccaatcattcccagctgaggccaagcccttccccagggagcctgagaccagggttcatgccccagggctcctccctgcagtgctcccaggaaagatcagcagcctgcccagccatggagagagcccgctgagcagatgcgtcttcctctttgctggcccctactacggcaggtgtacagccataaaggaccaggcagtacaggtgtggctgt

SEQ ID NO: 426 - DNA, 406 bp, Rattus norvegicus
  Genbank Accession No. AA875594
ttttttttttttatttgaggtttatggcatacagtttaggtcaacacacatacagaagggggaagaggacatggaggtgtccgaagcaaagctgagtgacggaacacattcagtcagtaggtgtctatacaaagagtggtgggacatcaggaaaagctcccatggattcatgtgcacccatctggaggtaccagattcctccatggcagatccatgtgcagagctaagggaggaggccacttctgtcattccagttttagaagctccacatcaaaaacaagagtagcatgtggtgggatgatgcctggggagattatcagtttggctctctggcccacactcatctgggctaccccttcttcccagcctcggatcacctcctgcttgcctagtgtaaacttaaaag

SEQ ID NO: 427 - DNA, 404 bp, Rattus norvegicus
  Genbank Accession No. AA875620
tttttttttttttttttgcttttaaaagattttattacaagcaggaaaccatgcacttccattgcaagccattgtaagcagaaagacagatacacttcaggcaaggtaggcttttattacattggctaatgctcatgttcaagtgaggctctggttcagtctgggctgccacctgccatgcctgtgatgtgggacagccagcacccacggctttgcggcctttcacgctcggatagctggcaacaaggcagtagtaaaaaggagtccaacttgtcagttttgagtagcagctaaggccttcccagcacagaggacaaagggcttgttatacaatgagatgatcatgacattctagtcacttgtaggaactccaccttagtctgggtcctaagttagcccacatc

SEQ ID NO: 428 - DNA, 446 bp, Rattus norvegicus
  Genbank Accession No. AA891041
aaatagattcaataaaaagtcaaacacacacacaaacacatcttaaaatagactttagacacgaagtgcgtgtttcttctccacagtactgtgcagagggggagggcagggggcggaggttcctccctagtatccccacaggctgagtaccaggcggcggggccagctccgccgcgacaacccccttctcccctccctgttaaatacacaaatatattatattcaatatgaattcagtctctttccagaaaaaaaaaacatacaaaatacgctggaagggggccatgtaaacctcgaggtggaaggactgggcgcaggcgggcaggccagagtccagtgtgtgagctgcgccccagacctctgggcgagtgcccatcgcctgcccccctcaccccagtggggggcgggcgcccagccttcaaggctgggggtgtccgtatggagca

SEQ ID NO: 429 - DNA, 455 bp, Rattus norvegicus
  Genbank Accession No. AA891049
gaccaaaacatttaattaacaacaacaaacaaaattacaatagcagaaaaataataataacaataacaaagaaattagaagtgggaatcagggtaaaatagaatgcagaggccttagtccctaagagaccagcacccctgctgagctggacttagccccagctccttctgagttttccttggctgctggcttctcatcttctcccataagacgaatgttgtgcttttcccggaattcattgagttcttttccctttgcctgaagctgctgtgacagtgtctcaatgatcttttgtatctgctccttgttaccctccaaggcaggcagcacctccttgaccgtccgctctaccagcacaccgccaaccatgcggtagcacttgcgggtctcatccacttccttcagcgtatcgatcaccagctatgctcattcagttccatctccagctcagctgc

SEQ ID NO: 430 - DNA, 445 bp, Rattus norvegicus
  Genbank Accession No. AA891127
cagagtttaggatctttactgtcttggaatgtccttaaaaggctctgtcattcaacaggtaacagagtaaaaactccagagtcctttctttaaaatgaagagggaaagaatgggatggaaggaactattcaaacttcgtcttctttccttgtggcttgaagtctcccccgcctcctctgccgcctcggaagcctcctctgcctccaaagcctccccggcctcttccgccaaatccgcctcttccgcctctacgtcaccctcttgctgatcagagcagggacccagtagccgggccagaggggatgtgcagctggtaagaggaggacctcagcagagctggaggatctctgtgggaacggggtcttggctgcttggactgcccttcatcccactctggactttcacacatccacagccagcagctggtccccagaatcctggatga

SEQ ID NO: 431 - DNA, 474 bp, Rattus norvegicus
  Genbank Accession No. AA891161
  misc_feature (1)..(474): n = a or c or g or t
gcagaaacatgtgttttaattcatggtttagattctggtgggtacaacagcaaattatttggaattctgctcagaaaactcaaagctgcacctgtagatgttatttcaaataaaggacacgtgaatttatgtacttggtttgtagcaaggaatttccatgatggtgtgtacctggtctgcgcacaccttttggtgactagctatggcttctgcaggaacttcagtctgcacactgctgagaagcctactgtgaactgttctcaggtgtccagctgagggcaatgctgaggaagaccagcacagttgtctttccttatacaccatggcacctangcagggtcaagaaacacggcacagcatttcatacacaaaatacagggagccaacatttgacttgtcaagtttcagatttgatatcatgttgtttggttgatcctccacataattcacaacaggaagagtactgcacattga

SEQ ID NO: 432 - DNA, 592 bp, Rattus norvegicus
  Genbank Accession No. AA891171
acaggtgttaacatattaacctaaacttcactgtcacagaaagacatcccataaaattcagaaaatattcaggttgtggtgaggaagatcaagccttttgaagacttcaacgcactggatggaatggctcaagaatttcagcataagttttcttctctttctcaggaaaatcttctggatgtaattttatatacccgaacatgtcatggtccctcacagcatacagatagttttgacgttttaaataaaaatatccagcaaagaaaaaggaagtaacatacagaagctggcgatgcaaaccttagtagacaaccctgtagctcctcctccgggtaggacggcctcgcagccctcacctgctttcatcacaggtctcattcgcatcatgttgtccatcaggcccgtgcagtagcccaggaagccgatgtagacaagccgcgggtcgttcagcttgggcgggggcagtctccgggcctcatccggcaagaatcttaagggctcatggcccggccggccgttcatcatattgatgcggggttcacgtgaggtctgacctcgactccaactataagaaaaaccacgactacaaacc

SEQ ID NO: 433 - DNA, 465 bp, Rattus norvegicus
  Genbank Accession No. AA891194
actctcaagcaaaatttattaggtatctactcaagaaaaacacaacgacctttgctcgtaagaattcaaagtcaatgtcctgaaagccaggcgtgaatatttttttccttttaaaatcagatacagagagtagaaacagcaatttttcttaaatataacaggcaacagagttgaagatttgttttcataaatggtgtgaaaaagtattcatttatcaacaaggctgcaggtggccggctggctggctgactttccaatcccaagtttttctaatataaagctagttgtgaactggagagtaaagtgggtttcttgaagatgtttcttcacttcctgccccaacaatattcctctgtaactggaacattgttattatatgtatttcagagtagttacaaagatctttctgagtcacaaaattttgtgcagacgatatattccagattcaccttagcttgtgatctg

SEQ ID NO: 434 - DNA, 647 bp, Rattus norvegicus
  Genbank Accession No. AA891207
cacagtgaaactttatagaaacgttctttaattagtgaaacagttcattgtattatgggtagaaataaaaccaggtcaggaagcacagcaaacgaaccaacgctgtaagctacacgaagaacattctggtcagcctttttaaagccaggcacaagcgattcacaccagtaacaatgaacgctcagagggcctttcgaagaattcacacggcaaacaacaagttaaaaaattatcccccttaagcaaaaaccccaataggggttagttgtgtagtgcttgtcccatttgaccattagtgatctttgtagaacacaaggatgtaaagcttccgagcctagagcctatgtggaaatgcccatcccccaccctgtgctctcccagtcccctgctaccctgtggtgtgaccacagcctttggggcctgtccaggataatgccctcaaaagagtgaacacagagaacagcttttcagccacacgccgaatggatacatttattgttaatcaacctataattctgactgtgccttgtgggttcgctgcagaccttttagaaagaaaatactaaatgaaccactgcaattaagaaccatggcactaataaagggttaatctggttttgttccccttctctatgtgcgattcggtc

SEQ ID NO: 435 - DNA, 529 bp, Rattus norvegicus
  Genbank Accession No. AA891209
cccatccttctgagtggaggtgccctgtgtggggttaggaagtggtgctgggagggctcagaggagaaaccacaccacgtcttgccttaggaaagccaggatgtccttccatcctacccgcacatgtcctgcaccttccctggtgagatgggcgacggggctcagagagttctgaagagtgacacagtgtcacctgtacagggcaatgccagctcccaaaggaaccagtgccctagacaagcagtccaggccagtgtgcctcaggaaagaggacgtgaaggctcatgacaggtgagggtcacagctccgagtgtgccgccttggctactatcaccagcttggagagctcagctttgaaggccccaggcctgtgagacactgctgtcttggtcacttcaaactcctcgcttttcagggggacatcactctctctctcaaatgcagctttggagtaggccatggcgtactcgatctcagcaccctgcaactcagccttgaactgtgtgaagtagaggtaggatttcccctg

SEQ ID NO: 436 - DNA, 607 bp, Rattus norvegicus
  Genbank Accession No. AA891226
ggaacgggtactattatttattataaccagggcactccaccttccctcaggggatagatgaagtatacttgtcatgtaagtcagctacattgtcactggagacacggatccagccatcctcccgcacatggtagaggttgactgctcctccggagtaggcatctctgtaggtggcttggtagatggctcggcgggccaggtcataggcctcctccacttgtaggtcataggagtagcctcgatccatgactccaaacgcatacacggagccagatcccactgagaaggcggttccagagatcctgttcccctcactgtctacatagtagaggcccgggcctctcttatcccagccacagatcatggtgcccatggacagccccatgcctttgtactgatacaccatgttggcaagcagtttggaagccgccgcgaccgagatgcgttccttgttgcgaagctcatagattcgacactgtcgagccaacaaccgctcccagaagctgcaatccgctgcacccccagccatggtgcccagaacgtaagggttgatctctatcactttcttcactgtctgggaagcaatgtaggcacctgccgtggcccg

SEQ ID NO: 437 - DNA, 474 bp, Rattus norvegicus
  Genbank Accession No. AA891286
gatcaacaccttttattggttcacattttttttccagaaaaactgtaataaaaatacatggaattggaatttgggttacagtacattgtgcgattacagaacataaacgacgaagtgtactccttccatgggggcggaacatttcatcccaccaatagaatcacaacatgattaggcggctaccctacactgtcgttctgatctcagagactggcagacttaggagaaaaaaaaacaaaaaataaataaataaaactcaacagtccactcctttggttccctggtcttttctcctcttcaacacacggatgtggggcggatctgagggagcctcgtggggcaaggtgggtgccgctggctgaataccaggcaaacccgttccctgaggtggccccacaaggtactgggaaacgccactcagtactgcaggtggagatgggcagaagggaagacaagaaaactcgtgccgaattc

SEQ ID NO: 438 - DNA, 438 bp, Rattus norvegicus
  Genbank Accession No. AA891322
  misc_feature (1)..(438): n = a or c or g or t
aacaggaaattaattttattcttaaatccaagggatcagaacaaaaaacctctgccctcaaagggcaagccaaggtggaaaggctaggaaggcagacagcaaggcaggagcatgtccacaacagaggcctcttcattcaggcgctgcctccatcagaaagaatttctctggggccatgtacccatccccaccctcggcctccatgtacatgtctcgaccatcactacctagcccttccagcccattgtcctgaccgctcccacccccaccccgggccttccctgccccgctcactgccccgctccccacgcttgtgctctctatcccggtcacggtctcggtctcgacggcgttccctctcacttcggtgacttcgacgcctctcccggtctcgatcccgacccttctcctcagggncatcanggccttcaaggccaa

SEQ ID NO: 439 - DNA, 473 bp, Rattus norvegicus
  Genbank Accession No. AA891422
  misc_feature (1)..(473): n = a or c or g or t
gcagacacaaacatgtaacctcaatatgagacgtctaactaaagcaagcacttcccagaccaaggcagcagctcttctaaggcttacgcttggcccagaattcttgatacatggaatagcccataccaagagtcatggcccccacaacaaagccctgggctgccacacgcatgtggatcaagtgaatagacatcttcgtgtttcccctgctcttcagcttgtagagcccatatgcaacaatcgctgcgaagccggccattccaatggggacaaacggtgtctccctagctttccgaataaacttggacccctgaccttcatcgtatgaagagagagaaaggtctgtgttggttgacattgtgatttcttgaagagtcttcggagaggagacgtcnctttcagtcnagccggcttctggcctccacccccgagtgctagaacacggcttcgcccgctgcggccactgcttgccc

SEQ ID NO: 440 - DNA, 436 bp, Rattus norvegicus
  Genbank Accession No. AA891441
caggcaggcctgagcaatctttattctgcaaaggaaatgaccacagatccacataccatgtcaggacaaggggagccagcctttcaggggtggggcaggtcctgtcagggggcaaagcctcaggtggatgaggggcaagatgggtagacaggcaagggcctaaaaaaaagacaaaccccacggggcagggatgctggctggtggcccctacctggggggagggggtgtcacatctctgcctaatccacccggggccgaaatagcttagtttaggaggcaggacctccctggggagaacctgaccagaactcccagccaacccccacccctcctcttgactcagaagccgaaggtttcttgggaggcatagaccatgtagaggaatccgtcttcaaccttcttcggttcatagatgtcaaccatgggtgtggataca

SEQ ID NO: 441 - DNA, 627 bp, Rattus norvegicus
  Genbank Accession No. AA891527
aaaatgttttattccgaataattttattgtgagtcacataaatctcactctaggttttacacaaaaacggaagttacatagctgcaaatcccagctctcccttgaaaatacattcaagttcataacaaatgttaattgcacttaaaaattaaataggatgtgaagaaaggatgcaatataaagacactcaagacctttccatttaatctgccttgcatttctataaaattctaagccatcttcccatccggggtttacagatgaatcttgtccccactgaaactgaagaactaaaggggtttcaacaaacatgaagccgggacagcgagagggagcctcggggtggctggtggaaaccagaacacagcattgcctggttatgaaagaaaacacccaaatctcagtgccacgcgctgtggcttctgtgtcgccttcagatgtcctttccacagtcaggacagaggatgtcgtctctctctgtgaggaagcctcgccccaccaaggacagggagcacttcttacagttaaagcagtcgttgtgccactggcgttcctcaaaagagatgtactttgtgccacccagaccactgatggggttggtgcacccagcacacttcttagcataca

SEQ ID NO: 442 - DNA, 621 bp, Rattus norvegicus
  Genbank Accession No. AA891535
tttacatttgagaccttatttaatcatagtgaatgctccaagtttaaaaagcattaggcagtaaccacacacaagatgaaaacagtgtaaactatacaatactttatgtacatttttacaaagtaacacttttttaaataatataactggacacaaaaatatacactttagagaaattcacatcagtaattgtataaagctctcttctagggtcctgaaaatttaggacaaacattagctctgtaaataaagtgttaccgtgacagtcctgaaaggccactatatatatttatctacatatagatatcacattgacattttcaaggctaccagctttactatagaatttttagattatgtattcaagtgttgaggtccttatgattatgcaaacatcaaaggaatagtggaataagaagcagagcaaatttacacgaattgggccagaacacggatgcacaggctctggctgccccaacttagatcctcagtggctgatatattcatacttcagacagcagtgaaggttttaaataaaattatggcaaacaggcttgaaacatgattctgattttctacaattttcacaagttcttttaaatgcaaacaattctttaccat

SEQ ID NO: 443 - DNA, 614 bp, Rattus norvegicus
  Genbank Accession No. AA891553
aattttatttcttctgctagagaacaggagctggacacacgctgcccaggcacagctaggtgctaacacacgcaggcaccaggccaactcacttaagtttcttcctcttcttcttcttcctcctcttcctcctcatcctcttcgtcctcctcagagctgaaggtgccatcaggcaagctgtagactcggatgacctgcttgttggggtccttgaggatgaggtatttgccctcctccagcttcatgcagatatcaatgacacagcgcaggatgccccaggcattctccacactcaggttgatttggctggcaaactcattgggcttaaactgctgggtgcccaggatgacgtggcgcgaggagtcctttacatggtaccgggacacatacccgagcttcaagtactcagagccagccagcaaagcacagcacgtccatcgcgccaacttgtagctgttgttcttcaactcagtggcgatgacagccccacgctgagagtccagcttctgacgccagtcaacgccattacaatgcctggagtcccattcattgagtgtcttgatgttgatgaaggacacttccccgttggccccagtcatgacgccatcatgttc

SEQ ID NO: 444 - DNA, 574 bp, Rattus norvegicus
  Genbank Accession No. AA891559
cagttggacaaagaccttttattccatcatagggactggaggagagtttatcgttcacccaggacttcatcagggatctgactcttacaatctctaactcttcatcccacgtgtccagggtggctgccacagccccaggcatcctaaggaggtggtgggaaaacgctgtctgcacctccctgaagcattgctcagctttaagcagaggactcagaaaacccaaacaaccttctttctgtgccacatctgtcagaaccaggtcctgtttcacttttctctaaaggacaagcttagtagtaagcagctaatgccagggttggccctgtggtggcagtgttgcctcccacacacctgggcctctgctgtcaacaagtcccttgctgcccagcaggtcacaagcttcctggccatagccctccagctctgcccctgctctctcactccagtgtcagggacaaccactaccacaggcttacgagaaacacaagtttcctgaggttgggtcattctgaaaaagcccttggaatcgcaaacccctcaaggcattggcccccttaacaatctgatacccttt

SEQ ID NO: 445 - DNA, 499 bp, Rattus norvegicus
  Genbank Accession No. AA891651
aaagggcaaaacactcagacaatttaaatacaagtcgaacagaaccgctgtcagttggccacgatgccatcatgtgtcctctggagtcctcacagtgaggaagaaggctctggcaatgacaagagaagtgggtttcttggtgtgcagtcactgattctaagtgccatcttcaaggtgcccaatgctctgaaactaagtatctcaagcactaaaacacaagagctgaaccagcaatgattgtcagctaaagcttaacagtgggcagcactgaccatctgtgagccaatttgaccttcacagagtcatgatagggccaacgtcattcccactttatgtgggctcagattcaacagctcatcaaagatgaccaggctcacagcatacctgacaatgaagccaacttgggcctgtctctaaagcccatcctcttagttgtgagcaatcctgggtcacctgagcaggtgaggcttacgctgggtgggtgcctacgactgaggtt

SEQ ID NO: 446 - DNA, 450 bp, Rattus norvegicus
  Genbank Accession No. AA891713
aagtcaaataatttattagcacatagaaccctccagaaaaatattgccttgtggtctgttgggcaggagcaaaggcagcacctgaatgtggccatcatcttcagtgtgaacttctaagtcctagcccaggtgggtagccctcacttctcatagcttcagaatatggtattggggcaggtgggtggggcagccctgctactcattttgaacactgaagatcaggtcattccatggttatcactttaataatgtaaaactcaagcaggtgatgagctctcactcagctgtctaaatgcaccctctacctacaggagcagtgactaaggaccctttggtccccacatccctggtcggcggtggaggaagggcaggccaggcaggcatgaggcacaaacagtctttactgggttcacaccaagagtccattggtcttgaggacctctgtgaact

SEQ ID NO: 447 - DNA, 418 bp, Rattus norvegicus
  Genbank Accession No. AA891727
ggggaaactgggcagtttattgacaggcatcaggagactgcgcagtcaggtccgtgggcgggacagcacccgagtccaggctctgtgcttctcctcgggccttgtgggcgcaaacttctcctgcagtttcctccacacactcttattcatctcttgaaactcctccaaagtgtctgtggacaggatcagcttgtactcttccacggacaggccactgaagctggtgtctctggggcagggtacttgtgcttgtagtagtttgaatgcagtcgtgctaagctctcgtacatctgatcacaggcctcgggttctgcaacctgggtgttctctccctcccgaaaggcctgtgctacccgctgccgcaggtaagcgcccaagtcccggccccgtttggtctcgtccactggcccctcgtgcc

SEQ ID NO: 448 - DNA, 584 bp, Rattus norvegicus
  Genbank Accession No. AA891729
aactcatacacaactacttgtcttctggtttgttgaagcagtaagtcagacaacacttgccacagtaatgcctgtcaaagtggctacccatgaaaactccagcaccacattcatcagaaggacattcccgacgaagtcggctgattttgccattttcatccaccttatagtatttcagcacagccaacttgaccttctttctcttatgcttgttcttctttggggtggtgtaagacttcttcttccttttcttagcgccaccacgaagtctcagcacgagatggagagtggactccttttgaatgttgtagtcagacaaagtacggccatcttccaactgcttaccagcaaagatcaacctctgctgatcaggaggaattccttccttatcctggatcttggcctttacattttctatagtgtccgagggttcaacctcgagcgtgatggtcttccctgtaagggtcttcacaaaaatctgcatcgtggcggctgctccacctgcattcgaaaggagacggattagacccgaccacaccagtgagagcgaccggtagagccactagccagagccgggccacagc

SEQ ID NO: 449 - DNA, 423 bp, Rattus norvegicus
  Genbank Accession No. AA891769
ctgtctctctgaacacgggggagacacatgggaccagaggggagacaagtgtgaccatggggagggctggactggacaacgggatggcacatgtgaggggaaagacaggcgtgatgacgtgtaaccatgaagacgagtgtgaatacagagaaggcaggtggaaaggggagtggatgggtgtgactgcggggaaggcaggtttgaccttggtcgggagagacggtggcttcccccttactttaagaagggaaagctgtgaggtatcaacaacccaggcacttgaagaaggaggaactcggaagagaagtcccttagctgctgtggactaagcagactcttccatctccaacaggtcatccacatactccacaacctctccctcatcgtcgtccatgaggtgttcctgagcgaagtcatacagtt

SEQ ID NO: 450 - DNA, 636 bp, Rattus norvegicus
  Genbank Accession No. AA891789
gaaatttagaaacaagttttatttaagatctgaaatacaattcctaaaatatcaacttttcagaaaactgtggctacacaataatgcattgcctctatcatgttagaacgtgcattagactcaaatacaaaaaccaggaaacaaatcaccatccttcaacaatttgagcaaagatagaatgaatgcctaaggaacaacaaagatggacttgcagaggatgggctgtttacagacgtcaagcaccataaaaaaaaaaaaagaagcacaaatgcgtgggtttccaggtatatacagtaagttgaacctttggcactaggaaccagggcatctcatcacgtagcattaacacatattagaaaactgtgtagtgtcaaagggatagaaccaccagcattcaagcaatgttgtcaactaggcaataaaatggtctactgaacttcttctttgtctaattactgcatacactggtagcaactttgaaatgaggaaaggagctgggcactccttttattttctgtctacaacagaacaggaaacaaactgaaacataagccctgttttacatcgacagttttaaagaacatcaattatacaatgagagggactaaacagaagtgtttacagataccagacaat

SEQ ID NO: 451 - DNA, 609 bp, Rattus norvegicus
  Genbank Accession No. AA891790
ggagctcttgcaaggatttatttgctacagaattgctttcataccccagcgagctggactaaggacttctgggtctaaaaggatttaggtcacttcatgttttcaagtgctgtgacattcaaaaagcaattttggtagggcagagatggggtagagtagcaccatttgccatgtggtaagaggcgagaaaaataatcagtaatattaaacgtctaagaatagagaaggaaagaatactttaaagttcccatctggacagtccctgagctgaaatcacatttatgtgtgaagagaaatgtttgggctgtgaccgtgaagtgacagatgctgaccttgggcttggctggtgaaagcttccagacactctgaatgacaggatatacgccactcatctggctgattctggcacgtgtcctaaatgtctcctaaatcccaactctcctggttctctgaaaggcctgtggtcatctgatccccaatacttctttttatttttgagacagggtctctctacatagccctggctgtcctggagctccatgtagatcaggctagcctcgaactcacagagatcctcctgctcctgcttcccaagtgctgcccaatact

SEQ ID NO: 452 - DNA, 551 bp, Rattus norvegicus
  Genbank Accession No. AA891810
aatacaaagctttggcattagcaattttatgaaaaaataaaatgtactaaaaataaacgcttgtgtggcatgattggtaaatgatgcacaaaaataggttcttttttccttcaaggcaatcagtcagaaagcagtgttttccttcttcaaaaccattctaccttgttactgcaatgttgatttcacccgttcgaggagtgagctccccatcttgaggaagaggcgatatcccagaagttctcagtggctcaaggccaagggaactgtcattggcaaggtcaccaagggctgatcttcggttaactgcctgggttctggtgagcctttccatatcaaacgctacattatcagtacatggcagatttggcacaattcctagggctttcaaaatattaagtttacacataggacaggtacagtgttcactgagccagggatccacacaggatttgtggaaaacatgcttgcaggggagaacccgaacaacatcattctgcttatagctctctatgcagactgcacagtgatcgaagtctgggtctgtttcctta

SEQ ID NO: 453 - DNA, 620 bp, Rattus norvegicus
  Genbank Accession No. AA891812
  misc_feature (1)..(620): n = a or c or g or t
agacaaagaaactgcttaaagacttttatttgtgagtaagacctgttacgacgaggaaaggacacacaggacctgtcctccaagtctgtccatatatgcagcgatattccgtgtgtaatacaaagattagactacaaaagtgagaagtcattgcatatgtgggataaaggaagggccagaaggaagacgaggaggagtccagatgaggggactcaggaccaggtgagagctcaggccaccgtggtgactagtgggactagcagtacagcaggctgtggggtcctgcttggtgccccattgggagatcacagggttctgtccacatccgagcacccgctctatgaggcccaacccagcaggggcgtggagggccccagcaggctccctctcctagtcaggctggcagtggcagctcctggaacaaggccccttaggattccacctgacactcggcttccccactcactaaagcagtttcaagcccttttccagggataaaagttaggtaaaaattcataagggatgaccaagaaggtcatgggctccatgaatgatgcaagacattagatggcacctccaaagccagcttcaaccatgagttaccatccctatcaanacca

SEQ ID NO: 454 - DNA, 646 bp, Rattus norvegicus
  Genbank Accession No. AA891821
gcaacagaaactgtttattgaaacctcagttctataaaagcatgaaaaacccagatacaaagcagtggcgcccagagaggcctgtgaagagaacacccaaaaaggcagagtgggaagccttggagcaggatgctatggttggaagacaaagggacaaggttaaaggacccagcaattcttggctatgacaaattcgtccaagggacaggtgtggcaagtttcccgccttggggagccttctgtccctcagcatctctcgtcttggttttcctgactcacacatcagagattcacatcgatgctttcccactctccttactcacttcccacaactcccatttaccttcccatctctggaaacttcaaagcagaaatctaccctcctgggcttgtgaaggcaaagagataggtgattctctgtcatttgtggcatgcctctggtcactgagctgacactgtcccaggcaccactggtgtcctagcctattagccagcctctgaggtctaggagagtgagtgaccttgtgctgcccccataatcccttatgttcctacccagcaggacaggggactagccaagggcccagagaggtagcataattctaaatcaagttttcctcttccaggttctcaaggactcccaaac

SEQ ID NO: 455 - DNA, 591 bp, Rattus norvegicus
  Genbank Accession No. AA891842
aacaaacacctaatatttattaataaattagtatacttgaaggcatttttctgatatcagttcctcaccactaagcccacccacacaaaggcagtgggcgtctagctctgcattagagtctgacaactgagcatcagaggacaggttgataaatgagagagcgtagttgcaaatttatcggacaggagttcttacagctgcagccatttttaacgaaagtggttggatgacaaaggaaacccagcaaggccttgagggcagactggacctatagactatgtgtattgagagagagagagagagagagagagagagagagagagagagagagagaggaataaaaaaaataagagaaatatcttttaaagcaaagctgggcataaagtggctttccaaggtgcagcaaaggtgttcctaaaagatgaagatcgagttctttggcggcccaggtgtcaagccactgaaacagcaagtcctggggacttaaggatttcattctccagcccagagcttagcagcattaacgggagcacaagttacaagcagtgtacggtgtccagacgagaaccatacagcgagcgatagagagtg

SEQ ID NO: 456 - DNA, 437 bp, Rattus norvegicus
  Genbank Accession No. AA891873
gtgataatttattatctgttagtagcacacaggtcaaacatcaatcattcaaaacaatctctatagaagtggggaatgatactggccactctgtgagagactgactgtgtgcactcaatgctcactattctttaggtatttaatcttcttcttatgccgttcgatctgtttttgcagacgctctatctccttcgaatggtggtcaatctcatcttcatggtgcttcttcaaggcagccagctgctctctagtcttctctcggaagtaccgatcctcttcagccttctctcgtttcccgaaggccccaccagcttctcggatggagccagcgcccgaatccatgctctccgacgagtccgagccgaagcctcgggtttgcaggaccctcataccccagacaccgagccgagcccgaaccgccaacgccgcctcgtgcc

SEQ ID NO: 457 - DNA, 548 bp, Rattus norvegicus
  Genbank Accession No. AA891877
gcacccctaaccaaacgttatattctgggctttacagataacacaaacaactgtgatgtggcaattatgcttttaatggagatataaaacttatcaatgcaaaagaaagttttatataacattagcaatagtgattaacttaaaattatgttttaataatgtgaaatacagtgtgttagacctcaaaaaagaaaccacaaagttccccgcaacctaaaatgttggaaaggctccttaaaattgtttttacctaccaacgatttaatactcagtggcatctggggggacgtaagaaaatatggagctcttttcagctatgatttggagctttagtaaagctctatggtaatgtcactgtgggaagaaccataaaattctcccaaaagtacttccaatagcataggcaactcagaggcttaatattaatagttcaaagcttagaaagcagctgctatcctgaagaattgtaaaagatcaatcctgctactctttctaaaatacagacataacccaaggatgtcagttctgtgaagtttcagggaaacact

SEQ ID NO: 458 - DNA, 452 bp, Rattus norvegicus
  Genbank Accession No. AA891880
agacaggactgcagtttattgacaccatgacatgacacctgttgtcactggaggagggggtgagtgaaagtggtctccgtggatatcactggggaccccattcgccttttagctagaggtcatggatttagagtgcagatataattctacacactggagtcattaccactcatgccattcctaaacccatcttccatttggtccagctatgaaggcctgggtccctcctctttttgaagggcagagggagcacagggccatccatgtcttaggaacaagaagggctgctggcaatggtggtatatgcctttaatcccagaactcactgtcttaggcaatcagatctctgagttccaggacagccagggctacatagagaaaccatatttgaaaaacaaaatcaaaatagaaagaaagagacaggaaggaaggaagagggggcactggggatg

SEQ ID NO: 459 - DNA, 470 bp, Rattus norvegicus
  Genbank Accession No. AA891901
ggtctggatggtccttgcccactttatttcaggttagctcaagtggcttgcgccgctactgcaccctgcaccccaccatacatggcaccacatgtatgcaaagccgtccaccaccacccctattgcccaatgacaggcagagtgcaagacacagttgtttattgactccaggcccagcctggcctacagctcagaatgaagggctcagggaaggcaaaggttataaaactgctttaatggaaagtccccctccccccaatacaccatctgggctggggtaaatgtggccaaggctggccccaggacaatactgagcctgtagtcgttaccaaaatatacatctgtcaccataaaaaatgctgcaccgcctcagccccacaggtataaaatcataaatatttacactcttccatgactttcacagaactgaggtgcagggaacccctcccatagaaacaggctaagatgga

SEQ ID NO: 460 - DNA, 576 bp, Rattus norvegicus
  Genbank Accession No. AA891914
aaagaacatcccattcaacactggctttattactgggcgggggcaacagatccttggcagtggttgggctgaaagctatgagggttggaaggcctggggctcagctttcaccaggcagagcgggcacactagcaagtgcagcaactaggcgtgtatatatgtcaactccacgtagaaacacagcctcgtgcagtcgttcgttatggtcatgtagtaacacgggtgtgcggttcatgggcgagaagcccagagctgggatccccaccgctcggatataacggctgtcagtggcagcaggaaagatctccggctccagagtgaggttcatttccttgcaggccccgctgaaagctgcccaccaggggtccgtatcatcagtgggtgtcattcgaggctctgtaaacttctgagcaaactcaaaggtgaccccctctcccgcttcctggcaccagctctgcagctgcttctcgaaggccttcatgtctacatctggcgccactcggaagtcaaaacaggcactcatggtaccaggtaccacattataggccacaccaccttcgggcttagtcagattca

SEQ ID NO: 461 - DNA, 599 bp, Rattus norvegicus
  Genbank Accession No. AA891916
agtatggtcacaagtttgacacctacatgtcgccattaacagagctgacgacaaatattggaaataagtgaattactgaagtatggcaagatttaaaatgtcaacttggagtgatcatgcaagcccatgcattggtgcctgcgccctaattgcaggacccactctgctcatccttgtggctctgtaccctcagcggggttgggtagggccaccctgccttttcgcagatccagaattttaagggcaagtgtggagccttccttggagcatggtcgccatgcctggtttctgcttggggtaaaactgtggctattgctagtatgagccgcaggattcccagggcttgtgctaacagagtgttctcgtgtccctgcaaaaggcctccaggcagttttgcatctgtgtttcctcctggggagtctacaagtgaggtgcacagtcttccagcatgctgtcagtgatgtagctggacccaaggtgggactcgtagtaattcttttcatcaaaggtattgacagtccaactaacaacctggattcctttggctgaccacttcttcaaatagtacggggagacaaaatccttctgcatgaggaagg

SEQ ID NO: 462 - DNA, 583 bp, Rattus norvegicus
  Genbank Accession No. AA891937
ccggccgccaaacattttttttatttttttttttttttttttgccagtgaacacacacacaggagtttttattttatgcatgtcgtgttttgtctgcaacatatgatgtatcagctgaatgcctggtctcctgggagcccaggaaagggcatcagatcttcacagaccaaagttagagacggttgtgagctgccatgtgggtgctgggactttaacctgggtcctttgccaagaggaagccgtgcttttagccaagtcgtctctgcggtccctcttgggtatctccagcaattcttggccagctctgtccgtctgatccatggtgtgatcccctcattccctccccatgaggagagctgaggacacggaggttcaggcacagtatccctaggctacagccctgccatagtcagtgtcacggggccgggtgacaggtgagggcagtagttctctttattttagaaatgggggtggctgtacatattaaaagtgccacagagtgattcgaacttgaaaacttacagaaagaaatgttccctgtcccccgccccatagtcataccctctgaggtaaggctgcacca

SEQ ID NO: 463 - DNA, 523 bp, Rattus norvegicus
  Genbank Accession No. AA891940
catggtgcaacctttgacctttattcatgtcctgccctcccaccaagtaaagtcaaatacaaggctactacccaaagcagaaaccccagtccctatcctagactcctcctgtgagccaaaaatatataaagtgctggtgtgtaatatggggaaggccaaacggactaagaaccccacccctggacctcatcaggaggaggagccctgcaaaagaagggcagggcaccaacctagttcccagaggcagggagaaggggcctagcagcccccacttggggctggggaaactcatgcagtccagggcagaaaggaaccaaaaaagaaactggcagcatgaaatcctacaaggatgaaatggggggaggggggtctgtacccctgtgaagggaagagtgggagggttaaggaggctttggggaattcagagaatgggacagcccctccggcgcttattcttccggacctgtaggccagcccgagtggccatctcaaatacctcccgcaccccttccttactcttggc

SEQ ID NO: 464 - DNA, 605 bp, Rattus norvegicus
  Genbank Accession No. AA891944
cctataataactgtgatgatttattccatcatagagattaagatcacatgtatgttacatacaatacagaataatgtgtatgatgactatataatacccctgtacatatatttctgtatctgtacatacaaccagcaaagagaaaatctacatctgtgacctaagacacagaattcacaccctgcttctccagccaggctaacagtgagatcacagtcagtttcctgagtgctggggccaggttagagtccctgtaaccaacacatacaaccttagaagagctttaagaaaacacgcttgctttctcacagtcaacctactggagcgggatctgtgctataaacgtgacctcaagaattatttctgaatacccatgtacatcataaggatgggaaacaaagcctctgatttcattgcagacctttcctgtgagtccatggaaccacgttaacaaaagaacgagcaggcagaaggggagtcttagcagaacttggttcacccccaatcccactgccgtgagacttctcagttcaacctatccttacccacaccatataaagtaaacccaccttttacatttaagtgatgctttttcataaagtacc

SEQ ID NO: 465 - DNA, 569 bp, Rattus norvegicus
  Genbank Accession No. AA891949
aagcagaaaaacgtttatttctatcaaattccatacaaatcaatcttcaagcaagataacaaaacaatcaattaatacaatgaatagttaggacagcacatacagaacagactctggattaagcacatacgccaaaatcatcttgaacaccaactgtcactgaaggaaagctgatgtgtcagctcccgggggacttaagccaacattgcattaaagactgccttgaacttggggggatcacagtgaaacgccatcacagctcaacatagtcccccagacatccgttcagctcagaaaacaaaattggcaaattcagtagtacaagttctcataaaactagagaagccttgagccccaccatttcttgcagttcacacaaagcccgggtttcccatttttcttcccttttcccgaatcccagagagaaggtgcagtactcttttcaaaggttttaaacaagagtcttttattgaaagatgttgtgcttcctacaattgtctgtcactagagggagtccatgtggagccgtgggcaatggcttactcacttaacctgtctctcacacccaa

SEQ ID NO: 466 - DNA, 343 bp, Rattus norvegicus
  Genbank Accession No. AA891969
ccatcagcattaatgaatgagaatattttattttaaatggaacatgaagaattaaaatacagcctgaaggtttcaattttgtactgtgaacatcaagacagcaattacccctaagaaaaaaattcacagaaacatgttgaactaactgaacagaaaccagagtgggtatttaagtcattacatttctcatcattgtgaaaacagatgtcctctaacaactccagtctacagacagcacacttcatcataacactacatttaaaacactacaaacgtttacaaagaacatttggatttcacaattgcctatagaatatctttcaatattaaaacaccatgatgc

SEQ ID NO: 467 - DNA, 102 bp, Rattus norvegicus
  Genbank Accession No. AA891998
agcacaacaaaggagcccttatttattatgtgcaaggccctaggttcaacctccatacccccaaagaccaaaaaaattaaacggatgtgtaatgtacaactg

SEQ ID NO: 468 - DNA, 443 bp, Rattus norvegicus
  Genbank Accession No. AA892006
caccagttaaatttaagaacctctctcgtctctattaacagataggaagcttcagggaccaggtactttgaggagctttctgagccagtgaaagaaaacaaaatatttcctggaactggtaagcttgctgttttcagagtgtcaacaagcaaacacacacgccacacacgtacctcgtgaaaacaatgccgctctggcccccggccacactgcctgcaggcactgctgcgtgtccttgtcagtgaatgttaatgcagaccactgggagctgaaggcgagggagctccctgagggagtgtaggcagcagccctgccaccagcttctagagatctagatgtgagctgcaatctgcgactccatcttggcctgagcagggctggaaggagcacaacagcacgtaccagtgtatggggaaaagaactgacatggctggctccggctg

SEQ ID NO: 469 - DNA, 476 bp, Rattus norvegicus
  Genbank Accession No. AA892010
gctgggaaatgaatataaattaagggtttattacaaaataaaaagtgttaagtttctccttgtcagtgattcaagaaaacaaagccagaagccttttgtggagccgaagccaggacctctgtgtgcaggctggtggtcaaaagccaggctcatgagcgggcagacagacactgattaacgacctctagcaggtgggtattctccagggcagctgccactcgctccttatctgcaagttgtttgttcactaagtgggaaaagaagggtggaaaaacagggttaaaacaactcggccaggctgctagccccagtatagattatatttctaccgatgaggttctcttctgacgtctcaggactccaagcctggatcaggatatatttactgcctgtgccataactagcttcttcactaggaatacctgtcacggccagggactgctcattccgtctctgtccctgtgtacttgagaact

SEQ ID NO: 470 - DNA, 606 bp, Rattus norvegicus
  Genbank Accession No. AA892041
gaacctcacacagcagaatttagaaatggcaacccactcctttaggacatttagtggcaaacaatgtcactgcctgtctttcataaggcgagttcacattcacagatcactagagagcagacctggaaactccaggaagtacatgtgctgtcttccacacattcttggaagcccactttgatagaaactcaccatggatttcctatagagaactctccccccccccccacctcccctgctttatttactgaaagtacagaattgaaagtttctccccactttatggttctccacaatgggtaacagaagattcagtttggaaacctacaaaagatgtttatcattctagcatggagcccacactgacactaccttgctgatcacagaccctgcagagaccctgcagtcaccaacacataattcgtttcaaagaaagccagtcagcagggcgctgtgatggatggaggggcagaatgctggcgaaggcacagagtaaagaatcccgagaatgttttggtgccatttccatttaaggagccagtagtatagcgagcgacctacgcgacttcggctgtgaccacgccacaatctttctacggaactgca

SEQ ID NO: 471 - DNA, 592 bp, Rattus norvegicus
  Genbank Accession No. AA892042
caggcaagagcacaactttattttcacctctaaaagtaaaccacaattgataacaacaaaggagactgtgcagttcaactttttattttaataaaaccagaatatgcagagcacatgcggtgctagcatctaaactaatacaataagcaagtactaaagctacagtgacttgagggtcaatctttacgttcagcaagtttaaacccattcttaactttgaaacataactgaaaacattgcttgctgataagacttgctccaatgctatcgctgaatgtccaagtcactgaatatgccaatacaacaaagataaccacatgtttgaggattgcaatgtgccagacattcactgaaaaaaaatacaactaaacaaaactcacacaacaaacatctgagaatctggacactttgtatcagtgtttttgaagtgtttcattaatatcttaagacaagtgtatcaaaaccttggcatgatttagtttcaagtcgccaattttgtttttactaacatcagaaagttatggctacaccgccaatgccgggtctgcttaatttgacttaagagtttattatggcttaacattaaaagctc

SEQ ID NO: 472 - DNA, 482 bp, Rattus norvegicus
  Genbank Accession No. AA892053
  misc_feature (1)..(482): n = a or c or g or t
gaaaggcctgaacacaaaggcaagctgggacagcagaaagaaggcaggacattcctcagactgctctgattcctagagtaccaggggaggaggaaaaggaaatccagagtgattgccctggcttgccccagactcggggttccatcctaggccaagcaaggcctcagcgggctgcttgctccgcacgcttgggcctcaggcctccaggagcttccctaggaagcggaggtttagaatcttgatctgctggtcttccaggtccattcggatgatgccatcctcaccatcaatactcagaaggaccccggtagcctctcggtcctcacccagaatcactttcaccttgttgttcttggtgggggtgatgggctccagatgctcactggagatactgnacaacttctcactatctttcaggtacacggagcacatgcctcccgtgacactgcggatgacgcctgtctgccccactatttgtgtgt

SEQ ID NO: 473 - DNA, 490 bp, Rattus norvegicus
  Genbank Accession No. AA892086
  misc_feature (1)..(490): n = a or c or g or t
agaacagaagtaagttttaattcattgaaaagtgcagcagtgaacagggtccgttgaagggcactttctaagtgagcggctgagatgacaggtccagggcagaggagcctctacaacaggtgatgctaataaaagaatttacaaagtccattgagcggaaagtgctggtgagctaaagaaccccaggacacccatttgtcccggtggtgatcagctgatactccttgctttttcttgagggttctgggctgccatctttcattagaaaaaaataagataaagacgctcctaggtttgagaacacttcccacagacagaggtgtaacttccatagccactcctactattttgatacaaaaccctggcgctggcaagtcgaaaggtgtntgtgacagtaccgcttgctgaactcagactctaacgtgtaccccaccttgaaactgtgtctgcagggcagttttagaactgggatgcgtaaggtgcgtctgca

SEQ ID NO: 474 - DNA, 363 bp, Rattus norvegicus
  Genbank Accession No. AA892123
aagaaccatcttttattgggggaggggtcatcaatccttcttggccgccgccttccgcatggctgccagcacgttgctcagctcctccctctttctcttggcgcggatgtgcgtgcccaccctcttcttgataaacttgagtgctcgcttgtccttggacaccttgagcagctccatggcacgccgctcgtagggcgcgaagccgcacacctcccggatcatatctcgcacgaacttggtgtgcttggtgaggcgcccgcggcggcggctgtgtctcggcttgctgacgtttttcgtcactttgtggcctttgttgaggcccacggccatggggtagcgcagggccatggctgcagctttccg

SEQ ID NO: 475 - DNA, 443 bp, Rattus norvegicus
  Genbank Accession No. AA892128
  misc_feature (1)..(443): n = a or c or g or t
agacataattaatgttacagtaaaaataggcatttactcatatttgtcttgttttagccactttaatttctttcatctcccctccccctaaggttttctcaaagcacattatcattttacaaatacagtgccaaggtcctgagtccactttgcaagaatcttcttcacattcacggaaagcagttacttagtgcagagttctcatttccacttaactgtacacggctttatcggtgctgagacactggcccacctgctggccagtgtctcccacttcacacacctaaaccaagctcaagacaggaaggctgagccgtgaagagcatcnccacancctctccactggcccgatagctctttcccgcccctcccagttgtcctgagaaaaatcagatttgtcacagaaaactgacattcctacattcataggcagaagaatttta

SEQ ID NO: 476 - DNA, 442 bp, Rattus norvegicus
  Genbank Accession No. AA892137
aatgcacgaacttaaaaccttaaaaagacatccttttttttctttactttataagtcatcacaatagatcagggaccacagtagctttataaatcatgaagatgcatgtgcagtcacaatcccagcttttgtaacacgttttaagaggatagtacacctggtaacacgtctacatttacacacacatttactttgactaccctctggggttgatgaaagctcaatcatagacctcaaattttgcttttgataactagatgtgtataaaccataaagaagaatttacaaagtttttttcaatagccttttagttcaaatcaaagatatcttgtggatgtattttttttcctcattctttaactagattcttgtattggcagtcataatttactctttcaaatcatcttcaaaagcttaacacgagaaagttcttctccaatgt

SEQ ID NO: 477 - DNA, 439 bp, Rattus norvegicus
  Genbank Accession No. AA892146
acagctattaggtgctgtccacttttctgcacagaccctgaaccatgcatcaacttattttctctgcaacttacaataactctctcagtgacttagcttaacccttcaagtttctgtaactttctcttcatatcttttctttatcttagccagattggtggggcattttccagcccctaggagacccacccttggagcctgggggcagacctggagcactccctaccttcaggggtatgaagagagcaggcagaagtgagggccttctatgcgtgttggaaccctttttttttctggcctctagtaggattccgtctttcctcggtggtaaagaagacctgtaacagttactaacaagcatatcaaatgggatggtgagaaaacaagagaatcttgagaatagagtctaccgaagagggcatacagcatttagtcacac

SEQ ID NO: 478 - DNA, 632 bp, Rattus norvegicus
  Genbank Accession No. AA892234
cggccgccaaaatttttttttttttttttttttttttttttaggtacgaggctgacgccagataagtttttattatatttaaaaaacagtggagctggaagtaagggcgggtcgttgaaggcgactgagaggtgaaaggcctcccgttcctcagtggcaggatctggacccactgcctaggccgggtttaatccagccgagatgctggaaagcagagcacacagttgtgcccatcagggcaaagagggcaagagagctcacagctcctcgataccgcttgctagggtctcccgtgtagtagccatatgcgtaaagaactcgcccaataatccacgccacgcccaggccagaagctatgcgcgggtggtaaacacctcccacggttaggaagaataggaagggagggtacacctccaacgtgttctggtgggcgcgctgaatgcagttgaacatatgcccattctcaggatctgtgctgtacatgacagggtactctaccttgtacttcttgcgggctttgcccacgttgatggctaagtggagcaccatcacaaagctggcggcaccagtgagaagcacgaatccatattccttagagaggacagccatcttggctctggctcaccttgacg

SEQ ID NO: 479 - DNA, 662 bp, Rattus norvegicus
  Genbank Accession No. AA892238
ggccgccaaacattttttttttttttttttttttttttttttttcaaggaaggtaaggtttattattttggctcacggttccagaggatgcaatctataatggctgaggaggcagcagtggaagtatgggacagaggtaattcatacatcctgactggataagaccagcaggagtatataatcctcacccatcgatatccttaaggtttcacagccttcaaaatagagccttaagttgaaagaccaacagctcaaaacaagcctccaggtacatttcagattcaagcctcaacacacaccttaatatatttcaacgaagctacacattcacaatttaaatacagtttttcatcagggagacagatataattcataagagtgtttagactacaaatcagatacaatttagtcaaaataccataaagagtactttaagtaatcaggaaagagattttaacattattgcttactcttatgaattttaaccaaattgataattctataatcttagtttattttctatagacttaaattatactgcttgccaggtaatgcaagtattgatgcaactttctgaaattaattgaactgcaaacaaattataaacttagccagcacacacattttgactctactgcttcagaagtagtactataaaaagt

SEQ ID NO: 480 - DNA, 627 bp, Rattus norvegicus
  Genbank Accession No. AA892246
aagcattcagacactttgaggtgggaaagatgatacgcaggttgtactacaagattcaatggaagatgtcagacaggacatctggtacagacgcagcagcacaacccaacacaggttagatgagagcgcttcatccggaagaaacttaaaagaataatttaaagctctgtgagacaagatatgttccaattgaaaacactaagaaacagtaccattgatggaaaaaggaaaacttctatgtgtaccaaaaggggcgcagggtgaacgagagggaaatttgcgtctgttgaggtacaaatgggagtgttccacgaggggggggataattattattaatgacagaccctgtaaatacaaaataaaatccaaatcactggtcacgaacttcaaatttacacgtaataaaggcaaggcaataagactcgagttctggcctgtcaaatatttactccacagacattatctacagaagcacttggccaacgtgtacacagtgatccttatgcacgccaaaagggtttcggtaaaaatgacgctatatacaatctgtacaccgatccaccagagcgactctccgtctcccgggggaagagctatcaatacaaagagatacctgaggttgcgtct

SEQ ID NO: 481 - DNA, 587 bp, Rattus norvegicus
  Genbank Accession No. AA892248
agggtttgctgaaaatggcggtatataggctgaattatcgagaaggggtaaggtagaacggggtttatcgattatagaacaggctcctctaaatggatataaagtaccgccaagtcctttgagttttaagctgtagctagtagttctctggcaaataattttgtaggtttaattattaaggtttagggctaagcatagtggggtatctaatcccagtttgggtcttagctatcgtgcattatataaatgattagaattactttcgttattgggcttaagtcctaacaatgaattttcacatataacttggattttaattctattatgacatttatagttggcacgttttacgccgaaaataattagtttgggttaatcgtatgaccgcggtggctggcacgaaatttaccaaccctgacaggtatagcttagtcaaactttcgttcagtgcctaatatttatcactgctgagtcccgtgggggtgtggctaagcaaggcgtcttgagctatattatgtgcttgatgccctctccttaagttttacgcaaatgtttaagggattttacaccggtttatggatgtttgc

SEQ ID NO: 482 - DNA, 644 bp, Rattus norvegicus
  Genbank Accession No. AA892250
aaagagagaaatggtttatttggtaacaaggaataaaaagaaattctttaattcttctctcttgtggtggttggactgcagtgtccagtgggcgggcaccacacaggaacccctccctccctcagaccagatctgctgctcaagcgcaaaggccatagttgcatagtcttctagacagaggggctggcctctgtgctttctggggtctcggtggctgttgcagtttccttcttgtcttcaggcttcatggcaggaaagagaagtacttccttgatattgttggagtctgtgagaaacatggtgactcggtcgatacccatgccccagccagctgttgggggcagcccgtactccagggcagtacagaagttctcatctatgaacatggcctcatcgtcaccagcagccttggccttggcctgttcttcaaacagttgtctctgccgcacggggtcgttcagctcagtgtacgcattgcatatttccttcttcatgacaaacagctcgaagcgctcagttagaccctctttgcaacggtgccatttggccagaggactcatgatctgtgggtgatcacagatgaatgtaaggctgatgcatgtcacttcgaggaactctcccacaagcttatcaaggagcctggc

SEQ ID NO: 483 - DNA, 572 bp, Rattus norvegicus
  Genbank Accession No. AA892284
ggaaattttagtcaaaaatcaagcaactaggaaaaatcaaggcaatttattgtaaatgacagttgatttgaataaggcacattcaacatcatcaatatggaaacaaatgcaaaaaagcagttatggtgacttgaaaagtctgacaagccgttaaatttgtgaatacatcaaggcaggattcttggggctaagaaatccttgatagagaatgtaagcgtgttgctggacatcgttttgctgcatttctctcgtgttcacatctgtctgccatacccagcatctgtgctcacagtgctccggccttaaacgagaatgtgaaccaaaggccttgagacaaagctgtcccctccatcagccagcactgttagggtgggccgacaggaagggcactgatcctcactaccctcccccaagcctccgaacttccagataaaatttgttcaaattagttcagggataagaactctctagaacttctctgatgatctctgagaactacctaaaagaaccctaagaaccctaaattttacctgaaagggaaagcgagactcaagtctaaagacagtttctat

SEQ ID NO: 484 - DNA, 541 bp, Rattus norvegicus
  Genbank Accession No. AA892318
gaacaagatcatttaatagtgaccctctgctgtccacttcggtgcctaggccacccactgcacccaagaggatgctgggccgtaggaaaggccgctggacatcagtctccaaactaccaacagcagttcacagagctgggatggcagtgccctccctcagggaagcaggcctgctcgcatctggaaggccaggccgtcccctcgggtggcttgctgaggaaagaaacaggttggaagcatgagaaactaagtgtagacacaatgagggcagagcataggcagagtggtaccaccaaccttgttgatctctctgtgtcgttctttggttacgatctcctctaaaacctcaccgtctcccttgatgagccttgtacggccggtctctgggtccaccacctttcgaataacgctctgtcgagcgtcccactcctcctttgtcatgggcttcatggcctggatacgagacttctgctcgtctgtcaggactgggccatcattgtcctccccagctgatctgtgccactgatccagagaggggccg

SEQ ID NO: 485 - DNA, 191 bp, Rattus norvegicus
  Genbank Accession No. AA892332
catgcagccccaaaggggcagaaaaagactttaattagggcgggggaattgatcaaaatcagagacagcgagcatgggagcagaggggcctgagcaggcaggactcacctctgcacctccagcacaggcactgtacccagatgggccaaccttggggcctctcaactggaagggtgttggatggacaccag

SEQ ID NO: 486 - DNA, 499 bp, Rattus norvegicus
  Genbank Accession No. AA892333
cccacttaaaacggaaacacctttattgacagtataggacagttaaaacgcacgcaaggacaaagatgagaccacagaggtgtaaagttgcagcacaggagttaatattcttcaccctcatcgtctccttcagcactatctgccccaacctcctcataatccttctctagggcagccatatcctcacgggcctcagagaactccccctcctccatgccctcacccacataccagtgcacaaaggcacgcttggcatacatcagatcaaacttgtgatccaggcgagcccaggcctcagcaatggctgtggtgttgctcagcatacacacagctctctgcaccctggccaggtcgccaccaggtaccacagtgggaggctggtaattaatgccaaccttgaagccagtggggcaccagtccacaaactggatggtacgcttggtcttgatggtggcaatggcagcattgacatccttggggaccacatcaccacggtaca

SEQ ID NO: 487 - DNA, 662 bp, Rattus norvegicus
  Genbank Accession No. AA892367
gatgagaccccaccagctgcacaaagtactcctggcatcaggcaccttcctccttggcaatgcgatctttcttgagcggtcccatgaatgctttcttttcctccatggtctggaagcgaccatgtccgaatttggaggtggtgtcaatgaacttcaggtcaatcttctcaagagcccgacgcttggtctggaccagcaaggacttccggagagtaagcactcgcttcttggttcccaccacacagcctttgagcatgatgaagtcattggtcacctcaccataatggacaaagccacccagtgggttgatgctcttgtcagacaggtcgtagtcagtagatgcattgttcttgatcagcttaccatccttgatgaggtagccttgaccaatcttgtaaatcttcttgttgatctctgttcggtgatggtagcctttctgcccagctcgagccacagagaaggctacacgggcaggatgccaagctccaatacaagcaactttgcgcagacctctgtgggtctttcggggcagcttctttgtatgccaacgactggtcacccctttgtagcctttgccctttgtcacgccgatgacgtcaatcatctcatcttggccaaacacctggttcacagggacctgctgctccagcctctctcgggcc

SEQ ID NO: 488 - DNA, 624 bp, Rattus norvegicus
  Genbank Accession No. AA892376
  misc_feature (1)..(624): n = a or c or g or t
gttttccttttggtttaatcaaagactggtgaataaacataaataccgcacaatgaccagatcattcttcatactgtgcacacacagaccaatgaacagtaatcgcaaagaaacttgcagtcagcagtgaaatgcactcagcttttctttcccttgtttaaaaaaaaaaggaaccgaaagccacaaatttagaatctcgtcagcacatattctgctgtgacaaatgattcaaacataaatagtggatgtaaagaaactatatgctaacatatgtataacctttgttaatgaaaaaccaaacaaacagaagcagccgtaatgattaagatacattcagttactgataactagttgtacccagaagggccttatcaaaagggaatcgtgctgcagagaaaagctatatatacatacacaatgagaaataaactgcaagatcaacgcatgcatgtttaatactggaaaaaaatcacagccctccagaatttctccacatttgttataaaagccctctgcactcaactaaaattaaaatgatcttaaaagtataatacttcttttcagccacagaaactgcaatggaaataaatgttcagagtcattttcaaaacanaaacaaaaatc

SEQ ID NO: 489 - DNA, 589 bp, Rattus norvegicus
  Genbank Accession No. AA892378
gcgaagccacggcccaactttatttacactcattgcaaagcatgactgagggtaaaggacaggtaccaggggatggggggctgggggtcatggagactgtgcgggtgcacggtagggttgcaggagaaaaggaaggcggtggtgaggatggacagcccctctttcagtgtcccccaggctcccaggcgtccgggggcacagagcaggtgaggctgccttcaggatttggacttggacacagccagtccaatgagtccagccaggcccgccacacccagggccatgccaccaacaatggccatgcctaccagtccatctttcttcatggccttgtcaatcaggcgttccagctccttggcctggctgttctggggctcagtctgtaacagtccccgcacatacttcagagccttttcatattccttgagccggtagttgcccacggccaggtacaagacataatcccgctgctcctctttgctacctttgggcagcagctcctccagcatcacgatgcctctacggatgtcgtcattgtatttgcttcgaaccaggcaccaggcgtattcaaactgcgtgctcttggaca

SEQ ID NO: 490 - DNA, 591 bp, Rattus norvegicus
  Genbank Accession No. AA892395
  misc_feature (1)..(591): n = a or c or g or t
gcggctgtgcctcttctctaaccaacccccggtaagtatgtttgttaaaatgcccttctccatccttcccttccgagctgctttgctcagtagtggctgtatgcatggaagactgaccttccatgtaaagcccgttcttctcttggatggatgttctggaacacggggaactggaggtgttcggagactactgggtgacgtgctcatactcgcacttcaacagctgattctgcttttctcctgtgtttatgattcgcatatgtggtgttttcaaaagttcaatcaaatgtgatctaatttccagggctgactgaagcctttcaggtctccaaccaaaatatttaggacaactggagcctggctggtaggtgacggtatctagtaggtgtaggaggctttgaagagtgactgcgtacaatcagcgcctgacgagcccgtgtgaacatactgtccttgggctgcctggcagttggccacagcccgcttcatgaaagcttcctgngttgccttcttgtttgcagccttgccgccccaagcagccaatgcactggcctggagggctctgccgtatgaaaagcttagcctcgtgcc

SEQ ID NO: 491 - DNA, 371 bp, Rattus norvegicus
  Genbank Accession No. AA892399
gaaagaaaattcaacggcttggtttattttaaaataataactttcatataggagaatactagccaaattcaatactgatataaatataaacttcttaggtcaaaatatggtcaggtgaattttctgaatctcataaaagacagttttcaaaccatacaaaatatttagaaacaatatacagcaaaaacataccacaatttaaactaaataagctatgaaaaatagcccaatctttgttatgatttagaacatctattttcaataacttaaaatattatctatacttcccatctctaaattctcctgggaagaaccactagtctagatttaaataatccaaatatttactcatggtaagagagactctggca

SEQ ID NO: 492 - DNA, 482 bp, Rattus norvegicus
  Genbank Accession No. AA892417
  misc_feature (1)..(482): n = a or c or g or t
ccattaaaaaaccaaaaacatcactttattatgaatccaagaacactgtataaaaaacctccagtcgtagaaatgaacagacagcacgtttatatacagacactgtacatgtgggccctgccctttaagctaaactccacagactatacacatgggcactgcccttacagctatactccaaaaccaggctgctatagtcctcctgctggcacagcttcagggaatgctgccccagggaaggggaggatgcagtcagtgccgggctacaaaactctctggcagcccagcaggtggaaatcttgcagagatgctgggtcagcccaagctgtctctcttgtacctggcttccccgcaggaagctgtctcaagcttttcctttggtcagttcatctgcaaattatggcttccttggggaaggacatttttnacaagttcagtgtccaactgcatggnctcaggctctttcagcgcatctcccagtg

SEQ ID NO: 493 - DNA, 460 bp, Rattus norvegicus
  Genbank Accession No. AA892422
gacaaaggacgtttattcaggctcgatcctgtggcacagcatatgtacagaagtcaggaaactataaatcgggttgccatggagtcctttggctcagcttcctcggtgggcccccttctcagtctctcacttcagagtgtagaaggttggggtcactttttggcagcttctgcctgagctgccaaatccgcctctttctgagcagccaaaaccacggcccgttccttctgaaaagctgccagttcgtctacactgaggtccttcaccacacgaatgcccagggagcgggcagagccaatgatggaacggacaatagaagacaggggtacatcttgcatggcaaaagcctcatccttagctttgacacgggcaatctcgtatacgtgcttcaaactcaacagacctgccacctctttccctgtttgccgggcccccttctcaatcccagcagctgccttca

SEQ ID NO: 494 - DNA, 513 bp, Rattus norvegicus
  Genbank Accession No. AA892446
  misc_feature (1)..(513): n = a or c or g or t
gaaggtgaaagaatgcactttttagtagatatgagtgtgagactcttgtctcgttattgctggtgtgcttctcggtctctggcagcagtgtaattatctgcgcatgcctgacctacagtcaggcggtagaggggccaagcatctccgctccgggcagcagtactggttgtgcgtctttgactccacattagcgtgctccttcagtgttgccttcctcctgccttctgtttattccacgcatctcagcagaggaaacagcagcgctgctcctaaattcactctaagccactgacaggaagaatttgggctgtgctataaagtttccaatacaatgtatgcatgaattataaaccagagacgggagagatggccaagtggttaagagtgcttcttgcagcagatccaagttcaggtcncagggcccacatcagaatcacctgtaattctagttgcaggggatcagnatacctcttctggttccgtgtgtgcaggaatgtgggcaaagtcctcgtg

SEQ ID NO: 495 - DNA, 395 bp, Rattus norvegicus
  Genbank Accession No. AA892462
tgcctgacattagactctcccgacatgcaagtgttgggagctcaaaggattcttgagctgggaaatcctcaagggagatgacgtatagggagccaggcgtccaaggcgtacgaacaaggtttaatgctgcacccgtcaaggcaggagctccccagatcgatgcagacttcttcctccgtgtcctccacaggactaagctgtttctgaggcctcagcgcatgctaccatcgaggcctgtggtgggggagggggctgcctaatcgtccttcttaaacttgccattgatgtacggcacccagtccaggatcagccgccagtccgtgacccacaccagtcccacggcacccacagtgccccacatgccggatgtggggatccagtttttgggcagttct

SEQ ID NO: 496 - DNA, 562 bp, Rattus norvegicus
  Genbank Accession No. AA892505
cgagagcaggagaggatttattaggggctcagtcatcatgtggaagcccaagagcattgagcagaggaagctgtggcgggaacagggcttgtcatggtagggccttgccagagcctgacactgattccgtgacctggtgcacccagtgcagatacgggggattcccctgctccacgggcagtgcgatcacctcggcaacttcataagggtgcacagatcggacaaactctgtcagagcagggaccagggagctttgtgttttaatcatcatcagcacctcactatcttcctcgatctttcctttccattcatagatggatgtgatctgcgggatgaggttgacgcaggctgccaggcgcttctctaccactgccctggcaatctccttggcgactttttcgttcggacaagtgacaaaggctgcagagactgatcctggaacgtagccggagcccgaggccggcgacggctgggacggagggcttccagaagccatggacagcagagctcggggtagcaataaaaggcgggaagccaccggcagtaaggcaggcatgcaaag

SEQ ID NO: 497 - DNA, 572 bp, Rattus norvegicus
  Genbank Accession No. AA892532
aatggaaaaagccattaatattcaaacaaaggaatcacattttaaaaaccctatacatacgaaacagcttccaagaacattcaagcagcagtcaggagggaaaaatgtttcaatagcccaattttcttcaaaatatgccagagaatacaatccaattcactgctacaattcatagaattcttcagtgttttcttgagacgctgaggttcactgttggcagtttccagtggccggcgagtactgctcggaaaggccagcgcagacagctgaccggaagaacttcctgctggaaaactgctcattcccaaggaaagacatttgaaggccgggctgtggccctcacaactcgtccttctctaggtcatcgagctccacatcactgaggtcaatgtcgtcctccacaggaagctcgccatccttgccatcccagggctccctgggagtgatgttagggaaggaaccaccccctacgggtgctgtggagccacgcccgaaagacagttccctgagaaactcattgatgccttgttcactgaaagagcctttgagaagagcaaacttcatcttgcggg

SEQ ID NO: 498 - DNA, 605 bp, Rattus norvegicus
  Genbank Accession No. AA892545
aagaagaagaggttcttaagtttattgcttgactgggccaggtcgttgggttttgtggtcaccgggctttgtctcccttctgggacaatggtttcttccagaggaccaataggacaagcaagttcaccatgagttgcacatggcccaagatggagacaccatagctccggtacagcaggccacccagggtgggtcctacagtacgggtcaatggatgcacagatgcacagaggcccaacatggtccctgtgtctgaagcagatacagccttggtcagcatgctgtctgtgactatgttgagagcacagagactgaatacgagtccaggcaacaaaaggcagaagtggaacacattggacatcagtgccatgcccaggcccacaacagcaaagactagtacactggatctcagcagggcttcctctggaaaacgggtgcttagtctcccaataaccaggccttggatcatcatctggaggatcccaaagaaggacatgaggtagccagcctgtgcagcctccagctggaagaagtccatggagatgatggagaacatcaccatgaagagtcctgaagggaagccagagattaccttgaccaggaat

SEQ ID NO: 499 - DNA, 584 bp, Rattus norvegicus
  Genbank Accession No. AA892547
ggaaaaaataattaaaattttcccaataaaggggagaattaacactaaaagaccatacataccctggttacaagttgatgatctcatttttcataatatggaagtgttcaatgttccagaatatgaactagcatttgcaattttgaaaccccaagtcctgtctctgtaaacccataaatgatgaaataaatacctagaaacaagaatcgtctagaagctgcggtccatgatagagcaatccgttgcggacagacagtgctgcaattgtcacagtgtcacctgctagtccccactgagcttcctcatgatatggctgtctgctgttgcattagtgaagatacttcccacaaccacatgagtaccccagagaccatgacggatcactttacagcagccaaggtcatcaacagagaatcctaaatgccggtaccgttcatctgtttcaaaaagtgtgttgtttgtatatggtccaaaaaatgccaaaccagacgacgggtcaatgaagtcagcccagtatccttcagcccgaagagcatagcaaatttccttagcaccattaatgaacttctccaagagcgcctctc

SEQ ID NO: 500 - DNA, 647 bp, Rattus norvegicus
  Genbank Accession No. AA892557
ggaattaagaggatttattttaaaagattataaaagttgatattaagagtgataaaaaaagacccacaggctttaaatcaacaaatacaaaagtgatctgatataagcaatgtaaaaatacatttttcctgtcccacataaagcataatttaaagtataattataaaagtcttgtgctgtaagtatatttcccttctaagtcttaaaaaccattctaaacaatttgtataaattacaggaactcaaatctgccacagctactagaaaagacattgtccctactgtgctgacagtctctggttccagtgcttctgcagggtgtttgttgccacagtctttaatatcatctctctccatcgaatccagaagtcaaccagccacaggttcccccaaaagagaaagttctaagagtggccacagacacaagtgaccaaattatcttcctaaaaggaaagcctgaagtggcccggcagagtcccccgctgtgggacactaacacagcaggccagagtgactgtcaatcacgaacaagccacacacgggcagagaggcgcctaccacagagtacaatgtccctaagcacctgcgagttagaagctaggtctcaggatggcactattgcaggcagacacctttaaaggtgggga

SEQ ID NO: 501 - DNA, 476 bp, Rattus norvegicus
  Genbank Accession No. AA892602
aaagacattttatgtgaaaacaaaaggtgcgaggtcctgtcggccctgtcagctccgcaagtcagtttgtgtgcaaatggggctggccacagtggcagggagggccggcagagtgggtgagtctatggagttgtgcaacaaggaggtggctcaatctccctcacaagggagactggctgtacggggtagggcaaggttcagtacaaggtcaagttcccactacacaaatgctttcatgggtggcctccagccccataaggattcccagcagagagaccactccagcactgcctgactgaaagctacccagggatggaggcatctttgatactgggaagattctcaatgccaaggacacacatctgtgctcctggaaacatggtcttacagcccagaaggatcttagaccagtgcctctggactgcagtctgttcctctatccacagtttgcctcttccctggggtctgaattgagc

SEQ ID NO: 502 - DNA, 421 bp, Rattus norvegicus
  Genbank Accession No. AA892647
catgctcgcccttttaataggaaaaggtgggctggccctgtaaaagggcctttggttttgtgagatcagacgacagacgagagtcccttaaccgccaaagccgtagagggtgcggccctgccgtttgagcgcgtagaccacatccatggcagtgacggtcttgcgcttggcgtgctccgtgtaggtgaccgcgtcgcggatcacgttctccaggaacaccttcagcacaccgcgggtctcctcgtagatgagaccggagatgcgcttcactcctccgcgccgggccaggcggcggatggcgggcttagtgatgccctggatgttgtcgcgcagaactttgcgatgacgcttagcgccgcctttgcccaggcccttaccgcctttaccacgtccagacatctctacaaagctggagagcagc

SEQ ID NO: 503 - DNA, 515 bp, Rattus norvegicus
  Genbank Accession No. AA892649
gatgtgcctcctacctcccccacccaatgtcaaccccttccatctaccccccaaaaagaaggtagtgaaaggaagggtttattggggttctgagcccagtgggcagttagaaagggaatagaaaccaaaacaatcatccgatgtgacagagatcgacaatccagaagtctaaagcagagtgggaatggagggtaaacaaggggaaagagagatgtacagcggctgcatctaccattacccctcctgctcagagggactggagagacagcctcaaacattaagtgcaggtcctgaagaaaggagatggtgtttgagcctgaaggaggaactggatgccaaggaaggagcgccacctctctttgtagaatggaacccccacctccgggacagcaacttcacagaccgtagacgctttcatcactgtaggcaatgtatagaaagaagtcctcttcatggtgttcctggtacagctgacccatcgtggcactggtgggtggaatgacattgttgacaaa

SEQ ID NO: 504 - DNA, 459 bp, Rattus norvegicus
  Genbank Accession No. AA892675
cggagctggggaccgaacccagggccttgcgcttcctaggtaagcgctctaccactgagctaaatccccagccccagtgcctgcccctcttaaggcctgttctcacaacatccttaccaaccactttgccagtagaacagccgctgtagatgaactgctggcccgtgctgtgggctggggagaatcggcatcggatcagagtgtgaagcactccatggcctctgtaggtcatcaaggagctgtcacctgggagcttcaacttcttccaggctttcttgggcacctgctgccagcgatagtcccagttctgctgtgtggcagccagtcgtgacgcttccatgccttctcggctggaaaagcgtctgatatcccagagcttaatggtctgatctttggagttggagatgagataccgggcatcacccttgctgtcaatgaaggtgatgccatcctggtggc

SEQ ID NO: 505 - DNA, 467 bp, Rattus norvegicus
  Genbank Accession No. AA892759
  misc_feature (1)..(467): n = a or c or g or t
gaagaacaataccattaattacaaaatttaattgtaagaatcaagcaatggttactggtcaaaccgatctactttgcgctaattgcgatctacaatcagcaattgtacatgctgatttttaaacaaaggtgacaaataccagttcataacacttcagggtctacacaaacttgattctgtgtgtaaggcagagagaatggcagtgtggtcatcaataattaatcaaaggcataattttccaaacaacttttagtaacagattataactttttaaatgtctaaaactatacaaaactcaaagcaatctatttttctacctgagatcaaaacaagtctttttcatatctaaacataattcttatgaggtanatctgaattcacatgatacaccctgctttagtgaggaagtctccgatttcacatatatatgtacatcttttcaaggctactgacaactccatgaagtt

SEQ ID NO: 506 - DNA, 554 bp, Rattus norvegicus
  Genbank Accession No. AA892768
acaggggggacaggatgaagatcctaggcattgagtccaggtggagtgttcagtccctgcgaaggttcttgagcctctcttccaggtctgcatcagcatcagccagagctgaggctgtggcctctgctttctttccgccagcagccacactgagtgagcctccagtggaggggaggtttgacagctcatctgtgaggctcagtcccagctcatccagtacctgggacacaacagcatcactctcctcttcatcttcctcatcacccattgcatcatcaatggcatcattcatcatttcttccttcatgtccatgatctctgcctgccgttcaaactccatcatgatcttctggatctggggtaatttcagctgtctgttcatggtgcccatggccttagtaacacccttcatggcttgtgccattgagttgttggattttagagtttgtatcttgagggacacagcctggatattggcccgcatcaacacaaacttgcgcacatatcgccgggtacgcaccaggtcttttgccatgattcgaacagcatccatc

SEQ ID NO: 507 - DNA, 606 bp, Rattus norvegicus
  Genbank Accession No. AA892773
aatgaccagcaaacaatttattggttaaattatcaatcgtggagttccttgataacattatataacaaatggattaattcaccagaaactggcttgaagatactgattttaattactttaacaaaatttggtttgtgtagcaagctcctactgtcactgctagacagtgaatgcagcggctatccaaagccagtcattccttgaccacgggggtctctcagagcacaggtgaataccagttacggttgtgtttgctgacctagcacctagttccagccttaggactcagaagcagctggacagaagatatggggggaggggagatgctggaaacgaacagctaactcgacttcgggccggtgttagatctgaggcaactcgcaggctctgagaccaaagaggaacacagctttggatgtggctgtgaagaaggcaggccccgggaccgaattggtgggtccagaatacagtgccaggtgggcatcaggaactacggggcttcttcttggcttccaggtcctttttaatctcctcaagttttttagccaggtttggcatgtcgtaattctggggccaaatacattccaaccacgttgcccaaagtaa

SEQ ID NO: 508 - DNA, 711 bp, Rattus norvegicus
  Genbank Accession No. AA892775
caaactttttttttatttttttttttttttttgcgttgaaaatcatttaatgagaattatactttttctctatcagattagatctgttctagtgattattgtctggtgttacaagctcatctgtctcagagttggttagtgtgcatgaagctacttaagaaagatatggacaagcacagctcactggtccccctgagcacctcacaagactgggaacatcctctcaagggttaaaacagacgggcatacgggctgagaatttattttgaaggcaggataaacaggccagctctaagaagatactgttttgaaagctcacacgtttcataagtttctgagttcaggcagtctcagttctcatccactgagtcctgggccctcaaaagccctccaggtccaccacagaggctgttctaactgggtgctgagcctatacaaagccctggcactcacacaactgccattccccaagatcaactcgtctcctgtaaatatgtgctgtttgtatccggcacagggctgatgaagatggatcccgatggagcctactgtgcattacttcctgatgtgcagagatgtgtgtggtgagactgtgcgggatgctgggagcagtgtgcagtgcgttgggagactgagaagtgaaagccctgttggtttgaggggaaagcaaggaaatgtgacctttcccatagctactcccacagtgagaaa

SEQ ID NO: 509 - DNA, 545 bp, Rattus norvegicus
  Genbank Accession No. AA892777
aaggggaggtacacacattggctcctagaggctggtggctgtctccaggcctcgctcctggaagtatttgtgggagacctgagggcggcaggcctgcgggccctggctgaagtaggaggtgattcttccgggtccctcaggatcctcctcagctgctgagtcttcccaggtgacactttctgcctccttttccaggatggcctgggctgtgctccaactgaaccgtacaaactgggggaagccaaacacagggtccacatgtttcctcagccaggctttggtcttgggatcattgggatagcctgagccataatctgagtccagaccctgtaaactctccacaaactgccagttcttcacagcctggtctcgggccaccttggcaatgatgctggcagcactgaccacagggaacagggagtcagctttggccttgactgtcacctcgatccctggaaaccgctgctgtactcgagcctggtatgtctctggcattcctacagtgtccacaaacacctgggtgactttcacattctgatccatcg

SEQ ID NO: 510 - DNA, 558 bp, Rattus norvegicus
  Genbank Accession No. AA892780
caatagagagatgtttaataagacttgctcagactggaggcttagatcctccctgtgccgcatacccaatacagaaaaaggtttctataaagtgaacacttttaagtagtaagtagtagaaagagggaggccctgagactagcctggagagtgaggtaaggcagtggtggactcctctgtgggccaggcctgggaaagacgggagctcttcttgcaaaggccttgctgccacctttgtatagggggggataggatggaggtgtccttgaagatcaagcccgtagtggggcgatcacagcagtgcaagtgaggctttccacaaggacagatggctaaaaacgaccgtcaccaggaagtgtcacccccaaccccagagttctttccactagatctggtgggggcactctagccttcactgtgacacaggaccctaaacatgggtcaagccatctgcaaggtgccgactgctctttgtcaacacgggggctacgccgctttcttcctttttgcacgcttagcacagcccctgccgaaccagcctcctacgatgggggtggc

SEQ ID NO: 511 - DNA, 663 bp, Rattus norvegicus
  Genbank Accession No. AA892789
gcaggtttcaaaaactcactttattccaatgtgaaatgaagatgtgatggtttaaaaacaagaaaacgttcttagtagctgtggggatgccttgctggccgcccattccctttgaaacaaggtccctggacagatactatccatcagcagctccagaaaagccccaagtagaggatctgcctaaaacagctctcttaggctcaaagggtggccatctccttcagggacagcagacaaagaaaaacgacacaggcagggaggggagagagagagggcagccaaggcagtaggagccccaacacccaagagcttctttgtgtaagtgcttatatggcaaaaaccaagaaggagtcaggctccaccgaggtgacaatcactcctaggcatggcactttccctgggatccacaattcagccctgggtcccaccccttacccaactatgcattaggcagctcaggttaaaatggggagaaagatacattcagactgttggcccccaaggttatgctcacctggggtacagggaggcaagtcaaagcctgtggtaggaccacctctcctgcttggccaaagccaggcacatggatgtgtggggtccaccaacgctggccccttcccttcaccctaaagctacaggtaggccaagcccaaacacagtaaa

SEQ ID NO: 512 - DNA, 579 bp, Rattus norvegicus
  Genbank Accession No. AA892797
caatagatcaactccaaacctacagctggaatctcaccgttatttccatgctgtcatgaacagtgacaaagctaaccagaggctacatacagcgaagagagctaagcttttacagctcacttcctttcacaggcagagtataaatagatgccctctacaatgcacaatggttttagtcactaaggaatttaaatgggatcttgaacgtagtagatgaatcccgatgcagtaaagacgagctgagatgctgtgcagctgcttagggttcctggtgctgcgtcttggccactagctgcactaacaccaaatggagatgcggaaaacactaggtcgacttaggggctgtgcacaggaaccaaaggcaggaaaatactaaacattgctgagagcatccaccccaggaaggactttaccttccaggagctctagactggagccgcccccagtgctcacatggctgactttatcccctgtgttccatttggcacagcaagtggcggtgtctccgcctcctatgatagtgatgtagcccctagacgtggctttcaccacctcatccatgagggacttggttcccct

SEQ ID NO: 513 - DNA, 528 bp, Rattus norvegicus
  Genbank Accession No. AA892801
caaccacagaagagtttattactccaatgattcgcacagctgggttgcaggtctaagggttgcctgccttcctggaggcactcccccacttccccctctgggggaattacacttggccacatacatctctgcaaactgcttcagtgtgaaggcccacccatgcaggccagagccaaagcctacagtgcccaggacaggatcgatcatgatattgcccatgggtccactctcgccctcgccataggtggagatgatgacattgacgttctccacgatgcgctggaaggtctggtagagctcctcaggctccagttgcagttccagcagggcccggtccatcttgttcatcatcagcacgggcttgatgcgctcagcgatggcctgccgcagcactgtctctgtctgcacacagacaccagacacacagtccaccaccaccagtgctccatcagtgacacgcagagcagcggtcacctctgaggagaagtccacatgacctggagagtcaatgaggttgatcctcgtgcc

SEQ ID NO: 514 - DNA, 496 bp, Rattus norvegicus
  Genbank Accession No. AA892814
aagcagcgaatggagagtttatttcctcttgggcccgacagctgtgcagggggaaaacagtgcaggcataggcactagggtgtgtggcactggatggcctggagtttatttggctgcctgggaggtaactgtgtgagtgtgtaacaaggtgtgtagggacaggcgtgatcctcccagaactgagacagggcccttgggacatggaagcaataggagtgctaggcttggcacacagacaggaatacatagtcagctgcaaccactcctggatgttcacttggatctgtccagtgccatttttgtcaagagatctgaaagcacggaacatggcatccagcctgaccaagcagctgatgaagttatcgaaatccatgttcccggtctcgtccgagtagcggcggatgatcatgctgtagatatgctgattcaggtggaatcctgctgcagacaggatcaggttcaaggctccacagtgagcagtgaggcggcaggtctg

SEQ ID NO: 515 - DNA, 590 bp, Rattus norvegicus
  Genbank Accession No. AA892820
catggagcaaacattttatttaataagttataagatacactttccagtcggcatttgttccagtttggtctccatggctactaagcctgtatccctttcgcatccagcttcagctgctctgggtcctaacgggtggcttttagcacccacacctctctggctgccgtgccttggtgcgggacacctacttcacccctaccatatccacgacaacagccacaacacccgattttgagggggaaggggtatttgacagcctggaaatgcttacaccaaagcctttaaagagaccctaggtgcatgtgttagtgccttggtccttaaggcctctcatgggtcataacaggggtgggtatccaccccttccagcttttgcaaggaggaggtcctacagtaatttatcagtggcctctgccatttagcacaagcaatggactctgggggcagctgacagaggctctgcatttggccatgaccacatgtcttcaagaaagtaggcaagagcagaatccctcctactccagagctggctttgcgatgaagtcaaagtggtcagggcgcagacatggagaacgatctgggtcagactt

SEQ ID NO: 516 - DNA, 626 bp, Rattus norvegicus
  Genbank Accession No. AA892828
actcataggtaggaatcccctttattccttatcaaaacagtttaacagcaaatgtagataatatatgttttatttagacatataagttatcttccatgggggcattctatcttgccccttctaatgaaagagggcaaatttttatattaatcttattcaaagactagaccaacttaacagtaacagacaaagagagcagagcatctagggtagggagtagaaaaattctactcataagcacatttaaacttcttaccagtacagagacacctgctgccacatcagcattactcctgactagtaagtctcccagtacacgtcaggggaagtcccaacacgtattttaaataaatttcactgacttgacattcaacgtctagattagatattcaaagtcttctttattgcaaatatgatgtctttgacctgaggtatggagttgtcttctagaatctttgcgtaaggcatagggacatcagcaccagtgactcgaacagcaggcgcatcaaggaagttgaatgcagggccttccataattctcgcacaaatctcagctcctactccaaattgtggccagcctccttccacagttacgagatgatttgtcttcatgacactggcttcta

SEQ ID NO: 517 - DNA, 486 bp, Rattus norvegicus
  Genbank Accession No. AA892831
aagcaatttccccactcccatgttggccagtgctgattacatgagaaccggccgcctatcgctggatacagatgcaccaatgagggttaaaaactttccgagcgaaaagtagaacagaaagaaaagaatctcctagcatttccccaagggttcactctcccgccacacacactctccaaaggaccgctacagatccaactctatgtcagcttcttggctttgttgtagagggagtctactactttactcatgttctgaattgtttccagagcagcttcataagttttatctactgggggttcatcgaaaatgatcaggacaccctccccctggtccaaaatcccatgaaacttcttgtcaagaatcatctgtgataattttctttccacgtcggccttggagagtttgatgaggctagatatgtgttcgatctgtactcgggagaaaggttcaatgacccggatcagattctgttccagtaagttc

SEQ ID NO: 518 - DNA, 635 bp, Rattus norvegicus
  Genbank Accession No. AA892832
ccgggtaatcaaaaaggttttaatgattaatgtttagacattatttgacagtgtgggtatatccagatgagctaagcacactttgacagcacactactgaatgttatagttttgtactaagatatgtaaagaacctgcgagcggtaccctcggatggagacacacatggacgctctagattagagaagatcaatgtaaacagacgctgcaactccgtccaaacagaggctaatgaggaccaactggctccttagaatatgaatgtgcaaaattaaagcatggtaaactggtatttacataaatatcaaacccacaattagtttgtacattgtcaattgtcttctaggatgtgtcacgagtggttcaatcaattttcttcaatgcagaaggtgttcaaaggctaaactttcaacactttaaagatgacacatgtaacaatagtccccacttgtatgaccaacgtctccagcgcactatctgttacttttaaacaagcgctttaaatcaatctttagatgctaagcagaaaaaaattacagatgccaccgagatttacactgaataaagcgattgctccccaaacacccagttcctgcgtgctccagctctttaattttgcctcaaaatgattacgg

SEQ ID NO: 519 - DNA, 644 bp, Rattus norvegicus
  Genbank Accession No. AA892851
caaagagaaaaattttattgatataaaatgcacttataaaatgtccacagaagacatgtcatttttcactgctatataaatttattgggaatgttattcacatctattgtcacctaaaacatactgtaaacaatgggttattccctaagacaaatgcatacgtgattctcagcaatcattggtttgattattagtaggttacaaggtcacatctctgtggaatgtcagtgaccgctgtagtgtgacaggcttcagcgcatcattgcacacactgcttcagaacagtccccaccgggtctggacccaggacgcaaagcaccccctctgcttgaaacggcagctctggaaggtctgcgtcacagctccaggtctctcgctgcagcactctatgggcacgtgtgatgacgtgtacacacgcacgactaaaaagtttacctctcgtaaacaagagcaacattaccgtcaactctcctgcatatttaagtagtaaagtctacgtatttgtaaacaaacaaaacacacaaatctatttttaaaaacttccatcagctcgtaattcctctgtgatctaagtgagtccacactgaatttctgaaaggcgcatgtattaccttaggtaataaagctctgcaaggggtgcttca

SEQ ID NO: 520 - DNA, 486 bp, Rattus norvegicus
  Genbank Accession No. AA892859
ttaataatttatcaggcaggggaccctcagaagggtcaatgggaaaatagaagactctagggacctcctgggagggctgttggggccagcacattctgtcccaggcacatagacacactcaggagatgagaatgacaacccaggtggcccaacaaggcacagtggcagagaaggtttggcagactgattgagtgtcaggggtcaacgaaggacaccatgatgtatcgagttcccctggtggtgggcagcccctcgtggtagtgtgtgaggcgaccagggtgcaggagagcccagcccttcctcggggatgagactctgcagtcgtacctcaggaagcggcagccacctccctcataatctacacccttgtgattgagggcaacgttgagcgtgaaggtggacgagtcatggtgtggccgaagtgagggctgctcatctggccggtagcggaccacaaagttcatcactgcccgtgtcttggtgtgg

SEQ ID NO: 521 - DNA, 436 bp, Rattus norvegicus
  Genbank Accession No. AA892860
ccatataataatttaatatatgccagccaaacaaagtagtttatctttattcaattaaataaaaacagacctgtcaggtatattatataacattcactatatacacatgatttaggcgatgcaaggtaattctaggtatgctaactgttcaactattagtgaaacacagaaggtgtcaggagcccagcgtgttcctgctcacattgggtgcctgcgtttctgtggacagttagagggacagccacaagccaggacagatattaccagtaaacgtctgagggacagaggggctggggatgagtctagcagagattaacagtctcctaagtgtggatagcatacttgacagttacgctttaacaagttcctcttcgatcatgttcatgacgtcaaagtttttgtttgaaggcaacaccaccacattttacctcgtgcc

SEQ ID NO: 522 - DNA, 570 bp, Rattus norvegicus
  Genbank Accession No. AA892864
aaacttaatgaagagtagtaataccccatgcctgtccacagctgtccagggttccctgagcaggagggagtgctgactgcctctctttgcacactctgtctttatttcctaaacagaaggagagctaaatggcgctctggacagctcctggacccttccttccctacatgcagtgcttgggccctgctgaggggcacagtgaccttatgacctatagtaagtggccagcctctgactgctatgcatggtcagggccaccagagggggcagagggccctcccaagatctagaataaattccaccaactccgggatacctggatcccaccttcctggagcccccccccccttccagcagccaggcagttctccttggcagcagagcccctccccagggttctatgtgcagtgacatgatcctgaggtaacagcaaggccctctgtaaagatgaaagtgctccaagggagcagtgagccccagttattgctggcgctaagtgaggcctggcgtaagcctttgggcgggcacctgagaggacaggggctcagacttcactgcttcagggtagcc

SEQ ID NO: 523 - DNA, 533 bp, Rattus norvegicus
  Genbank Accession No. AA892888
  misc_feature (1)..(533): n = a or c or g or t
gacaataagaactctggctctttattgagtgctgctctcattctgacgtttgtctgctctctgttcctctgtagttcaggatagagtgtatggtggggagggaggctgaggtggccaagcaagggatacatgccaagggggcaccagggagaacgttacaatgctgtgagacacggggcatggctggaaggacacacaagggcgagagagagagagagagagagagagagagagagagagagaatgaatgaatgaataaatgaatgaataggggtcctaaaagggttgggttgggtaagtccagggccttgcagtctagttttctgcctcaagagagcaggaagaaagcctcactgtggagaaaggctgaagctgattaatgatcaccccggccgtggcagcggtgctgagagtctctgctttacctgacccctccttanaagtactggggtgggttctggctgcacatggggagatcagatggccttcttgggggagagttatttcacagttttccccatgatgtggggccc

SEQ ID NO: 524 - DNA, 508 bp, Rattus norvegicus
  Genbank Accession No. AA892895
cagggctgaaaacgagtctttattgtccccactacttgagggggataaatcgggaggagtgggtggcaccaatgccgggccggccgtgcttcacaggcttgtaggtgatggagaactcgcccaggtagtggccgatcatctcgggtttgatctccacctggttgaaggtcttgccgttgtacacacccaccatgctgccgaccatctcgggcagaatgatcatgtccctaaggtgggtcttcacgacctccggcttctccatgggtggcgcctccttcttggccttcctcaagcgcttgagcagtgagtgctgcttcctccgcaggcctcggttcaggcgccgtctctgccgggcgctgtacaactgcatcagctgctcataggacatgtccagcagctggtcgaggtccacgccacggtaggtgaacttgcggaaggttcgctttttcttctgctccacttcggccatcttggcggctgctgggaaaaggaagcggtgtcagcggtt

SEQ ID NO: 525 - DNA, 465 bp, Rattus norvegicus
  Genbank Accession No. AA892999
  misc_feature (1)..(465): n = a or c or g or t
gagtggcagtgatttattgcatactcacatatacatacaggctgacggccaccctgccttcctagccaccatgtgagtacaaacacagttcttctggaggttttatctctatgcccttccccctacagtgggacttcttggaagtctgaaaagtggaaggtcacagagacccatgtagttgggagagagaagacaacaactatgtatgtcttgactgaggcaaaagagtcttgaggccagtggtaatcgagtcctgaacccaaggtcctccagaaaggttttcaccaactatctgatatgacatcaactttacccttgggtgtgggcagtttttccttctccttgactctcttctagatggctggcacagacagtcaggtggggctgtggttctgcactcctgacccacaagaagctagggagtaagataaccatccagccatagctcctgggtcatggtangaa

SEQ ID NO: 526 - DNA, 367 bp, Rattus norvegicus
  Genbank Accession No. AA893032
acagtgacaagaaggcttacaaaggagaaggaagaagaacacattggacacctgagattgacaagggtcatttttggtccaagtgctgttaacatttttgagggagttttaaggcatttgggtctcagggtttgttagcttgccctattgccttcttagccagcagttctgagcaactctcaagctttgttaccatctgaggtgcatcttctttctgtgtacttctatttctaactcattgttatgctgttactctctggtctcccatgtagagtactcaggaggattttcttgatctttccgctccattgagaacatctttaattgtatgaaacatcgcaggttgtctttatctacagagtaaagg

SEQ ID NO: 527 - DNA, 481 bp, Rattus norvegicus
  Genbank Accession No. AA893035
caaagatcaccagttagtctttttaactgtttaaagattacatttacttatttgtgtgtgcacatgcgccccatacctggggaggttagaggacaagtcgatggaatagattctctccttttacaatgtggttcccaggaatcaaattcaggttaccaggcttgactgcaggcacatttacttgctgagctctagtctcttttctaacaattcttacagttgtaccacacatactgtgtatctgtgtttgcatgtatagtagtttttacatattaacaatttaatgtctggtgagtgacatgagaacaaacttctccaacccataaaagcaaagctacagaaagccagaggaagtatgcctgtgtgcagggttgtggggggtcaggtcacaaaacaaacctactgactaatagccatggatcaatgagcctgcaaaatgaataggagagagtacaatttagccaaatgtgttacaggaatc

SEQ ID NO: 528 - DNA, 479 bp, Rattus norvegicus
  Genbank Accession No. AA893088
acgatattgtacagtttctgaagctaataacagagttctcttgcatgtacatttaaagcatgacaaaataaaacgtatttcacaaaagaaattcatattacagtactgtggggatcagaggcaaagagtgtgcacttgtgggtgatgaacaatacattcgattcaaaagaataatctgtgtgaataacagcttcttggctataataaatacaggacaggttaagagcaacacctggagtttacggatacaagacaggtgttttgtaatggacgcacttaggaacggtagagcgctcttgacttggcagcggcatcttgctagctctacaatcattagacctttttgagcactgcagatgaggctaccctacattcaccagcccatacctcagcgtgccaaccgcagttactgcccattttcccctgggtaactagtaccaatgttcaagcaaggtttcaaatcagccgtacctttaatt

SEQ ID NO: 529 - DNA, 358 bp, Rattus norvegicus
  Genbank Accession No. AA893127
gcccagccaagatggtcttattttaagataccacacactacagaagagaagaccaaggcccaagccatgctgagaatcaggacaaggacaaagaaaacagaggacattgggggaaatagagctctgctcagtattactatctgctgtccaggcagacaagggcagctggatccccagctcaccccatagacacaggagccccgtgtcttgaatgtactcatgtcaaatagtgactgtttattgaaagaagcaatggagggctgaggttgctgccctcaggcctggatgtggctctttgcactgaaagctaggtagtagatcactatgccaattgctgcagccagcacctccgtggaga

SEQ ID NO: 530 - DNA, 644 bp, Rattus norvegicus
  Genbank Accession No. AA893169
cttcttctcttagacacagtgtacacacgacagcctacacatggcacatgatttagcaaaataaaacattcacgatatgattgaaataacaaagtgtctcagctacataaatgactttaaattatacagtaagtgaacaggagaaagaaacaaagctatagcttattgaaagcgcaaaaacggctctccaatgatgtgactttacgaaagaccttccttgcccaggacttctcgccaagacctcaacagccacctggggccgtggttctgccaatggttttatcttcaggttaacttcaggtgcctcatacttaggcctcacctcaagtctgtccgggtaggagggaggctgatcacacagggactgagaatggccagagacttcttgggaaagaggctggggtgtacatacgggagagcattgagcagggtagatcaggagcgccatattaggagactctgaggttgaaagagacaacttccaacagtaagtcagaggtttacctcttaagaaccactggcttgctgacctcggctccttctgccccacaccatggaaagcgttgcgccttctgctccctgtcagcacaggggaaaggatgccggggaaatgaaatctacccagagggaaacttgacacccat

SEQ ID NO: 531 - DNA, 491 bp, Rattus norvegicus
  Genbank Accession No. AA893183
tctcaacctatcagaaagacaaacaaatcaccgacaacaggggtggggccttgaccttttgaggactgggatgcttttctccttttgctatgaggaataaaactaaaaattatgtcactgagtaaaaataaaagtggggagaaaataattctctgggtaaacagcttttctgatattttatatgttgtttttccttaactgtcactttccttttttttttttttttcatttttttcttttttaaaaagacacccgagttgctttcaagaataagcatatcacttaacccttagaaaattaggcaggatgccatgttgatggaatagggattggtttaggggacaggaaaataagctacaacttgtagcctctgtccaaagggaatgtgccttcagcagggcctgtgagatctaatgtgaagagagacacaacatgtgagatgggacttggtgtgtgaggcatggagtcattggagactcttccctcgtgcc

SEQ ID NO: 532 - DNA, 654 bp, Rattus norvegicus
  Genbank Accession No. AA893191
ggtacaaagtttataacacacctttccctgaaacagtagcttgaagtgttttgaaacagatggggatggcagatccaggacttccaatgcctggctacacatttggtccatatggacaaagtggggacaggatacgacatcaatcctgagggaggggcttggaggcctcaggcagtaatcttatgcaggcttgagaaaaagattcagaccaaaagctacacgtgaccttccaggcaacccagactcctaggcagcccaagggttggcagccatcttcacacttgtgatccttgcccaaggccaaggccaaggccaaccgccccactcaggcaaacaaggtattcactccctgagggccatcaaggagggtgctgacttcatgaacagtctcggaccaaccattcctggggccatgctgggatggcattcctcgaaaacccattggtgatgggacatggcgccctcagagcaggaccgcatctttggaggccatggagtcaaggaacaatgaggacgggccctgcccacactcagagccagacaggcaccaagaccctggtccacagtcaccagcaggaccctagggcagctccaaagccagcagtgcctgatcagggacaaggggccaacacgtgactggcccacaagtggctt

SEQ ID NO: 533 - DNA, 667 bp, Rattus norvegicus
  Genbank Accession No. AA893193
acaatgtaggaaaatttaatacatactatataaacaacattatttacatcagaaatcaccaggacagtggcatttttcacaaatataaattaattactgtttagtcaacaggtttcaaaagtccacaagtttacaagaaaaaccatctgtccccaaatgggtagggcacatggactaaagcagcctggacccttggcatggctctcttcacccaacacagctggcctcggctaggagacacaggtgctgggcctggaccacggctcctgctgacaagtgggttttggtctgtaggattcagtgttgctgtgtgtgaacacttaggtgaatcacctttgccctgcaaagcctgatgtatctgtcagacacaccaggtcagagcatcagcagcacagtgagaaatgtttgcgctccctttgtggggcggaaggaatgactacacagaggataaggagggaacatcaggttgggctcctgcagctggccaagtctgagaggacacagtggtcagcagaggctgcatcttccttttctagggccacagtgcatcataggacttcaggccttgacaacactcacacctaacttccccaagttttgccacctcctcaagaatgagctgcccaaagccaggctccaaagaactccactggtaacaaatgtctgc

SEQ ID NO: 534 - DNA, 608 bp, Rattus norvegicus
  Genbank Accession No. AA893210
caaaagattttatgaggggtggtttaatgacaatatgaaaaaagcacaagtgtctgtttcagttaaaactctgccctgaagatgaaggggctatgttcctccttgtttacgtgtgcagagcaaggattgccacagttctggtcagggtggtgactgatttgtatgtgccatcataatctcttactggagtaaatggcaaactttagtcatccagaatatcttcatccagattgatgtctgttgtatcaatatcctctaattccatggtatctaaatcatcttctagttcctggaaactcttttcttctttgtgagtggtttgggaggccatgataactgggctagaagctggtttcccatcaggttcctgctgagctgtggctcttgagggctgaaagccttttgcctcttccataacatttctctcttcatttggcgtgacaagagggtactgcttggctggccacagatccgcatgtgtctccttcacccattcttcaacaacaaaggcttcttttaatccagggaaaaggttttcatactctgtggggtcagcgagggattctgctgctttctggttgacttttgagagattctccctccacaac

SEQ ID NO: 535 - DNA, 556 bp, Rattus norvegicus
  Genbank Accession No. AA893213
tgagagggagcgggagtcgctggcttctcccctcagagctcagctcctatcgtgcctgtccaggacacaggtggagtcacgggtcacttgctggacagtgggcaggcctcttgattcctgggagtcactaaaaaggctttgaagtccaagcaggatgtcagagactggaattcctccacacactcctctggagggtgtggcgatcggttgtagaggaggaaacgctggtacccctgccccgtctctttcagcatgattcctcctgggcatgagatggagaagaggtctgttttcatgtctgggcgcccttcagttctgagttccgtgtttcctttcccttcagtcaagtggtacgtccatttccggggcacacagaccccgtttttcgtgcgaatggtagcgcgaagctggagctgccttggggcagagccggcggccatgttgaagacaatattgtctacctggtcaaaagttgccaactcttccatggtgggagccgctccagcgataaagtaccacaggcccaggtggggctctggggtctctttgtcgtcca

SEQ ID NO: 536 - DNA, 645 bp, Rattus norvegicus
  Genbank Accession No. AA893235
gagacagaatataaaatgtttttatttcaaaatgcaaaatgatattcgttgtaataataataataataataacaacaacaataaaaataacagtataaaaagcatgtctccttccctaatgcaaagtgacagctccttgatcgctcccacagccttggacaaatcacagtgcatgctgcacagcagcaagtcagtcccagatcccttgggtgatctgtgcagggtcagttctggattcggtggcaccttgaaacagcatgtgactctctctcgcccacctcagtcatgatctctctgtgtctcgcttctctgccagtcaccagccttaagaggcatgctgccggagggacagggcccggctgcacaaagtcgcctcctgtgtcttgccttctgctatcagggcctgcttgtggagggactgctgctcacaagcatcccgcagctctgccactgccgcctcctggtcgcgcagacggctggcagctgtgaaagggctgcacacagtctccactagaccgagcaccacaccgaagaacgctagcacactgcccagcacgtacagcttcactagcttccctcgggacttctgcgtcatcatctccttagccagaaggatcagctcctgcacactttccatctgagctc

SEQ ID NO: 537 - DNA, 635 bp, Rattus norvegicus
  Genbank Accession No. AA893237
ccaaagaaacatttattgaaacacagggcccatgttagaggctcctgagccccagggcgaggcccacaaggcagagaccattgctcagcagacaccccaggttgcagagggaagacaggccatggtagtagaagaatttctgccggagagcactgtacttggggtccttctcccgcagctggcggtaggggtcagggccctggaggctgcctggcacctctgtccccaggcctcgctctttctctatactctgcagggcccacatggtagctgtggtgcgagcctcgagccagcgagcattgatggtagccagtgtgagactcagaagcagtagggtaagctgactgatttcccacagcgtgaggttgatccaggcccgctgtggtgccaagatgcagaggttgatgaaggcacaacccaaggagacgtgaaaatagactgggaagagcttgctctgcacaagtccaaacgtgtgcctcgggaggctccggaaaagcaggaagcctgaggcaaaggtcacccacatctgcatgccccagacaccagacaagaccagcaagtggaccactttaatcagacttcctgggtcctcaccttcttccattctgccgcccgttggagcaccggaggtcagc

SEQ ID NO: 538 - DNA, 643 bp, Rattus norvegicus
  Genbank Accession No. AA893242
aatgccgtttatccagtctcagaggtagcccttgaagggaagaaacttttgatttgacccttttttctaagatttttgtttcaggacctgaattaagaaaaatcaaaacaaaacaaaacagaaaaattaagagatgattttttctttctcttgaaagtttaagagagattctcagttcatcttttcatgactggaactttctaagacaaaccacaaagccatataccaagcagaaatcagagaacgaagcccagtccccatcagctgcaggtggaaaccacggagaagccagcacagcaagtggctcatggttaatacctcaggtctgttctgagaaaagatgccgatgaactgctctgagcaaggtttgaaacccttctggatcagcgccgagcctatgcactcagccatttctgcaacctgtttgtaagaaatccactcatatggctggtttggctttctagaacctaaacaagggccatcatttgacacctgaatccccctctggaagccatcgtacatcgttctgacatcgtcgtagtagtacagcaagagcttgtcgtcctcaaggactgctgatcttcggacaccctcagtagtacccgttactttcacagactgcatggacagatcacatgggggc

SEQ ID NO: 539 - DNA, 540 bp, Rattus norvegicus
  Genbank Accession No. AA893246
cataagtcatatttaaatgggcagaaccacttccattacacacagacacatcgtgcaaagaaaagtaggcatagagttgagtccacagtaacacaatggctgcacagcctcagacaacagtgccaaggtttacaagtgggtaggaaggaaggctgctcagcatttgcctgagaccatgaatgtttatagtaagtatttcctaaagttttaaacacatcagtcaaactagtgtaaataggatggtatgactctttcactggggagattctgtaagtgctgggtgggttttacaaatctcaggttgctgaattatgatgcaggaaaaatggtctcacacagcattctgataaatcttacagccagatgaactcttctgccaaaataaatacccgcacataccgaacctgcacactgagttaaatgatgctcagcctgaagggagcagcgggcagctactcgaacagcaggtcctcgtccttctcttccgccaggaggttggcgggctccatcaactctccagctgctctccgccgctccaag

SEQ ID NO: 540 - DNA, 500 bp, Rattus norvegicus
  Genbank Accession No. AA893247
cacggggtcacagactttaatgtagtgcattcgcagggaaggccagccttcgctcccaggcccgctctcgtcctcagactttaatgtcatgatttagaagatgcacgttattgcctaaatattactctacacatttccatcagtgctctggaaacacctttgcttgctacttaatttacaccataattactgggttacagctttagctcgttggcaattttggaagcaatgtttttgaaagcgatggatgtccctgatatccgcttaaaccggaccccattcagagacagtcttggcagcttacagacttccatctcccactgcaccaggctctcagcgtgcccgtcgccatggacacagaagagcaggaagcgctccctctgctcatagtcgcaggtattggcgtccagcactttgcggatctcccgcatcatgtcactgggattcatggaactagtggttttcatgctccaggtgaagcgcaaggaccgaggtttggc

SEQ ID NO: 541 - DNA, 480 bp, Rattus norvegicus
  Genbank Accession No. AA893280
gggtccaaaggtgatatttcttcacatggaaaaaaactaaattcaagccacacaagaacatgccttgagggaaacagtgatgaagcctgctcggaccacacaggagcagatgcccattcagagcagaggccgcatgaacaaatctttattcggaacagacagacgtttacagccaataagaacacaaaggccatggacaagactgtaagcgcacctgagctttaaggttctggtgaggtcctcacaaaactaacacactccacataccagccgggtaagaagaactcatgtgtcagggccagcgggggcacgaccataagtgagctgtgaatgaccataatgaggacctttgttcacactagctgcttttctaatctaatcaggttaatttcaatacagcaaataaccgataaaaaataaaaggtgccacctggtcagcaacatcatacactggtgacaagagaacgttactgagttgtg

SEQ ID NO: 542 - DNA, 452 bp, Rattus norvegicus
  Genbank Accession No. AA893327
  misc_feature (1)..(452): n = a or c or g or t
catcttgatttttgttgtcctgggacatttttttaaagaccttcaagtagtttggaaacctctgcccatcggctgcttcctccggccacggccttcgcaggcgtttccccaacctgtgctgtggagcgctgctctcgtctgggcaggagggctgctctggattgtactggagtgaggggccagctttgggaacttcttccgattctcttagttagcatgctaccacccaccccagcctctgctaggtcagatgtgcaagacaagcagggctgagccggcaagaccgtgacagtgtaaaacggttctagaagctcctgtgtggctcaagcctganggtggagtacagcctgctgagagccgaggggtctgagcaggccagcactcagtctgcagccacaggtggggattttgggaaatgccacagcccgttccacagaactggatggtgatca

SEQ ID NO: 543 - DNA, 466 bp, Rattus norvegicus
  Genbank Accession No. AA893453
gagctcttaaattcattgaaaaccaataatgggagaagtaaaaccctgaaaaggtgcgtatagtgcacgtggacagtagccatttgtattctgaatgcaaagattcctgtcaatatgaaaagttcgggtcgatgttaaacaaactacaaaaggtttgaacaggtcgctcacaaaaggtatttaggttatcagttaccatgtgaaatattttcattgtcgtaacacaccagagaaatagaataaaaatgggggacagtatcactttacacctacgagaatggctaaagtcaaaagaatcgacatgcggcctcctgccccccgcagatgtacaatgtttacacctgacacacacaggtcaccagagtctggcttcttttcatcgaatataaatacctgctttccccaccaccaacaaccaaccagcaaatcagtgcccgtatctacttaaagaaagttaatgggtgct

SEQ ID NO: 544 - DNA, 548 bp, Rattus norvegicus
  Genbank Accession No. AA893515
  misc_feature (1)..(548): n = a or c or g or t
aggacagcaaattgtctttcacagcagtgcctcctcatctgataacacagtccccatttctaaatgtaaagatttaaaataaatcaaaatgaacattaaggcgtacacacagctgttcttaatcaggataatttttactcatattaaaacacatggaatgttggcacacaactgcagctgctgtagaaagatcagatgttctgtgggttactgaagctcgctaagaacacaccttacatggtttccgctttacaaatctaagtgttgagaaatgtctaaataataagtaacaattaaaataaaatgttttatttgtaaattatgtacagaatacatttttatgttatgacaaggagctggggaggaaggaagcacctcntcgtccactcagtgcccctcacttctgctggagatgacctttctctggattgaacatacaagtcagttgggatttcctaagctggaaaaggtgaatctgtagctgaattaaaagggttgctgcactgttactagctggtctgtttccacaagatgctgttgatccctgc

SEQ ID NO: 545 - DNA, 630 bp, Rattus norvegicus
  Genbank Accession No. AA893552
cagagatgccatttggtttaatcagcgtggtccccagggaggtatctcccactttccagtccatctagccccacgcctccctctaccactcttgggagtcaggggccctttcccaccccaagccatgggtgcagagttattcatatccaggcctacccagtcacgttctcctgctggtaacagaccacctaatcctaggtctgctatgctgtggggttgaccaccttccccatgaagaggatatcctgggagctggtggaatacaatatcaccaagaagggccggttgaatataaggtaacgtttcttgggctgggcagagaaaaaggtggaaaaggagccggtggctgctgctgcctttgtgccaacttcattcacatccaggacggtcttatggaaaactttggataagtacaatttctcctttttgctgatatttgagaagttggcatttggggtgaacagatcctggaagcccaagtcaggcaaaatctcatccaattcataggaatttgaaatggagaatttagggagctgcaatatgagctttctgtaaaagaacctattctgcagcaagcgtttccaccttagtagcatgcctggggacagcacctgctccacctcattcaac

SEQ ID NO: 546 - DNA, 461 bp, Rattus norvegicus
  Genbank Accession No. AA893569
ccaggggggaaaaatcttaaaggatgagaggaacagctctgctaaaacacagacaaagcgccgttccacacaaacatcaatcctcagaactcaagtcactctgaacacaaggaaaacagccacctcacaacgtggccaaagctgccagcaaacctgggagcggctcaatcagcaaagtgcaggaacctcacttctgttccagcccacccccagccatgaagaacccccaccaaagggccagggagggtgaggaggaaccgtgaagaggaaaggaagcatggggacaggtacacacactacaatggtctcctccttgcccactctttattccagctgagtagttcagacaaccgtcctttgttcttgatctggctggacacacctggatcgtgactactgaccctcatccagcttcctctcaagcttgaggactatctcctatctgtaacttttaagtccac

SEQ ID NO: 547 - DNA, 443 bp, Rattus norvegicus
  Genbank Accession No. AA893593
ccgtagtcttgtggggaaaacccattggcaaatgtacagttgttccatcagggggtgctgctggctgtgggacccccacatccctgacttgcatgcattgtgctgcaaatgttcacagctgatctcaggagaagaagtgaaagggcagagacccccaagagcacttattttgagctggccataagcccagtgtgtgggttgcaggaatccttgtgggataccagacaagggctcaaactaacatctagtgcaaaggccagcagactcctagtgagcatggtttagagtgcagaagacccaagagtgcctcccggagagaaaagagacagcgagcagggaggggaacctggttttctaccctgctcttcgaggttcacagatgtgtcccccctggcagcagggcagaaaagacctgtttcctggctcaggaaaggggcttcaac

SEQ ID NO: 548 - DNA, 346 bp, Rattus norvegicus
  Genbank Accession No. AA893658
agtaaaaacacaccaaatgacttttcactcggctgtgcgacaggcattgtcttactacagctccatttccagaacccaataccaggggctgagagtttaagtataagaaaccagaaggacagttgaccactctcgtttgctcgatggctactagggccaaacctacattttaaacacaaggaacacttctaaaacgggcgaaagaaagcctcgcgtccgctctaaacttggcttcgcgtcattggcgtccacacgtctctgcacgcaagatgttacttcctcttggttctgtggcccacaatcgcttcaaactgaatattctgtatacggtttatagcttttaagc

SEQ ID NO: 549 - DNA, 503 bp, Rattus norvegicus
  Genbank Accession No. AA893659
actggaaaacatgcagcagcatggaggacttttattaagtttataaacaccaggaactgtaataaaatataaaatacagagcatctctttttttaaatatcaagtttctgaatgcttcattcgtcctttggtttcaaaccatacaatgcactcatgatacactgttcatgtggcaatgggacagtgctctgcccaactgctggggaggaagggtgctgtaggaataccaaagcacggctttatagaaagggaagcattgaagcaaaaatactttctgaatatatatgtgcatatatatactgtacattgtaaacaaacgttcggagtaagaaccaacacaggccaagaaacggtttccagggaaaccaggatcctcttccttgtccacagcggaggctgaggtggggcctggtcctctatttgctcatgtgcttagatagcgtggagatgactaactgatacattcatttgctaatggtctgtccatctaggttggctggctg

SEQ ID NO: 550 - DNA, 447 bp, Rattus norvegicus
  Genbank Accession No. AA893699
caagtaggttaccattttattgagatgatcaaaatcttaataaaacaacaacacactttactaaaaactaaagaacaagacatcttccctaagaatttccaaaaatcagccccgagtacaagcatggacacatttgtgtcaagcacagaagctaactgcagtctctcctaccctaaaatcttgataacaatcccttcttaaaaacagaagcttcctttccatccagcaaacaccctgtcacagctccacttccgaaagcagacactgaaaacacttaacaataaataaggaaagcggtcactggcttgggtgcgaaagggaggggagaaagaacaaggactggaagctcacagctcaactgcacgctgagtgagctccttaattctgtccatgcaatggtcaacggcattaatgagtaaagggatccagctatctcctggctggggg

SEQ ID NO: 551 - DNA, 533 bp, Rattus norvegicus
  Genbank Accession No. AA893708
ccatagaaaacaattttaatgcaggtattacctcagatgcagtcagcagtcaaattagtttctcttctgaataaacaaatgaaactagagttgtttttatatttataaataaaaaatatacaaaacaaggaaaccagctaataaacataaggactgaacattagctggtgtcattaaagccgtacagtgagtatgaaatccaaaaggtaacctcacttagactttataaatggaatgtcccaggctgtgctccagataggctacttggtctctgcgggaacagaaggcccatcttgtggggtggcagcttctgccgctgcagagacaggctcggctgcagtagtaatgtcacacagagcagaggtatcttctgtgtgactggaggcagcctccgtctgattggagcagtcaggctgagaagttggggtctcttgactcaggctggcatccgttggactgggtgtgaggttagcttgaacagaccagtttcctcttctgcttccatttctgtttcttggctctgaacctcctca

SEQ ID NO: 552 - DNA, 487 bp, Rattus norvegicus
  Genbank Accession No. AA893793
gacaggatttcctttagcagttatttgaacacagttatttgtacagctgcagacatgacagcaaagccacaggctctaaagggctgtaaggcttgtcacccccaggggacagaggaaagggaaggcaaaggacggagagagggcaaggagagagtcttttaaaaggaatctgagatgtctttcaatttttcaattataagaagaaatgacaatacaggaagtggtgacatctgacaatttaagcattttatccagaaacatatatctattccacagataccaaatccattaccatataattgagtttgaaaatatacaaaatatttgttgttcttacatactgaaattaaatcctaattttaaaaagtgcacagtaaaaacagcgtaaggaaacctacaatccatgggtatgtctattgttctccatttgactgtcaacatgaaattctgcattcgcctcgctgtttacaaatgtctcaaggtcaca

SEQ ID NO: 553 - DNA, 419 bp, Rattus norvegicus
  Genbank Accession No. AA893860
gaattcatacaaaataacctgggtacagaaaacatcctccatgattttccattttggagagagacatttaatggcccccatctaacagcattctctaagacttgtccagaccagaaaggctgatccacgaagactcggcagaaccactccttgctcatcatgaagccatgtttcccagtgcacaaggtcacgtgatgggcacccatcttcctctacactgatccagctcgggccatgtgcctgttaaaactcctcctctgcctgcttactgcgcaactgcttgagctgctgcagccgctccactgtttcccccacagtccgctctccgtggaccttgttgtctctcgtgcggatgttcacagtgccactggctttctctttttcaccaacaacaatgatgaagttatactgtgccaact

SEQ ID NO: 554 - DNA, 417 bp, Rattus norvegicus
  Genbank Accession No. AA893870
cctactcaggctttattcaaagaccaagaggtataggtgcaagggagggaagaagggcctggtcagaaggcaagcccggcaggaggcggcttaaaacccaaaaggtcagaaggatcgtgaggccccgctttcacggtctgtattcgtactgaaaatcaagatcaagcgagcttttgcccttctgctccacgggaggtttctgtcctccctgagctcgccttaggacacctgcgttaccgtttgacaggtgtaccgccccagtcaaactccccacctggcactgtccccggagcgggtcgcgcccgcccgcacgcgcggacgggcgcttggagccagaagcgagagcccctcggggctcgcccccccgcctcaccgggtcagtgaaaaaacgatgagagtagtggtatttcaccggcg

SEQ ID NO: 555 - DNA, 392 bp, Rattus norvegicus
  Genbank Accession No. AA893885
caggaacttggtactttttaaaaattccaaatctttgcacacagatcagcactctgcttactctggaactgcagatgcttggacttcacgattgtcacttctctccttgtatcacacagcatagaaaacccaagtcctgatgctccccaaccccttctgaactactacagctactctgaccagctgctgtctgaatacattctgcagtgtgggggaatagctataccaagttatgccacacacattctggaatgcaccgtacccaggacacaggtgagtttccctttgtgttctgtgtggttcaagccaacactgctgaggttatctagtccctgagggagctcagaagtttggtaaaggtcaaagagagactccttaagcattcagcagtg

SEQ ID NO: 556 - DNA, 355 bp, Rattus norvegicus
  Genbank Accession No. AA893905
caaacaactcaactttatttatctggaaaatggatgagttcattcagtggtgtttaaagcctgagtctgcacgttctccttagaaaggtcagctatgtttggcaggggctctgacggtttgaaatccgcctgattttccaactgggcttcaggccggtcaccccagaggagatgcttggggtcattgaggaaccgctggcttcgctggcatgtcagacaggtctgtactgtccagcgttgtccctttcggcgtctctggcgctgcgtgcaggtgaggccagggatgaggagagaggagcagtcgcgacagagcgtcctcttcacagaggggtcctgccgtaggaccagccgcttc

SEQ ID NO: 557 - DNA, 416 bp, Rattus norvegicus
  Genbank Accession No. AA893939
acaaacaaaaataaatcccagagataatgaaataaacatattctctaaagtatcccatgctggtttctctgtccgagaatgtggtagagtccatgtttaagttcctggaacattcctggatgctatgaagtctccatcttgtaaccatgcttctccagctcagcgcgtaactgattggagaagtcgtcttctacattgtcatcatcccaattatcctcccagacatgtgcatcttcatcttcatctaagccggcccagtcttccgcgggaaactcctcgaactcgtcgtcctcttcaccacattctggataacaacaaaggaaacaacaggtcacatatcttacggaccatttcctcaccatcaaaaacatctggattcccctcagccagttacaggctagatgctcttgctgttt

SEQ ID NO: 558 - DNA, 618 bp, Rattus norvegicus
  Genbank Accession No. AA894080
gaggactgcaactttaaaatggtttatttttaataaaatcttagtgttttttccctgttttgtctattctatcccccaattaaaaacaaacaagaaaccaaccaaatagaaagacctgtcaagagactcgggctgcagccagcacttgaggcatggcttctggcttctctaagtactgagagggtcagggagcttctggcttcctgaaagcaaggtatctgagctagtactatattgtcagggctggggtgaaaggacatactaaggaactatgtcagttacagtacaagaaacagtagccagtacccagaggactcagttgtggtcaagtaatgtttactatctgggtctcccagaaccccttggggtgtagctacaaggacatggccagaaaaggtaaccaatccaagtccaacatcttctaatccaagtgcttcaatagaagcagccacctaacacgacgctgccaactctggcagatggtgttgggaagacaaaggaagagcaggattacgtgctgatcagcagctccacagagaagccagtatggctaacagcaaaatatgaaaagcttttagccagcaaagggccagctgagcccaggccaaagtaactttt

SEQ ID NO: 559 - DNA, 555 bp, Rattus norvegicus
  Genbank Accession No. AA894086
aaatcagaacaaatgaagtagcagcaaaagaaccattcggcaatctggcttcactggtcctcaaacaaggagggaatgcagccagagatacatctctcagcctcagcctctcagaatctcacttgggccctaaagtgcatctgcttggtggcattgttcttcatcccggtcttcagcatccatttcgacttcatcctctgtacatactgcatgtcccgttcacgcatgagagctgctcctaaaatcatagaagtctgcaaactccagcgcagcatcaccatctgtaaagagcttacagtggcttttgtcattcatgtgtgcctgcacagcttctgtggaatagaaggacttccctttctcattgcaccacaagcagattttgccaacaccaactttctctcccaaatatttaattaatcctttcaaatctgaaagatactctatatcaggaataaaaaagctgtggactttagtcatatgagccacattcttcacaagggagcttgaatgatgggaacaacataagcagtctgttattgggatggcacctaaggg

SEQ ID NO: 560 - DNA, 350 bp, Rattus norvegicus
  Genbank Accession No. AA894104
aaagtcagagctggctgagcttcaggggtacagcaacagctcaaggaagggtgaagctgtctgttggtccccaccaccgcgagttggggagggggtttcatgccaacagctgaggctcctcgcagctcccgggcgatgctcaagcagggagagggtggtcacggggagagggaagctcctgacgctccgacactgctggcttcttctccccactcctgtcccttttcagcacagcctggctacccagctggcctggggcagagcaaaggcccacgaccagtggagggacgtggatggggacagagcaccaagggaaggggccctcggcccaagggaggagggaaatggcc

SEQ ID NO: 561 - DNA, 494 bp, Rattus norvegicus
  Genbank Accession No. AA894130
aaaaggcccactttattaaacacattctttctttcagaatcctgatttttaaaaaacctttatctactaaaaaacagacatataaatcaagcaaacagttaagactacaggaatggggctcctagtgacgctgaaggaggcgataggtggggaagggcagagggctgtggggagggaggtcaggaagaggctctacgcagcccacaggctgggaaacaaagaccaaactccctaatgatctcaggcacaagcgttgctctgtcatggtgtcccccaggctctctgagaactggggcctctacaagacacaggtattcttcaccagctgctccttgtcatccgcagtgctccaaacagtgcggagagcacgctcctgctttctgcgaaccattcggatcaggaacaccatggaggatcccaggaggaggatcaggaccatgatgaacagccccaccaggatcaccgcttttgtgcccggagtcaggaaaggatac

SEQ ID NO: 562 - DNA, 455 bp, Rattus norvegicus
  Genbank Accession No. AA894131
aaagatatatactggcatatctgtgagttaggtgcactgcccaagtccagcagtggaaagattacaaaagatacttaagaaatattcacatagaaagcatggtaggagaatgtcctttgtaaagaacaagtgcattccgtacaaatgagagggctgtgatagtgtttccaggctctagagcctcccacggggctgaggtatactgactgacaaggggcttgccggcttctttcttgtccaacactcactgaagtctcattcgcttctcagggggacctttagtgcttacagtctgctgagcgctctttgcgctctccttctcctcggactttacagtttctggcaggggctctgcctctttctttgcctggtccactgggacaggcttctctccagacttttgctgaacaaatctgggtggaagtttctgtctgaggtctatgagtaaagcatcc

SEQ ID NO: 563 - DNA, 447 bp, Rattus norvegicus
  Genbank Accession No. AA894148
ctcagatgctttattgagtaacgagaggaggtatcgtcacccacaggacatgtgtcctcaagctggtacgagaagtgcttgggaacagagtgacagacaggtggtggggcagggcaggtgtctgctgctgtgatgggccgaggacaccagggacagctcagctctccagaggtttgggctgcacctgctcctggacctgttcctgaacctgctccgggagggggagggctaggggctggtctgggctcccctttttttgcagggtcttctttccccgctgattccgccaagcccgttcccttggctgtggtttcgctggatagtaggtagggacagtgggaatctcgttcatccattcatgcgcgtcactaattagatgacgaggcatttggctaccttaagagagtcatagttactctcgccgtttacccgcgcttcattgaattt

SEQ ID NO: 564 - DNA, 670 bp, Rattus norvegicus
  Genbank Accession No. AA894174
ctgagaataattttaaaggaaggtgaaactttattatattttttattatagaattagaaaatgtcaaaaataattgtttggaatcacaaaaaattaaaaaggaatataataattgattcatcaaaaggcattctagctgctgttagcatattttctttctttggattatgaacttctatgatttcaactgaatacttttgacagtttccttaagatatgattttgacttattttttcttcagtatttctgtcatttcaggaaccaccttaaataaatctgcaactattccataatctgccacttggaaaattggagcttctgggtctttgttaatagccacaattgtcttgctgtccttcatcccagctaaatgctggatggctccagatattccaacagcaatataaagttctggagctactatttttcctgtctgaccaacttgcatgtcattgggaacaaagccagcatcaacagcagcacgggaagcaccaactgcagcatgcagctgatctgccaagtcatacagcagtttaaagttctctccactcttcaagccccgaccaccagataccaccactttggcaccagttagctctggtcggtcactttttgtcaatttctggtcaagccactctgatattcctgctgatgaaagaacttggtgcc

SEQ ID NO: 565 - DNA, 589 bp, Rattus norvegicus
  Genbank Accession No. AA894188
cacaaataaaaatactttattatagaaaaagcatcccatacacaggattccgtaaacactggtaggtgaacaagtgcaacttccaaagtaaataaaatgtaagaggcaaaatccacacattgcccttaggggagaatgtaattctccagattagaagtccatcagcagacactggagtggctctgcctcctaaaagggcagcagtatcctcctgagctcgttgcactgacctcagaagtcgctgatggccaacactaaaactctccacttgagttgaagcctgtgctcggaacatttatttccctaaggcacattctctgactccgagaagatgccccttcctggatttcctgaagagcactcgggcctgtacacatcagacattacacagcatctcctgaggcgctggttaaatgactgggttacccacttccctcctatcttcctcaaattttgccatcacccccatccgttacattctaacactgtgccccgttcaccaactcctggtgcaggcgttccctatcagctccacagactgcaacagcaagcaggtccgacctcaggctcagccttaacttttatcttg

SEQ ID NO: 566 - DNA, 560 bp, Rattus norvegicus
  Genbank Accession No. AA894200
cacagagagcaagttttatttggtgaaggcaaacatcatccaaaagaaaccagacaggcaaggtgctgtgattagggagcctctggggccacacaggaatctcacactgggcaaggagcaggctcgagacacgtaaatgtcctcagccattcagcaccatccggacaagctctgtaaagagatggggtggagtcagccaagcacagggctggggaggggtacccatgggccaggagaccacaagaccatgaaggtggcatgagggaacgtgcccatagcagccaaccttggggtcagtatccaaaacagccaccatgagtgaccagttctctctgtccctggttcccctcccactagctgttagcccccaccccactctaaatagcaagaacacagcagaggcagaaaggttctcagctacacctacagtcactgtcagccgccggcaggaggagcggcagtttggggtgaggtacctccaagctctccaagctgtccagcaggggtggaaaaaggactgtggtgtttcagcagcagaatggggcagttagctccccagc

SEQ ID NO: 567 - DNA, 630 bp, Rattus norvegicus
  Genbank Accession No. AA894207
  misc_feature (1)..(630): n = a or c or g or t
aatggagtgtgctggatgtctctacagttttgttcagatgactacagaacctggaaaagctgttgctgctgttgatgcataacacactgctattattggtctttttatataaatataaatatatatatacagataaataatttgaattttttgaaactttacctgtgctgtcaactttggaaaaaagtatccccgtttactgtgttgagttggcactgtaaagaaattaacagccatattggtctagaaatgttgaacttgagttttttccatttgtacaggggtaacacactgtattaaatatgtaaggtcttatctacgtgggtttgattacaaaaactaataaagtattctctaaattaaaaaaaaagatgtatgtgtactaagggctgagtcacaccactagaaatagtttttttgtaaaataaataacttaatcgtggggttcacattgagatcaaatatcctacaacaggtcggtttccaataattcctcaagacgtcaagtagcgactagctcctttccagcaatccagctctgctctgatgccatgtacctagagaccacatcacagattcacagaagcagggtgagggttcagcctanaggagtgcccctctacctctgac

SEQ ID NO: 568 - DNA, 461 bp, Rattus norvegicus
  Genbank Accession No. AA894234
ggctggtgacagtatggtggctcacacgacatggttccaaatctgtcactaccctccgtgaggcccctcaccggtctccagataccaaggctccagcaggcaaaggccgttcttgcatctgtgaccatggctgctacctgccttcatggcaggacctcactatctctccaccaacaggcttcacatttccagggttcctctcagacttgggccggaccccatctggaggtctgagcagcccgaggtgatggggcacaagtgtcagcagagtgtccgatgggcccaagtctagacattggccttacgggctgagctgagggggatctccttgagctccgtccgcatgcacaggtactccccgatgacggccatgagtgcaatgcacacagcttggaccagccaccaggtcagcgccgaggggaaacgggagctgtacagccagcagcccaggaggtgacaga

SEQ ID NO: 569 - DNA, 582 bp, Rattus norvegicus
  Genbank Accession No. AA894259
cacatacaagtgtaataaggttttattaagtaattaaggggacgcatcacaaaatagaagcatgcaacccaacagaaacggatctgggatttcgaggggcgggggtggaggcgcaaatcagtcacaaaaccagccacttcctcacccaaacgacaataaggtcctgtcagaaacggaggcagcaagtctgacagggctgtttgttactcctgggttttgtaatgatttccatggagctttcaagacccagccatacactcaggatcgagacttcatagtggatgccgctaaccccaacaagatggctacgaccgtgaaaccctgggcagcgatccgggtgcgcatcattagttgggatcggtggctctggccgcggtggaagcagtaaaggccataggtgagtgcagccgccgtacccagacagcctataggcaccattgggttctcacgggtcttgcgaataaacttttccttgaagccctctggattggtgtagaccgtggggctgaagccctcgataactggggccttggacggatcaaaaggcgcctctggactcacaggaccgggagccgccatacc

SEQ ID NO: 570 - DNA, 573 bp, Rattus norvegicus
  Genbank Accession No. AA894273
ggcgaggtttattacggcgacctattacagagatctccgggccgacacgtatcccgcgcaggagacagaggtgtcgaccccgaaactcaaaagtcagagggttatatagagaaggctagggggttttggcgtggatacatacaattggctcatttaaacatagcagtgagaacaaagcagaaagagtacgtgttagaagtcaggggctttcagcaggggtcaatcagccagtcgcagaggtctttcctccacccatgtgtttctgtcagtgtttgacactcctgctgtggtggctccaggtccggattgggcagcaaggtgaccagattgtccccaaccggtggagaatctagtccatggcagctgaccagtggtcccatcttttgggacactctatcagccactctatcacagtttaagtcctggattgggtgataattgttagtgcccggctggcaagagtgatgtgttccaagcagaacagcgctaagccattcatctcccagcatcagttactggtgcactgagacaggtcttaagctctacatacacagtctatacatatgtatacac

SEQ ID NO: 571 - DNA, 600 bp, Rattus norvegicus
  Genbank Accession No. AA894296
acaggggcacattctgctttaatacctcaactatctgtgcagatgagagatgagaaataacacagatctgaagacaagcgcatctcactcggagaaaaattgattagagagaaggcaccagaaactgtcttctgctggattgcatgtaaacattaatggggagactttcacagtgaagcaggaacttcagtatcactctacaggcgcacacccagggacaggagatggcctccaaatctttacagtgtagtgtactgtacctgatgctgggagacaaaggctcacacagcgggtatccaatagggcaagagaagggacagacatgggtgcgagccgtcaggtctgcttcttcgcacccccccccaaacagtggcagtgcctcccaaatggctgtttatcaagtgggaagtaaaaaaaatcaagatggagtcctaaaaggcccaggcgaatacactgtttctgtctgtgctcttcaatcaggcagcgtggatagttcctgggggagggatgtgccacatccagccatctctctaggtgatgacagtgggcgcagtgcggcctgtcctctcctggagctgggacactttcagagcaatgggg

SEQ ID NO: 572 - DNA, 530 bp, Rattus norvegicus
  Genbank Accession No. AA894304
taaagagctttatttggcttgtacagcatggactttcatacattctccattaatttgtcattaaagtgccagacatttctttaatcacgatgacatttgttaaagaaatcggaacttttctcaagacacatcggtcatgagtgaatacttttcttaccaaacccagaatgtaagccccctcacattgacctgatgggttggacaacttgcgaacagattcgaatcccctctcaccttgagcaccaaactaggctgggactaacacacctggggattaagaagccatgctatagagattgagaaacaaccaccccactggctgccgcctcgtcagggccatgccagggcttcacggtttgtacaggtccaacctttagagcaattaagacctcgcctcctctgccaccttttatctcaccctcccttactcacaaaagccgccaaagtcattacaatgaaaataaggagtgggtttcccgttacccaggtactaacgaggttcagtacaaatagggaagataaacgcaaaa

SEQ ID NO: 573 - DNA, 450 bp, Rattus norvegicus
  Genbank Accession No. AA899051
  misc_feature (1)..(450): n = a or c or g or t
tttttttttttttttttgagtttaaaaccaagtatttaatattttcattaaattgtttcaatacaattcccaacaaatgccaactgcaagacaatgtccaaaaactctgaagaagcaagctcccagacaaggaacaaggccatcatcttccactctagccacaatacttctctccatactcgtgccagtcagccagcctcatccagattatcgagtatttaccacatcatcaattttcagaggtagggtctgcacagttcagtgggtacttgagctcaataacatctccattcttctctttcagctgcccgtgatgctccatgtaatactggaccagttcagccaaggtggcaaacttttccccgccatagaggtcatantagtccccagtgttctgaatcttgatgtgggtaacggctccatttcttctaacagacagagtgaagtctc

SEQ ID NO: 574 - DNA, 430 bp, Rattus norvegicus
  Genbank Accession No. AA899109
tttttttttttttttttcagtcgactgttttattgtttgtttgtctcccacttgcagtgctggggagagaacccagggctttacatatggtaggcaagtactctatcacccacctctagttccaactcgccaatgcactcctcctccttcactctctgtccagtgttctcagtgagtatttggcagtgactcatggtgggtttacattagatcttgttcatgaggcctcatagtttttatcagcaccttggatttccttgggttagtgtggcaatttccatatatcttgcaaaccaagagatatgtgtacactacttagaaattaaggaattggaagaaagaataaacagattcttttatacataagtaatagaataaaaaattgactatcctgagttttttctctctgtgcagtaaagtggtagccatg

SEQ ID NO: 575 - DNA, 477 bp, Rattus norvegicus
  Genbank Accession No. AA899113
tttttttttttttttttacttgtaatacatttatttttatatattttttaaattgcaattttcagaatatataagtatttctcatacagaaataagcattctgcattctttggtacagaaatcacactatacatgttgtgtgatcttttttcttttttcttttttttggagctggggactgaacccagggccttccgcttgctaggcaagcgctctaccactgagctaaatccccaaccccatgttgtgtgatcttaaagaaataaaatcactttgactatgtcaaaactagtctttgcccatccatttgtcccctaccacagctcccagtgagagttctagtcacagcaatgtatcgacacagacatcacatcaaagatacttcaaactcctatgtatcaaagtagtacatggcttgaagacagatggcactaaatacataaaacacagtacagataaactggaaccttaacacta

SEQ ID NO: 576 - DNA, 399 bp, Rattus norvegicus
  Genbank Accession No. AA899163
cggacgcaaaaggttttttttaaagttgaaggaagagacattccgatagttcacagagtaatcaaggttcatgaaaaagataatggagacatcaagtttctgactaaaggagataataatgaagttgatgatcgaggcttgtacaaagaaggccagaactggctggagaagaaggacgtggtaggaagagctcgagggttcttaccatatgttggcatggtcaccattataatgaacgactatcctaagttcaagtacgctcttttggctgtgatgggcgcatacgtgttactgaaacgtgaatcctaacatgagaagcagttcctgggaccagactgaaacgaattctgtcgaaaaagagaaaagctaatatatttgaaatgttccactttctgtata

SEQ ID NO: 577 - DNA, 519 bp, Rattus norvegicus
  Genbank Accession No. AA899197
  misc_feature (1)..(519): n = a or c or g or t
tttttttttttttttaaggaatttttattaaagcaagaattttataatccaaattacgtttccttgctcagtcatcagctgctccatagaacagaactgacgtcccaagctattccacagtaaagaattacaaaattaaagaaaggaatgctttaaatttttgtactttgctgaaaattcttttcccagggtctataaaacattaatttgtttttatattttactatttttttgtatttttttttgttgttttaaatcaagtaatctaggactagcactgtttgctagacctggcatttgctcggtacataaggttcaaagtttcctttcctttttttatttattttatattttgcaatgtttttttcataatatttaaatttttcgatgtttaagatatttttcttcggtgaagcacgagtttctgttcgtggtccctgatcaatttagacagttggnacaccagtggcactgttcactgctttctgggcagcctctttcgcttggtgggcttgcctc

SEQ ID NO: 578 - DNA, 461 bp, Rattus norvegicus
  Genbank Accession No. AA899304
tttttttttttttttttaaattttcatttctattcacataactttatttgaaaccaattttgactgtccaaggattaaagttcaaaaccaaacagaacataaacatccagtgtgcgctctggtggcagacagaagtccgtggatgttaggttatttgggggcttgagagagtcaggctttgttgctgctgttgtgatgatctttggtgtatttacacataaaatgctggaacttttactctgccgtcatcaggagagaacctgtttcaaactctctccgaggatggcttcctttacttgcaagtggaggaggaagaaagcatggtatttcacttctccgatttctgttcgtagtacagtgtgcaagtcctccctgctgtacgtcaccctctatgggtcctggaatcaaatgctcttttttttttatttgttttttttttcccccagagtttctactactct

SEQ ID NO: 579 - DNA, 354 bp, Rattus norvegicus
  Genbank Accession No. AA899407
  misc_feature (1)..(354): n = a or c or g or t
tttttttttttttttttaaaatgttttgttctcaagagttttcttgttcagttgaagttttcaaacaaaacggaatgaatgggacctcctgccattctgtgggcactcagtcagccagggggctgcatcaggtcactggcttcttgtgttctcaccactgtcatctccaggactgactgctaatgtgcagctctatgacgggcaggtagggcggctgtgttgcctgttcttggctgcctgtgctgttttggacagtgtcccagagttcatggccccttgttagtgttgtgccaaaggccttggttcagttctttgagcttccgtatgggagtaaggaanggacctgtgcctatt

SEQ ID NO: 580 - DNA, 504 bp, Rattus norvegicus
  Genbank Accession No. AA899491
tttttttttttttttttacgggagcacaacagtttattatttcttgcctgaaaatggtgcaaggtcagaacactcagagcgagcggcccttgtgccttcagagaggacagacccttcaaccagggctttccctgagatatggcctctgctttccaagactctgagggcggctcatacatgcagccaccccagagggagagcactggggcctggacagctgctgttcttctgtctgtctagctatggtccaccggcctgaggcatggccagcacacttctggcctgccctccacttcagtcaagtgtcaaagcaaaagcatctgcaaaggtaacagaccgtccttagagtctggtggttgggagaagccaccactgggcttgacaaggtggagtctgggccatctgtgggaaagttaggacactaagggtaacaagcacgattctggagtggacagcacgtgtgatctggagtttagttacttcagcctcaagtctctcccacag

SEQ ID NO: 581 - DNA, 365 bp, Rattus norvegicus
  Genbank Accession No. AA899546
tttttttttttttttttgattgtaccaaaatatttaatgaatatgctgttaaaacaaaagaaatagtaatacaattttactggtttatatttcagttcataaagttgacgcacaaactaccctagcacataaggtccacacacctagttttagatgggcttacagctatttgggttaactgaataggacagatactggaagtggtaagggatggtctggggaagagcaggccacttattatctccccactgtagatgacctcatcaagcattagtaaagccaacaggggaagaggaaataactcgtgtccttatatacaaacccaagctacctccacacagagcagaccatacagcagagaagat

SEQ ID NO: 582 - DNA, 522 bp, Rattus norvegicus
  Genbank Accession No. AA899563
tttttttttttttttttgcattaaataaatataaattttattaaaaacactcacatggcgttatcaggaatgatataataaacagctttaaaataaactgcattcataacattacaatacttacagtatttataaccaccctcagattgtataaacaaagccaacatctcatgaaactacattaaaaaaataaagcgtagaaaaatgcacacggagattcagttatcttagtgtcaaactgcaaaaaacttcctaacgagttaaccacactaccttataaagtgaactatacatcactgtgcgtcaatcaggatgaaaaagtcattcaagtaatgttgacaccaagcagaagcaatttcaagtgtggctatgccatcgagctgttcctacagaagcaaatcacagatctgcttgccacgagatctaatgcagatggggggatgtcattgcctttcttcctacatgatccatcctctcaaaccacacttactgctcctgttggccagcagtttgacaaatgac

SEQ ID NO: 583 - DNA, 445 bp, Rattus norvegicus
  Genbank Accession No. AA899681
tttttttttttttttttgtggtctaaagtaaactctttttaattgaacatttctgtctcctgttattctgcggggtgagaactgtccttccttacgcacaaggaccgtctcttcgccatcaaactgtcggtgaggggttaggctacgagcaagcccacagcctcttcagggtagggagctcagaccgtgattgtatttgcactgtttgagggcctcactgaagccctcacacagggttaggtcgctctgagtggtggagcagtccaggaactgcttgatctcataggcgcagggccccatctgctggaccgcaggctgggcaggctctgagcttcccccactgaaggcactggtcaaggcgctacccatgacatgccctacagctgagcccacagctacgcccgcggcggtggatgccatctgagccataagacccggctgtccc

SEQ ID NO: 584 - DNA, 470 bp, Rattus norvegicus
  Genbank Accession No. AA899721
tttttttttttttttgtctataatgatccaatttttattttttgtcttaataagaatgtttatacttaaggttcccctttaattcatgatacaaaagaactctatttttggataggcactatttttaaattacatgttatttgtgtgtgcatgtgcaggtgtgtgcgtgtgttggaggacaacttgtcagagttggttctctcctaccatgtagatcctgggggaaagacaatctcaagctgtcaggctgggcagaaagcaccactatcactgagccatctcaccaggtcaataggcacagttttataaggaagttttaatttctttgttgtcttatagcactggagaatgaattcagggcactatagaagaaagtcaaatgcattgccactaagctatatcctcagtctctcacaggcacttaattcattatattaagaaaaaaaagggggggttggggatttagctca

SEQ ID NO: 585 - DNA, 525 bp, Rattus norvegicus
  Genbank Accession No. AA899743
tttttttttttttttttatatttttagccaacaagggctccttttattcatttaggagtaggtttttgaaatgcagtgcaactttataagtttataagtcaagagtgccagtaaagcaagccagctaggtgcagagtaatgcaagaagcctgctggaaccttctagcccaatgggcacgcacccttgacaccagcagctaaagctgctgtccaaagggtgtcaaacagatctcagagtgagataggggtgcctactccatccaaagctcaaatctgtccatctgtgcttgccatatacaataatgtgcaaaacaaaacccttaaaaatatgttcacacagggtcacagagcaggctctgtttgctgtggctattggcctgagaagcatcatagctgtgcatgaaaagtcaggcagactccatctttccaaatgccgtgcactgccatctgactcgggtctgtccactacctcagagtcctgccagccaggccttcacacaggggtctcctctgccacctttttta

SEQ ID NO: 586 - DNA, 344 bp, Rattus norvegicus
  Genbank Accession No. AA899797
tttttttttttttttttagaatggaaaaagagataaattcatctttatttgaagataacatgatctaaagaatctgtttttaagaagctgagaaggtaatgaatagatctgactactgcagggcataagccatactcaaaaaattaactggggttggggatttagctcagtggtagagcgcttgcctagcaaacgcaaggctctgggttcggtccccagctccgaaaaagaaaaaaaaaaaggaaaaggaaaaaaattaactatattcttatatgttagcacttgaaaactcaacatagccaggcactgtggctcacgtctagaataatagcactaagaaagct

SEQ ID NO: 587 - DNA, 380 bp, Rattus norvegicus
  Genbank Accession No. AA899814
tttttttttttttttttgttttcaatagtaaagtttacatggctatcaagtcacaaagacagttgtatagcagtttacattacagttgatgtctgcacacctcaaaacgcattttaaataaacaaaactggtttggaaaaacattacaaaatgcagtggcaagcatgtttggtcaactggtcaatccttctaccatccaacagctgactccagcggaggtcttctgttaggattcttccatcctgttcaatgggccctggaggaaatctaaatcctccagtactgatagtttgagatgtgtactatccaaaactgtcacaaagaaaagttagctacagcaacctactttcgactgtggaaaaattcatccacgtactgta

SEQ ID NO: 588 - DNA, 411 bp, Rattus norvegicus
  Genbank Accession No. AA899914
tttttttttgttgttttccagtttatttagaaaaatagactctttgagttcacgttcaccccagagctgtatgggatgacaataaggagacacctgagatgagcttacaggatctgaaacactgagaccagaaacccaagcccttgtctgcatattccaagtgacacaaaggcctagctttccttctgtcccactagtactcttcagccatgatcagtaaaacaagactggtccatccttggaaggggcggcagcccatgccccgcccatcctggtcactgtactgttcccacagaaaccctgtagcctggtattgctgccgtacgttgcttactacattggcccgaagttcacggtagagtttggcagcctgaaccttgtgaggaccctccacacgcccatagtggtgta

SEQ ID NO: 589 - DNA, 351 bp, Rattus norvegicus
  Genbank Accession No. AA899964
tttttttttttttttttggctctccaaaagcacgtggtttattatggtgagctgtagtgcacatcggtttctttagtaattctaagctgatacaggttccccactaggagtacacatggggagtgactgggcgcgcggtgacagtgacaaaccagtgagccactgtgatccatagaaagttacattagcaatcaggagagaaagggaagtgtgaggtggcccataggcaagatgtgagcagagcacctggacccttccttccctacatgcagtgcttgggccctgctgacgggcacagtgaccttatgacctatagtaagtggccagcctctgactgctatgcatggtcag

SEQ ID NO: 590 - DNA, 377 bp, Rattus norvegicus
  Genbank Accession No. AA899991
tttttttttttttttttggagtaaatacatttattgatacccattttacatatagttcaatgaaataatctataaatataaaagcatttttcctttggctatcaccgtggtccaagtaaatactcaacagtcagtcatctgcaggaagtgctccaagtctcactgctgggtaacagacctgagtacatctgctacccaaaccccaggtgtgaaaaatcacttctgtttcaaagttttttcctcaacacatccagggaactgatgcagcccttgccgagcctggctctccccagtgccgcacagaaacttcctcttttcttcaggacaaatagaaacatcctttgctttgtcttctgagtcagcaagctaatgcactt

SEQ ID NO: 591 - DNA, 395 bp, Rattus norvegicus
  Genbank Accession No. AA900018
tttttttttttttttttcacacagggttgcttttatttccacatccaacttgagcagaggccctgccacaacctgaacagctgtgaggtgctgggtgcctccagagtttctggcacagtaagtgttgggtgtgcagacttcctgatggccacatgacactggcccacacaggaacagcaagtccatgaatggaaatcccactgagctggaagtggagactatgtagccagctgtggaggccatgatggcttggacagaggacaccagcctggcggagacaatgactgcgtcggtctcctcccagcgcagctggggcagcctctggagcgtgttcttggataggaggaagagtccggggaacaccacccccccagccaccattggggtaagcatgg

SEQ ID NO: 592 - DNA, 459 bp, Rattus norvegicus
  Genbank Accession No. AA900078
tttttttttttttttttggtgctgttgatttattcataagatggccacacacaggacagaacagtgcccttgaaggcaattaattttcacacttttttagcaaaatacaggtagccctgtaaatacattcccttcatactcttgccctctttttaatcccctcccaccccatatttgtggatgaataatcaagagggagagaagagagagagagagggagagagagagagagagagagagagagagagaagaaaagagagagagagagggaaaggtttactacacatttgtcctctccgccctccccaggtttggcttttctccccaaagctgatgacgaagacgtgtggactggagtggacttagcaactcgataggatcagggttgggtcaccttggctggttctgactaccatccctaaccatgatataagcacaacaggctccttgtctgggcgg

SEQ ID NO: 593 - DNA, 484 bp, Rattus norvegicus
  Genbank Accession No. AA900204
tttttttttttttttttattataaatacatctgggggcaatatttattaattaaaactatgtcttatagtttacaaagatgctaattagcaacaaaagtataactgatcttaaagtcctcagtaagactgaggctcatactgtcttcagaaatctgaagtgtgctacaagcagggtgcagggctgaggcacagagggggacacctggaactgtgcaggagtcagaggccaaaagttccacagagcaaaagatacgggtcttctgtggacatcctcttctcccgtccccatagtccctgtagtcctgcttccagactcaacctccaaggcaagtcctgtttatcgtcgggaaaatctgttcttgaatgctttaatggtcttggccatcatcggggcaattttcttcacagctggtttcctgggatcataggaaacagagctgctggccacaggagctaagtgggcactgctggtactgggccctt

SEQ ID NO: 594 - DNA, 386 bp, Rattus norvegicus
  Genbank Accession No. AA900247
tttttttttttttttttcaacatataaccacgcctgactggcttgttttattgaggggggacatgggtaagaacaagtaagacagttgggaccttaggttgggaagaataccctcccctccccgtatgcacccactgccccaaataaaaaataaccaactatagggaagcagctgagacagtgacggggaggctgggaatgggcagggaaggatattcggaattgggggcagcagtgaaaagaccatgcgtgtgctgggagggcccgaggtggcactggatgagtctgtcttccttgtaggcatgtataaatataaagataagcctttcttctcccccctctgcccagtactgcttgccaccgtcccagctcgcctttcctcatcg

SEQ ID NO: 595 - DNA, 493 bp, Rattus norvegicus
  Genbank Accession No. AA900290
tttttttttttttttttgtttgtaagttcgtttattaatattaggtaatattcagaactcagacattaagctatttaccatcttaccacactggtcagttattttgtttggaagaggcttcaacaattggaagagaactccaggttatctttttgactcttacatttttttttagaaaatttgaacccaatcatctggctgtcttcgggatttttttcgagagagggtcttgatatacagcccaagctggcctccaagacagacttccttgtctcagctgagtgttgggatcacacctggcatcttgataggatgtctcactaatattcttagcagctgttctcaagctacttgtaaaaagcacattgcagaagaagtgatggagtaatcttcacatctaccaatgtcatcacaacagaaaaggcacaaatacccgacagtgactacagtggaaactagaaccgaacgctacagaatctctgaaacacaatga

SEQ ID NO: 596 - DNA, 411 bp, Rattus norvegicus
  Genbank Accession No. AA900298
tttttttttttttttttgtgtgtgtgactttttattgcagctctggtttgagtccatccttaatttatagttcgattctcccagacccatccccctcagggctcagacaccggctgtcccccagtggcagctctggtctcacactgtgggtccaacttctctttcctgggcaatccgtactctggggtaggaagcatggcttttcttttcagttccatgactttggttggtccagtggcctcatgtcaatggggcttggggatgtgaccatccacatagaagtttctggtgatcttgggtagcgcaaactcagctccttccagctcaggggttagcacaatctggcagcccagtctcgagttctcctggagcagtggagccatgtccaacatgtcgtcctccctctcctca

SEQ ID NO: 597 - DNA, 483 bp, Rattus norvegicus
  Genbank Accession No. AA900351
tttttttttttttttttagttataaaacctttattatttttagcaagaataatgcgtgttcattttaggaatatggcaaatacaaataagcagaagaaaaatcattcatctttcacaagtttatatgtgcatatatgtaacatacaaagggactcctgtctctcaaaatatgatattcccatattattttgtaatcttttctcattttgtttcccatcagaagctcatgtttgtatttttttttttacaaatcagtaaagctcttcggttaaaagccagagacttatagattggttcaaatacaatcaacagtaagatacagacaacaagagagatcgctaaagccactaacagcaacagattcaacgcaggaagatgggcaaaggtcttagcaggaaaatgctaatcaaaagaaagctagattgcaatggtaacagcagataaaaaggaaaccaagccaagctacattaaataggggtaagg

SEQ ID NO: 598 - DNA, 463 bp, Rattus norvegicus
  Genbank Accession No. AA900364
tttttttttttttttttaactgactataaaaactttatttcctgtaaaaccacacaaaaatgtcaaaaatcaatgaatcccagagatgcaaagaaaggataaataatgagataggaatttgaatgtcaggctgcatggccatgagcgtctgtgacgagcttgaggaccagtggcctataggaaacgcagacatgggaggtttccattggcactgtggaaaacactgcttcctgccctgctcaccaaggagagaaaagcagattccccttcagtagcatatccatcaatgctggaacaacacagatcaccacggcctctgtgaggggatgatgggcggattcctgcactgctctatactttacttgcagtaagaggtggtcagttagtgttaccagaactgtgaaaccagaacatacggttacaagcacacgtgccacacagtttggtctgtgttcaaacattt

SEQ ID NO: 599 - DNA, 438 bp, Rattus norvegicus
  Genbank Accession No. AA900402
tttttttttttttttttgagtgaaaaccctgaatttaatgtgagattgggggagccccatccctccctttttaccacccactcatccggcctgttgttagctgggtgagggctgcccccagtctccgtcctgcggctctgggtaccatcctgtttctttgggctcattcagcctcctgggcctgtctctctctgaatctccttcttgcatattcatacagtgcctgcttgcgctcctgcaggctctcctgacgggcccaggaagacttggcaaatgttagggctgtgggcagggactgagatccctcagtgacatcttcaggcatgaaagccacagccccctcaagcagattggtgatggtcaagtctacacacccagtcctagccaggtctctctggatgacattcaatggcacatggggcaaaacctccttgactc

SEQ ID NO: 600 - DNA, 612 bp, Rattus norvegicus
  Genbank Accession No. AA900505
tttttttttttttttttaaatgtcatcatcatagtcttttaatattttacataaaaaactgtatacacagcttatagaacttttatgtaaacatcataagctcaccactttgtcatctgtcagtttatttaaaaaaaaataaaacaaaaacaaaacaagacaatttagtagaagtaccactgggctgggaaaggagggaataaggaagaggaagctttgctctgcacagagaatgtacagaaaatttcacatagatgaagagacttgtcttgtggggagagggagggaggtttaaatagaccccaatacgtgttgccttcctttaccaaaactgtgtgtatgctacacaaatttttaaaaagtcacatggttgacatttttttcaagaaaacaaggcaaaaattagaatcttttttgtaatctccttaaagtcatcatagtttgtttaaaaaaaaaaacatcagaagtagatgaggttacagcatacaagtgtggtcaaaatgctgccttatgcaaatgacaagtgcactgggtgtcaaacaatgggacaattgtgcaaagaattctttcatcaacaacaaaaaaagcttcagcctttaaataaattcagca

SEQ ID NO: 601 - DNA, 403 bp, Rattus norvegicus
  Genbank Accession No. AA900516
tttttttttttttttttcctgtagacggcttattttattgctctttattttggctcttcccccagacactcctcagactccatcttggctttttttccaggaagttcatatgtgaaccacctgtgtgcagaagcctatggaggtcagaggagagcatcggaccccctgggactagagttatagttggttgtgagccaccaactgggtgctgagaactgaacccaggtcctccgcaagagcagcaagtgcttttaaccactgggccatctctccagactctcaaacattgatttatgtctatgggtttgtgcacatgcgtgaagtgccctcagagaccagaaaagggtattggatcctctggatctggagttacagacagccgtgggtgttgggaactgaactt

SEQ ID NO: 602 - DNA, 519 bp, Rattus norvegicus
  Genbank Accession No. AA900521
tttttttttttttttttgtgctcaagtacaaatttaataaagccctgacaagtcttagtccaccagctagctacaaaaccaaaccccgacttctttctggagccaccaagagcggctgggacgccatgaacagcagcaatggcacagatgagtgagtgcttggacgcccttgtcacaacgaactgcagggaagcagactcgtgaccgacagacgaccttaggtcaaaaccaaacaggtcaagctggtatcagtgcttacaccccactctctcctgtgtccccgttgtgactctctggctccaggttactcatgcatgctgtgctcagggcacaggaatccatggacaagctgggaacacacatggctggcagacatcttccaaggacgtgccagcctcccatccacgtgaagctggcaccacactccagaaccccaggggctctcctgggcctggccaagctccggccacagctctttgctaaagtgagaacaaggctcggctgctctcccgctgtgca

SEQ ID NO: 603 - DNA, 427 bp, Rattus norvegicus
  Genbank Accession No. AA900574
tttttttttttttttttacagtgtaagctccagtctctttggattttacttcaacctttgctgtaatataaaaaggaagtttacaagacatgacattgctgcttttacaaaaggacgttctatttattttcgcagtgatctcatgtccccacaggcagagctgtcgcagtgtgcactaccttacagttgttttattgatgtcattatttttccagttggagctaatgtgtttgatttgtgaatagtcttttacatttttgtatgccgaatataggcaccaaagaacctgtaaacgttatctttttaaattgaatgtgcacaaataaaagtttggaaaagatctctcttcatatccattctgtaactttattcactatttcctcttttaaacagctgtattcaatttttttttaaatctatgcagact

SEQ ID NO: 604 - DNA, 535 bp, Rattus norvegicus
  Genbank Accession No. AA900580
tttttttttttttttttaaatcctactgctatcatgctcttaagggtgacagctgggcgagaaatggagcgcacaaccgtttagcaggaagtactgcgcgaactgtgaggagcccctcttgagtcctttacggactaactgggaggtttagaattcccagttgcggcgcacttgggtttctttaatgtggctcgcgctgaaaactctagacggggtgcacgacctgggaaagccaggcgctcccagctaggcccgggaaaagcacggaaccgggaggctgaccttagtagacaaccctgtagctcctcctccgggtaggacggcctggcagccctcacctgctttcatcacaggtctcattcgcatcatgttgtccatcaggcccgtgcagtagcccaggaagccgatgtagacaagccgcgggtcgttcagcttgggcgggggcagtctccgggcctcatccggcaagaatcttaagggctcatggcccggccggccgttcatcatattgatgcgggttccacgtgaggtctga

SEQ ID NO: 605 - DNA, 398 bp, Rattus norvegicus
  Genbank Accession No. AA900613
  misc_feature (1)..(398): n = a or c or g or t
tttttttttttttttttcggtccttcaatatggcttttattttgtaacccaccaactgcagacccgcggccaccccaaggggccaatccatccccatgacccatcgggacagagggaggtggcacatgccctgtgtacttcttcagtggcaggtggcactggcctcagacccgtaaccagctgccaggttaagagtagtgaggggaacgagagtgcccagggccagggcaggaggctgacccccctcgtcctatgacacgagtgccaccagggtggcagccaccactgctgaaccgaggggaactgcanagacaggcttctgggacccagccactggggaggccaacagcagtgtgcggcccttcagtgcatgtggcccgggtcatcattccatccca

SEQ ID NO: 606 - DNA, 490 bp, Rattus norvegicus
  Genbank Accession No. AA900647
tttttttttttttttttacatttccaagtgtttatttcaaaactgtcaagatacatatattactttttattacacgtaataagtaattttgggcttaaagtatataaagtttcacatttttaaagttaaaaaactctttaaagttgtggagcatttaaaaaggctgaataagtgggatatatcttacaacacaggtttacaccttaaatattcacatttcagaagctgtctgtaaagattaaaaacagggtaacaagtatttacaagtggcaatgattacgatcttgtctttggaagcagaggttaacgccctcttgaactctctcttcaaagttcttttcaactttcccttacggtacttgttggctatcggtctcgtgccggtatttagccttagatggagtttaccacccgctttgggctgcattcccaagcaacccgactccgggaagacccgggcccggcgcgccgggggccgctaccggcctca

SEQ ID NO: 607 - DNA, 441 bp, Rattus norvegicus
  Genbank Accession No. AA900688
  misc_feature (1)..(441): n = a or c or g or t
tttttttttttttttttcacagttggtaaagagtttattaagcggctgggaagctcttcccactctaacaacagaaaaacactctccacccctcaccctccccagtgttggccactccgactcatggtggagcctcacactgtaaacacctgcctttcagagttcagtacagggacatgtcttcctctggaaataaaactttcagtctcaactcaaaagggaacaaaggcatatatctcggcttctgcaacatttggtacaagtttgcaacaaaaccgtacatagcagcatgctgctaaccggagaggagatggggctagcctgggcaagccttgcaggaatgctttagcatctgttatcactgcagttttcacatatggcaggtggggctgcaccacaacgcaggagtctcattgctccagggtcanacactggactctc

SEQ ID NO: 608 - DNA, 434 bp, Rattus norvegicus
  Genbank Accession No. AA900847
tttttttttttttttttaagatttaatgctttattgctcttgatggtaaatcaaaatatgctttagaaataaagttaatttaatggaaaataggaatatatgcaccaaaccataaactgcatttcatgaactcaagagacccctactccatgcatacaatcactgtgtcctctcccgagctcttactgtgatcatccacacctctaattccaggtccttcagtggccacacgctgacttttaggacataagaaagtgctcgtggacagggcagccctcagtgggaggtgctggcctgggccatgggtcccagactacatcagagggtgggaggggagccatcccttctgacccgcgactcttttggcataactgctttggtgtgtatgaacacacttagcatgtctagtgtaacgcaacacgctggggcggtaa

SEQ ID NO: 609 - DNA, 503 bp, Rattus norvegicus
  Genbank Accession No. AA900848
cggccgcaatggtcgcaactgaggccttggacatgggggaggcatgggcactgcccagtgcttgggtcacaatggcacaggtctgtagatgggcaccgctggggatctgtgcccagaaggttgcaggtacagcggtgacagctctgtcgggcagcttgcccatggaagccaggcttgcaatggccacagtggggcccctccgtgtggtgtaaacagcgcaagcattgccccgtgtggggatcacaggcaccgggatccgtggggtcaatgttcccactgcactcacacagttggcacctgccatctggcttggattggtccccaaagtgcccgtgggcacaatcctcacaccgaagccctgtgtagcctgctcgacagtggcacacaatttgctgggaatatccatcccggtgacatgaagtaccaaagtgtcgctggctcccggggccttccgttcagccaacgccctcacagtttggtactggtcacctacttgttcccgt

SEQ ID NO: 610 - DNA, 534 bp, Rattus norvegicus
  Genbank Accession No. AA900863
tttttttttttttttttgcctcaaaaagtgacatttattcaaagagagagagagagagaaaaaaaaaacaaaacaaaaaaacaaaaacaagatgtccatcccttggctcccttccctcccccctccagctgttcctcagccctgcccccaggactgaaccctgggctagggccaggtagcaggacagcccctcaaatgaggtcagcaacgttgaggggcatctcttcaatggaggtgttgtagaaagtctcaatgtctcgaagagtcctcttgtcttcttctgtcaccatgttaatagccacacctttccggccaaaccgaccacctcgaccaattctgtggatgtagttttccctgttggtgggaaggtcataattgatgactagggagacctgctgcacatcaatgcctctggccaacaggtcagtggtaattaatactctgctatagccagaccggaactccctcatgatcacgtctcgttccttttggtccatatctccatgcatggcagaaactgttaaatcccgggca

SEQ ID NO: 611 - DNA, 530 bp, Rattus norvegicus
  Genbank Accession No. AA900911
tttttttttttttttttaaattccaatttgattttaattaaataaattaaattccaagccatcacacagcaatggacatcatcatcatcatctcccaacatatagaggtgcaaccttgctttatgaccatactgtctaaagctcctaaagccatctctctagggaaagaaggcttgctcccagcttcctggctccttccttccaactgcgccactgctcatggagaaggtatcaagtacaaaatggtaataaaggggaaggagagacaaggtgcgtgtgggaggtagggaggtggggagtgcctgccccccatcccgggcactaggccggcttcctatgatctgccaatgtcttctgaaggcagacagacatcggtgctggtctaaaagaggactcccaagggaggtgtagaaacctgtcctgggaattgccttaccctcctgggacagaaaagggtcacctgggagagatgccctctatcatctgtttgccaagggctctagaccacatatataaatagaaaagagaat

SEQ ID NO: 612 - DNA, 488 bp, Rattus norvegicus
  Genbank Accession No. AA900974
  misc_feature (1)..(488): n = a or c or g or t
tttttttttttttttttggtatttcccaaagctggttttaatttccaaaaattatgaggtctcttcccacactggggataataggatgggatagcccagactattatcccagtccaacccccagcctagcccaaacaccattgctgtctctgggtcccgtcatttcaccactgggagcttatttctaactccctcactggccaagacaggtggatggatgtgaagtttccaggactcagcactgtctctccaaagtgaccctgggtctcctctgtgaggggaagccatctgtgtcacgtcaaagtggattggtgtaaccaccaggctcaactcagccaagcacatacaccaaatgtctgaacctgcggttcctctcgtactgagcaggattaccatggcaacaacacatcatcagtanggtaaaactaacctgtctcacgacggtctaaacccagctcacgttccctattagtgggtgaacaatccaa

SEQ ID NO: 613 - DNA, 447 bp, Rattus norvegicus
  Genbank Accession No. AA901006
  misc_feature (1)..(447): n = a or c or g or t
tttttttttttttttttcacctttcaatgattttattagtatggtcacaagtttgacacctacatgtcgccattaacagagctgacgacaaatattggaaataagtgaattactgaagtatggcaagatttaaaatgtcaacttggagtgatcatgcaagcccatgcattggtgcctgcgccctaattgcaggacccactctgctcatccttgtggctctgtaccctcagcggggttcgtagtaattcttttcatcaaaggtattgacagtccaactaacaacctggattcctttggctgaccacttcttcaattgtccggggagacaaaatccttctgcatgaggaaggctgaaatcccacacaggtaccacaagacattgtgcatgctccagtcaagcaagatgtccaacaccacanacacagactgcttccaaaagacgctgta

SEQ ID NO: 614 - DNA, 400 bp, Rattus norvegicus
  Genbank Accession No. AA901022
ttttttttttttattttaaaactggatttaatggtttagaatagcaactaaaagataaatggaatacacaaatccaagcactgggtgaaatttcagtgaaaaacatcattacagaaaaggtacatgcaacaaatacagaagaaaaaagttgctaaaaatccaattttgttactaattgcattatacataatggtctaaaagaattgttaattaggatctttcaagtaatcagagttttaaaactctaactaaggtatatataaaagacacatctacacctgggttataggtcagtggttagcatgtgtaaagccctcagtttgaatcctagcaccccacccctaaattttttttaaccaaggatacaaaaattaaactatctagccatgtcaatacctgc

SEQ ID NO: 615 - DNA, 535 bp, Rattus norvegicus
  Genbank Accession No. AA901045
tttttttttttttttttacaaaggcgtcttgtttattcttatcagcatcactgactctcagggttcacatttcccaacaccgctcctctccgtacagtagttaatatgcaatctcacttgtgggcctgggaagggtgggggcttggctctgggtggggagggcattggcacttcacatgggccagtgggtgatggcctgtccccatgagaggcatggatgggtgggagggagggtagccactgggtttgcccctacttgtctttcctgctaagtgggtcactttttcactctcctgggtgcttggggtaggggccatgcagctctcaggagggcaaggcaagcagctgaccgccagaggaggggcgcaggggtggctcctgaggtaaggcacaaccctgtctttggctctcctagtgagtagttttctcccctgcacccctggctatatacttctcttaccccaagcccggggagtcagggccacctcctgaggtgcttggaaccaatgggctccgctgcccactctacaagatt

SEQ ID NO: 616 - DNA, 523 bp, Rattus norvegicus
  Genbank Accession No. AA901049
tttttttttttttttttaatttaaaaccctttattacatttgtgtgtatgtatgtgtgtcatgggacaatttgaaggtgtcgattctctctattgggtcctggggatccaactcaggtcagcaggcttggcggcaagcaccactaccaactgaaccacttcgatggcccccaatcatcatagcgcacacggttgtagctatagataattatcttgttccttcccctttcagacaaccatcatacaagtctcaaaatgtagctatatgttaaactacccagggctctgatggcatgtatacgcttggggcacttcttcccacaagaaaacatcaatgtgagaagtgggaagcagccttttgtaagggactgtgttggcgtcactgcatgtcacacagtccctatatgcttgccccacagctcactttatatcaaatggtagacagatctttagacaaggcatccattccctgaaacttctctgtacataagcctgaatttatggccacaatggcctgttgagcc

SEQ ID NO: 617 - DNA, 328 bp, Rattus norvegicus
  Genbank Accession No. AA901088
tttttttttttttttttccttttgaaatatttttatttcacttttctacagtaatatagaaacaaataatcataaaaataaaactgtaaattgtccattgattatgtaatagcacttggtattgctacaggggtagatcttggatgaggccaggttatggccaggcctggccaggccctctaagcctctgtgattgctactgaggtcatgaaggcattggacatgaccttgtggcagcacagtggatagttcatgtctcgcctgggggaaggcggatggagatggctaatgagggaacaccaaacaggacaatgaacatacagtaagg

SEQ ID NO: 618 - DNA, 580 bp, Rattus norvegicus
  Genbank Accession No. AA901338
ttttttttttttttgttactttgtttttagctaaatttaacgagcagtttattgtagaaaagaaaaccgaaggacagatcaaattgaaagaattactgttataataactttaatttatcttgcattttacagaagtctatgaacgattttaagaagcacctccttactccatcacgtttctctgacagttgttaaagtaggcaacgagtatatcaacagcttgaataccggtatcttgcaaggatttcagaacaatcactcgccaaagaacttggcagtttctatcttgtttttaactcaatggtacatccactctgatggtaacctgtccagccaaatctccaccacattttgaaaaaatcaatggtgattagcaaattagttagctttggcacggagctgtgctcgcttgcctgtgacagcctggaagccagttttgatactggccacagagcatcgagaatgacaagtttcacactgtaagaaatagagtcgggtgtccttctgtaagattgtgtccggtgaccggcatgtgtgacaagtgacgtattccttgatatatcttctcaagacgttttct

SEQ ID NO: 619 - DNA, 514 bp, Rattus norvegicus
  Genbank Accession No. AA901365
tttttttttttttttttcgcaggtaaaaattatacttttatttgagtcaccaggataaagattcactttgtggttcaagtcaatgttcaaaaatcataacaggccagaaagaattgatcccaagcacaaggccaggagggaggggaccaaacagaccaaagaaagatgacaatccgatataaaagggggaagtggagtgggtggggcacctccccagtagctcctgagatgctcctacaaggttctccccatgttgcccaccagaacactccttgccttcacccaggctagggtcggaggtaaaaggattgaccaggcaggaagatggtttactctagcaagccctcatgacaccacactgctagcctggccaaggtcttcaggttcactggtcctgggtcttcttgattctctgcagttcaagcgtgtctgccaccacactgaagcctttgcccttgttcttctcaaactcctccttgtaacgcacctgactctgcagctcgctctgttgctt

SEQ ID NO: 620 - DNA, 443 bp, Rattus norvegicus
  Genbank Accession No. AA923842
tttttttttttttttatcaaaactagaatgcttgtttattttggggcttagcagagttcaccgtgtctggtgacagagaaagtgctccaactcctactgctggcttgttcctttggagtaaaatggtgggaaatccctgcctgttcctctaacacgatcacccctgtgctgccacctgctgactgcagggaccctggcatttcaaaggctctcagctatgcaccctgtgtcttcaattaataactcctttattctggaaaagcaaatcaagttcatagtcatagaaacactgacattacaaagtacagggatggggaaggaggagacaaaccctctacaaatctactaacactgtctcacccagcacgaccaaaacgctcttcctgcagccactcacttatataataaaccacgggcaaaatcttctccgggatgcactgctt

SEQ ID NO: 621 - DNA, 423 bp, Rattus norvegicus
  Genbank Accession No. AA923865
tttttttttttttttttgaagtcttggaagctcttggtttattgtgggtttttaattggagagaaggagacaaggaaagaaacgtatgcatgtgagtgtgttgggggtgggactgcaggggaggggagcaaagccagctatagtcaggctccagcctagacccttgaagagcacagagcagcaatgtaccataatcttgatttcatggagagacagggagatggactcccaggctaggaggtgtaactcccaggtactcctatctccatatgacccagagcaatcccttgggaacaactgaataggagagaacactcattgctgctgtaggtgggcagatatggctagatgaaaacttggtgccaggacaccagcaggatctgtgacatcagtcaacccttttcacttctttcctgaatagca

SEQ ID NO: 622 - DNA, 442 bp, Rattus norvegicus
  Genbank Accession No. AA923925
tttttttttttttttttccactttctgaaagagtctttatttttcacatcactgaattgcaaaccatcagtaactttaatatggacaatcaaatttctacccacagaatgtctacaagaattacatttttaaaaaatacaaccagtttttatatcttaaaaatatctgaactcaaataaattaatatcttaaaaagtacactcctcatactatttatttggcatttactctaagcttttgtgcatgatgcctgtgggacatgatcacatctgcagtgctctgattccaggactgtgattgcatcaggtttgggacacatttacagacgatgggaacatgcagtaataaaatagcttcttagaaaacaagtttcttacagactgtgttgtttactgcagctacgatgtgctctgaccagcctgcagctccagccgccccgtgt

SEQ ID NO: 623 - DNA, 433 bp, Rattus norvegicus
  Genbank Accession No. AA923941
tttttttttttttttttagcattgctatagctcaaatttatttaattttttcataatcttgaaaaaaaaccacattttaataaattaaaaaatatgtatatatattttatacacacatagcgtctacatttccaggctataaaccccaaaaagcaatcccaccaaaataaaaaaatgagacctgaatggctgcttaatttgctcccagagcagtggcatttccttcctgatgggcctgcggcagcacacaaacattaagctaaaacccactatgcccagggattagagctttctcagcaatttaaacagcagggtcctcttggtatctgacaattgctttcccctcatttcctaagctctaccctgaggagggccccattcctcatcaccgaagatggacttaggagtggtagtgagggaaccggacggacca

SEQ ID NO: 624 - DNA, 365 bp, Rattus norvegicus
  Genbank Accession No. AA923952
tttttttttttttttgtcatctgataggtttttccctttattcatgagattgtaaagagaccatgtcataaaactccagctgcaaagtctcatctctgtgagtcccatgatttgaagcaggccccaaaggggagtgacaagtctgtactctagcaggaaggtcccctcttctctaagccactgactctgtcctggaaccagcatccggtaagtgtgcctatgatgttgtggccaagaagtaagtctcaaggaagagtagacacagtggcagcttcctgatgattttttattccactaagggggaaccacactgttccttcagcagcatctccattattctaattcccttttgggctccttgtctt

SEQ ID NO: 625 - DNA, 474 bp, Rattus norvegicus
  Genbank Accession No. AA923957
tttttttttttttttttccatggggggacccaagaagtcccagcctttcgaaatcaaccagcacacttgtctcagtgtcaagacaatgtctgcaggctagcatttccacttggaacctcacccagagttgcatcgccaccctacagaaccccatggccagagcctgggagcaagcggttagcactcctgtgactgcagcagcctggcttggtcctcatccagaatgaatggagactggagttttcggccttgcaggtacgtttccaacccctctccagagtaagacaccaagggcgatatctcacagatggctggagggtctccattggggagcaggccagactgctccggaagctggaccccgtgtacatccaggaagtgggctccagcctggagagcccagcggtagtgctgaactagtaaggctcgcctggaggtggagggattgtccctgtcggctgtgtcagcattctt

SEQ ID NO: 626 - DNA, 563 bp, Rattus norvegicus
  Genbank Accession No. AA923973
tttttttttttttttttaatttgccagataatcttttaatgagaattataaaagaccaaaaacatttttttgcaaactgcctttttttaaaaacaaatgatttactttaattacaaatactgtgtatgatgatgcactcttttgcaaaaccaataaatacaagaaccaatttaaacatgtgatttgcccaagacatttgaagagaggaaaagcctgattattttataatttatagtgatcagagtttactccctaagctaacctttcagagagtaagcctgacctgacggcgtaggacagcagtcgggaggcgagaccatcctgtacttgcttcagcctcgacgagctgctctgctccctttcctttctggaattcctatttccacagaagggctgaattaaaaatgtctaataaattgattgaaggaaaagaaagtatgtactgaacacaaacttctgacattaagcaattatggatatcaaaaagacgctaacttaaaaggtacaaaagtgagaaaaacctgaattacagaaaagaaagtcaaatttatttaatgaaaaac

SEQ ID NO: 627 - DNA, 576 bp, Rattus norvegicus
  Genbank Accession No. AA924028
  misc_feature (1)..(576): n = a or c or g or t
tttttttttttttttctcacaaaaattcttttatttaagcaagttttaaaagtaaagatagacacataggcttttatataaatgagataacccaatacgagtcacagaagcaaagagcagacgggggctgagaagagaacagaagacagagaacgaaagttttactttagtatgcccaaagctgaatgtggaagtaaaaagtttctacactaagaaagtctatataaattatatgaattgtaatttttttgtaaaagtcaaaatgaaatgttctgcatagaacaaaagatatgcctaagcaacatatcatatttgtacaaggccactgaaagtcatgaatattagtaacaaatgaaaaaacttaactctgtagcaggctgagtatatttcagtttggtattctaataagctcaagattgtaaactattcttataaaaaagcagtaatggcaggcaaatttgtgtaggaattcttgtgcttctggttggcacattatctactttctaatatggtgaaattaatacagacatttgtaaaaggttgtgcaaaactattgtatttacaaaaatggcacan

SEQ ID NO: 628 - DNA, 309 bp, Rattus norvegicus
  Genbank Accession No. AA924053
tttttttttttttttttactttaaatacactatttattcattttcccaaatataataggaaagtaagatatgatgacagcagcagccacagccctccaagctcagtacccagagcagcacactgcagagtctgatcctgggagcagctgggagagcggagttgaacctgagaggctcaggaggccagatgcatggtgccccaggcccctgcctcagcctcccactggctcggctgggctgacagaaggagggaacagctccagctgcacaatggtccctctactctacccagatgctgtgaaatgatgt

SEQ ID NO: 629 - DNA, 275 bp, Rattus norvegicus
  Genbank Accession No. AA924144
tttttttttttttttttcagccataaaaataaaggccttttatttggttttctatgccattacaagaacatctggacaacacttcagtgtcagcagagcctgagaccacaccatgtctactaaactggggggctagatgcaggagccaggctcctcaccaggctctaggaggggctccgggttaaggggtcaccttcttgtaggtaatgtgaagatgctgagtcattggctgtgtagtggttgccatagagaccgtctgttcaagtttgccttca

SEQ ID NO: 630 - DNA, 577 bp, Rattus norvegicus
  Genbank Accession No. AA924151
tttttttttttttttttcgctttaagaagattttatttccaaattaagacgtgtaagaaagcaagccaggtgccccctgcttctggttgcaatggaaatatctggcacaacaaaccatactgaacccatttaaaaactgtcacgagaacagagactataaagaccccagagaggaaagagaagaacccgggtccttgacatttctgcttctacacaggcactggctcacctggaattttaaaatgttcagtggcttcttggatgtttccaggggcttcgtctaagctgcttaactccaaatgaatcctagaatgtggctgaggttcaacagcacattcttatgtttaagacagagcatccactaggtctaaattattcttcaattatatggagtcaagctttatcatctgttataaattccccttccatgggaggccattgagttccgtcaccacaagacaagacagtctttggttatatagagacgaataattgtaaactggtagcattaacacatcttttgcaacctgtgtaggtattgccaaatagtatgtgacaggaccagttatcaacactg

SEQ ID NO: 631 - DNA, 380 bp, Rattus norvegicus
  Genbank Accession No. AA924236
tttttttttttttatttaagatggaaaagttactaaacacagaacttagttttgtacaccaactaaaatgttaaaaaaaaacaaaccacaggattcaatattattcacagattcaggggcctactggctatcttggaacactcaaaaagagtctgtattggtgaaacgtgggatcagttctatctcacaaaactggaaagattataattgagacactgtaggcagagttcagcatgaaggtgcctgactcacagtaaatgttcagttcatagttactggtatctactcttaactttaattcctcaaagctttaagcttctaaatcttcccctgggattaaaagtctcataaaatgtgtactttcctctatttcccttctt

SEQ ID NO: 632 - DNA, 226 bp, Rattus norvegicus
  Genbank Accession No. AA924261
tttttttttttttttatggcaactcctgttttattctcaattacaaacacagcaatgggaagaagaaggtcaccaaccagattcgtgtgacaggcctggtgggtcacctcagagattcgacattgtgaatggcccccatggggtcatttttatacagcatgaagtagccttgcacctgggcaagactaatctgggatgtagctttaaggacatgttcagcaaaatt

SEQ ID NO: 633 - DNA, 309 bp, Rattus norvegicus
  Genbank Accession No. AA924267
tttttttttttttttttggagtttttcagtggtcttgatgatgtcataagaacatttgtaaaagggaaggcttttagaagagggggtatgggaagggtgctggctttaaagcagaggaatattccagtgctgagaagggtgatctgtactgaagagaggaggagaggactctctgaagcactcttctgaagaaggctagtcacaccaccaactcagctttctgccagtgaaactcatttcagatttcggagctccacaacggaattagtggagcttcttgagatacaggtagatcccatttttggactt

SEQ ID NO: 634 - DNA, 484 bp, Rattus norvegicus
  Genbank Accession No. AA924279
tttttttttttttttttaacattcagcaatttatttttacattgtataagaaaataaagcctaggaggacatcaggagacctcaggattcattagaagccacaacactccccaagtaaatatccagcttaactgtaacgagacactgagagctaatttaactaagatataaaaactttagttaaatacaattctggggcaatatacattatagctacaactgtcttttgttttgttttaacagtgggattcatcctggtgtgtgtcttcttctccgttatctgaggagggagcgtcactgcgcggtcctggatctccaggctatgaaactgaagtatgtgtttccagcatagcagatggtgaccaggaaggcaaagaacgaggaggccgcccagctgttgaagttgtgaccttccttctctggggagacagacgacgcgtccactatggcagctgagaagtataaggcgcaggcactgccgtta

SEQ ID NO: 635 - DNA, 378 bp, Rattus norvegicus
  Genbank Accession No. AA924326
tttttttttttttttttcccccttaaatagctgtttattggcagtgggcttgataacttgggggaagggacggccatcatctgccttctggtatagtgtctcgtggaaaaggatcacccctccaatgcagggattcacacggtcatcggcagtcagcagcagttggcggtagaagcgcctgttctcctcggtgttctcggtgccaatggactgcaggcgcttggcaatgcttccagtggactcgtctgcagccaggatgcccttgcccggagctacaattcggtgagcgatgtcagccagctccttcttctgctccggggtcagtgctgggtatgggtggggcatggtgccggtggcagcgctttcctggcacaggac

SEQ ID NO: 636 - DNA, 537 bp, Rattus norvegicus
  Genbank Accession No. AA924413
tttttttttttttttttcaagacaaaaagtttattaacaaatatacaaaatacagtttgcaactgtgtctttataaaaattcacctttgtatataagcgatactatacaatacttacaggtatgtacaagatccccacctgtatgcaattctctgggtcatctgtatcctcacatcttcaagagaaacctcacccatgaacacggcaccattaagcctctttctgtaatggatttcaatcacatttactgctgagattactcaggcaggtgagctgatgctggacacgaacccctcagtaaagtgcagttttaggcaaccccttagttttcctttagacaggtatccacagtccataaggactttttttcttatctatttttggtgatcctgatgacgtctcttcaacagcagctttcgttgttttctctagaggctttgctacagaattattagagctgaacgctatgtttctctgtgcagcagcagatttcccactggcatttttagttcccacttcagtctgcttttctgaatg

SEQ ID NO: 637 - DNA, 384 bp, Rattus norvegicus
  Genbank Accession No. AA924460
tttttttttttttttttcaaagaatgtaattaggtatttatttagtataaaaggcctgtgcacagtgtaacaaatacaatttttacagctgttttacaatcgtggcgtctgttcatttgtgtttcatgctctgaattacttcatccagtagtttgctcacttctttgtgtctcgttactgctcgactcatgcagtcctgaagtttagctccagtcagcccactcccacctggcttgtgaagacagcacagcttgccttcctcgtccattactacggttaaggttcctgtggacaggtgctcctcctccccggtaggatcgactatcagcaaagtgtcatcaaacacagcaaatgaagtagcaactgggtttgctctaacattca

SEQ ID NO: 638 - DNA, 358 bp, Rattus norvegicus
  Genbank Accession No. AA924523
tttttttttttcttcttcatctttttttttttaattgggaaaccaatgtaacaaacccacactcattgacaataaactcagtaactaagactctgtaggctctgtctccaaccagcaccaaagtctctgcttggtttgataccggctgctcaagccccaaaaggacaaccgtgagaaactaaaatcaacctctgggcccctttcgtgcactgcaacccctccacgcccttaaactgacacacaaacacaccttaggttagcaggctggttctaagccaaaggcaggaaaagcaagtttctggaatagcaaggagtcactgatgcaccctgacctgctcaaaatcccaacctcgagccg

SEQ ID NO: 639 - DNA, 426 bp, Rattus norvegicus
  Genbank Accession No. AA924575
  misc_feature (1)..(426): n = a or c or g or t
tttttttttttttttttgggagggaaaaaattaaatttttatttggtgttaaaaatattaacaatgtgattcagtttagaaaatatccgtagcatcaagaggagtcatgtgtggatgccactcaggcacccccacgtaagtaaatattgttcgatgttgaaattttgattattcatcacccctaatatgatttagtgtccataatgcccagttagtaaggtaacctaaaaagagccgagttcaatccctctatatcttttagattaacaagatggtccttatctggaagcctgggttatgtagcatcaatgatgtttgtgttttaccctgacactcatcttcagagaataccctcaggcaggaaaagatctaaaagatgttagtcactgcccggtctgtaaggtancatgaacatctgccgagctt

SEQ ID NO: 640 - DNA, 467 bp, Rattus norvegicus
  Genbank Accession No. AA924598
  misc_feature (1)..(467): n = a or c or g or t
tttttttttttgggggctctccaaaagcacgtggtttattatggtgagctgtagtgcacatcggtttctttagtaattctaagctgatacaggttccccactaggagtacacatggggagtgactgggcgcgcggtgacagtgacaaaccagtgagccactgtgatccatagaaagttacattagcaatcaggagagaaagggaagtgtgaggtggcccagaggcaggatgtgagcagagcacctccactgctctcatggtggtccacaggatacccagaagctgagggggccttggtggagggaggctgtccccctatctctaaggaactgggacttagtggttgagacgctccactgcctgcaggtggcaccttttcctcaaaagctcatcaggcactaagtccatggttgttgcanaaggtgctctgttctttcaggtactcggttctggttcctcccctcctt

SEQ ID NO: 641 - DNA, 471 bp, Rattus norvegicus
  Genbank Accession No. AA924615
tttttttttttttttgtggttatcattcattcatttattagttgaaaacagctttgactaaggaagcaggaagcccataattcttgggaaaacaggcttggaagtcaagtctcaggagcggtaaaggcccactttccacaggttccctaggcataaaatggcatcctgaattccaagtttgggctggatgcttttcacaggatgacccttaataaatacagcagtgctgagggactcagtgacacagagaccccaccctggcaatctccttgattagggctctttgcctctgaagaagagtcattcgttagacttttctgcagtccacacagcaggaatcagtagtaaacacttccaacattcagacgtccaaggaatgacagcttcctgaagctcacccactgatactggctttcccatctgccactggggcagagatctgggccacaaatgtggaggctggacttcttc

SEQ ID NO: 642 - DNA, 470 bp, Rattus norvegicus
  Genbank Accession No. AA924716
tttttttttttttttttggttgagagtcttactatgcagcccaggctggcctcaaacttgggcacgaacgatcttcctgcctcagctgcgggagccttgggtgttcattacggcatgactatttttgggcacactgtttcaggagatggttgccagctgactgcaggtacctcagtaaagaccatggcatcttatcgcttttttcacacatgtacttttagagagtggaccccctctgtgggtagagtgagctcaggtttgtaagaactcaggctgtactctggctacttttcggaattctttagtgtgggtcttggggcactgcatctcacaccagctgatggggaccatctggacacctgactcactgtgggccaccacaacccctaactcattttcagcagtcgtcagcaggtaattggactgtgcatcacctagggagataactttggccaaaactatatcacctg

SEQ ID NO: 643 - DNA, 492 bp, Rattus norvegicus
  Genbank Accession No. AA924724
tttttttttttttttttgggttttggaaagagctgtcgttttattaaacttctgcccagttaaaaaccgccaggctggagcctcgacaaagcagacctgggggctatggggttttcagttgataatcttaggaacgcaaggtaagggctttcttagaccgaaataaataggcgtcatacatcctgataaaagttaaagggctaacacgcaaaatatgccaaggccggcaatccatggcaggcggaagtcacacatgattttcaagagcaaccaccatttcacaggtagttttgacaaaaacaaaacaaaacaaaacaaaaaaccctgtacaattgttctctgggaaaagtttttgtgtccaccgagagcattgctggccagggtctggaggtctaacccgcaaacagtgctcatcatctgggccctagcaactcaggacgagcatctctgagtgtaggaccccctcacagcctaaaggggaaagacagagca

SEQ ID NO: 644 - DNA, 401 bp, Rattus norvegicus
  Genbank Accession No. AA924752
tttttttttttttttttccttgtacatagagaaatatttatataaataatatatatgcgccacataatcaacagatagacggggctttcttagccgtaagtcaggcttcagagtgaacgacgcccctgaccaattaagttctagggacactggcagctgtggaaatgactccaagtactaccctagagctgtaaggaaaggacaccggtcccttcttgcttcaccccattccttatgttgaacaagcaagtaggcatagaaaagccaggcttgtctctacactgtctgtccctaaacatggggggcaggaagaggattcacttaaaactgcacttttattttccgtttactgtttacacattttgcacttgggaggagggaaactaaggctgggtcctagg

SEQ ID NO: 645 - DNA, 551 bp, Rattus norvegicus
  Genbank Accession No. AA924756
tttttttttttttttttatagccaagtagtccatttattaacaaaatagtcttagcaagggagagctctgttcaccccacaagaggccccgcagccgaggcccgcagccccggcgctgcgtaagaccgggaaggagggaaggtgttggggagaagacttggttaagtctttaatcctagccactgcaggaacccacggaaacccagtgccagctttggcgattgctggctcaggtctgggacatggcgaagggagtcctgtgatcctagggctccctgagtccccagcctgcccccaacagagctactactgctgtctggtttgctgacttgaggactagtatgctttggagggatccatcaaagatcccccaccccgcccctatggccaggggaggaggcaggccacagtcccaactagggagagaaaaaaaaatagtaacgataaagtacttcacaaaatataaagagcaatttcgtgccagcggggccttctaagacatttaattggatgtgtcaggtccctgtcagccggcaatcccactgcacgga

SEQ ID NO: 646 - DNA, 384 bp, Rattus norvegicus
  Genbank Accession No. AA924765
tttttttttttttttttgaagcacaagtattttataatttgctaaattctgtgtataagagaatagaattagaggttggggatttagctcagtggtcgagcacttgcctagcaagtgcaaggccctgggttcggtccccagctgataggcatttccaaggagtagaatggattcttgagggcaaagtctgagtaaatttcataaatttttcggagaagagaatctattccagcttgcctaggatctgccaggaccacaaacttgatccctgtcagtgtttggaagcagtgcagtttgaacgtgtctgtttccagcatctcaatgcctgaactgccctgttccggagatagctgggaaccaatggcaaagagcgagtggaacata

SEQ ID NO: 647 - DNA, 402 bp, Rattus norvegicus
  Genbank Accession No. AA924813
tttttttttttttttttcattattattatttgtttattttacaatcagtatgccatcttttaccactatggctttaaattttcattctacccaacaggtgtcaaggaatagttaagtccatgccttaataaaacagttaaaatatttacagattcaaaatagatgttttcataactgaaaagttcacctgagagttcactgtaacggtgccgttggcttctctcttttctttccaagttgttagcatggctgagggccctcacgccatctccactatccgtgtcctagatgttgaattcctcacttaaaattggctaagcatcaagctacagtaaattgttctaaagtttgcaggtggacaaccaatgtcatatccatgtttactcttaatataagcaattt

SEQ ID NO: 648 - DNA, 494 bp, Rattus norvegicus
  Genbank Accession No. AA924889
  misc_feature (1)..(494): n = a or c or g or t
tttttttttttttttttaagaaaagatatttattatttacaccactgaaatagtcccataagaacaatgtacaccatgttcatttaaaaggagcaattcccttcaatgcaagaactgtataaagcaatactgtcaacataaaacaatagtcacattacatatttgcacaaggcttaagcattgcaagtaacagatctttttactctcatggctagatgtttggtgttagcagttacaatgacactaggtggagtaggcagaaatgctatccatgcttctgagagtggagttggtgacggtgcctttttactactgtggtaagctgtgctcaggactacagtgtaggcagaaaggctttttctacttagccaccaaaaagaaacatattcttgtcctgcagtgttacttcagtctgcttgttaccctgtcatctanggcacagccatatcacacagatgttcttcattcttaaagaacactgacaactccagctt

SEQ ID NO: 649 - DNA, 497 bp, Rattus norvegicus
  Genbank Accession No. AA924902
tttttttttttttttttcaagttttaaaaatcactttattaggttgaatagttagagtggtgagaactgaatgtcaacactgcttacactgaagtgcagaattgaacttcactaggggagattgaatacacatagagacaactcaagatcttcctgggtttgtacatgttaacaaattaccaaggtaaggccatatctgagaatctagctggtccctgaatggccccaggttcccctaataattagttatgctatcatttaagtcttacagatattgatcatttagttcctactgtatgtttcaggagaattttaggagatggttaattattcgggtcaatttaattattcaaaatttgtgcttgagtgctgttaaatatacttgttcagccattcgatgagattcctcctcgcttcctcaatgtagggtttgtctgcaggggagcagtcttctctcttccgatgcacaaagccatgagtttgcccagaaaatgtct

SEQ ID NO: 650 - DNA, 422 bp, Rattus norvegicus
  Genbank Accession No. AA924918
tttttttttttttttttgaaagtatttatttggtatttattgcttttccttgtgaatttaaccacctctcccaaaaaagtggatcagcatttacagacacttagtttgtgctgagaagagtaaggccctgtgctgcttggccactagcagtggctgcacagtttaccagctgcccctggagcactgccgtgacatacatcaaatcactggaatggtagaggtttggtctttgttttttggttgaggtgctttttctttcttttttttcttttctttttttttttttttttttttttttgccttcctgctataaaactgaaattttcagttcatttctgaaaaataaattggtcaataaattcattttgttctgcttctactttacacaaagcttcatattcaacccgatacccctcgtgccg

SEQ ID NO: 651 - DNA, 412 bp, Rattus norvegicus
  Genbank Accession No. AA925009
tttttttttttttttttcatgattcagtcctttaatcctatgagggcacaggtccaaagacaggccaagtcccttctgatgggatggggggtgggaacacctccagtggctgcagcctgcagccctcctgtacacgattgtaaggctcaccctccccccacacaagcacactctcatctcatccacaggtcggagccagtcaggttctcacagctgtctcttctattctcctagcgcccagggcggccccgtcccttcttggacttcttggttcctgaggggggacggatgggaagtggggcagtacttgtgggtggtggtgatgatggtggtggcaggagtggaggtagagatggctccatgggctctggtgggccaggactgggccggaacccctcaaatggagagaact

SEQ ID NO: 652 - DNA, 448 bp, Rattus norvegicus
  Genbank Accession No. AA925019
tttttttttttttttttagtacaaacaccccagcacatggcagcatatggcaagctgtcagtgaggtgctaatttattggatcgggatgaggaagtctcctctgttcaagaggatggggacagtcctggctaccctgacagtgagatatgcagggtctctggccagatgaaggtccaaatgggaagacacctgtcaatcagtcatgggagtgccacacaggcctggctgtaggtacaggaaccatacagacagctggggcaggtcccctgcacattcatcatgaactatacaagatgaggctgtacatgagttaattacaaaagtcattatttacaaaaatctgtacacacatttgaaaaactcacaaaattgtcatctatgtatcacaagttgctacaccaaaatattaaaaatgggataaaattatatgtttctcttctcaattct

SEQ ID NO: 653 - DNA, 454 bp, Rattus norvegicus
  Genbank Accession No. AA925038
tttttttttttttttttaaggttttaaaatgcattttattgagggatagagcacatgcatgctaaagtgcacaggtggcttcttgaggacaggtggctgaactttgatttcgtatagtataaatagtgaccccaagtttggtaacaaaaggacacttgcaggaactggttctctcctaccacgtaggtcccagggacggaactcaggttgtcaagattagtagcaggtgccttagctcactgagccatcttcccagccccacagcgttattttgagatcacccctagttgtatccatatgactcctggtagaggaaggccagggtccaacaatgggacacaaggaaagggaggtcctttcaagaccctgcagagagctcttaatgggttctgtgtccttgaaccagggggacattggcttctctgaaggttcaacagagcctctccccaaagct

SEQ ID NO: 654 - DNA, 495 bp, Rattus norvegicus
  Genbank Accession No. AA925045
tttttttttttttttttgcagtttgaattgtggtttatttagaagcattcaagagttagactgtaaataaacatattatgaataattaaaatcgccatttattataaataccaactaagttaaataatactatttcacctatctttcccctttgagctggagtccagattccttctctcaaattcttaccaggagtaaaatctttagtgttgtgacctctgtacccatctgtacccaaagtgcccttttataaactaaatgagacctagaactctgaaaggaagcttcttcccacttactgtagtggtaaactgacctttctgtttcctgagttgttgggagtacaggtgagcgctaccagcattaaaatactttcctgggatatacttgctttgtgcttcaggcttcagttcagatacgaactcccaggaagccttggacctagtagggggagacgcactaacacagtgtcctgtcctggaaatgtgtatgctt

SEQ ID NO: 655 - DNA, 118 bp, Rattus norvegicus
  Genbank Accession No. AA925049
tttttttttttttttatcagtcttataaacaaaactttattaaatggtacagaagatcctgtgggagataggaccaccaaccgtgcctgtccagaacaaaagttggctgacccacacc

SEQ ID NO: 656 - DNA, 487 bp, Rattus norvegicus
  Genbank Accession No. AA925061
tttttttttttttttttccaaaccacgaatcgccccaagttttatttgtagtccatacaaaagagggggggaaaattaagatttctaataccacctacttggggagatagggaattgggaccatgccagtcaccgtcagctaaaacatcagtggtaagcagggatttggacacataccaactgactgtcccaacaggatctcagtctcaacaggctacacggacagtcagggtcccctggactgctggcacagcacataggaaatggttaaagtaactctttcctggcctccctcacatctaaaaagaataacgcgccgcctgacctcagctgtaggttgtgtcacctccaaacaaccttaagtatcgcgcacaaaaataaaagggagccaggaaaaaaaaaatataaaagaaattcccattttggggagatggctgggtagagggaaaaccgcagatctaaagccagtagcaagatgtgctgctga

SEQ ID NO: 657 - DNA, 495 bp, Rattus norvegicus
  Genbank Accession No. AA925150
tttttttttttttttttaagatgtgtaagcacattcagacctttatttttatttttttatttatttttattatttttaccattttgacagtttctttttctcaaaggtgatttgaacatgttcacctgtacactttggattcattttttaaccactgtttctctgtggttttttttccacacttgttttcctctcttaagtcaatcttttctctacagcagacaattatacaccttattcctattaaagaagttttttggtgttctgatgagcatttctagtgaaaactagtttttctagaggtgagaacactgaaacacaatacttttgttgcaaatgcaagggataaatttagagttacctggtatcacaatttcaaacaaaaccaaatgatgccattgttctgtgtcaaagcaaaagaagaactttaataagcttttacaccactgcaaatacaggaacagtaacccatgacatgcaacaaaagtaattttg

SEQ ID NO: 658 - DNA, 439 bp, Rattus norvegicus
  Genbank Accession No. AA925160
tttttttttttttttttcaaagaaccgctttattgatactgtgaagctgggcttgctgcccgcttgggtggtcctgtagaaaatacctgggaactgtggcagccccggctaggcacggtcgtcactgccacagcagaagggcacaagaaaccctgatatgaatgcagtctgggggtgggtagggatgtgcagacccacactggctgggtccccagaatgtttttggcaaatacaaatccttgccttggctcagcgctgttggcaaccagtttcagacataagggctggcccaggagctgtggcaccagtgtccctgcagccacttccttggtgaggaattgtacctgctgaggtacaatcttactgcaaatggggtctggacggctgacgctcagaggccccatacctggcattgtggttgtctggagtcagaaccagg

SEQ ID NO: 659 - DNA, 527 bp, Rattus norvegicus
  Genbank Accession No. AA925167
  misc_feature (1)..(527): n = a or c or g or t
tttttttttttttttttgaaagagctcttacatgtgtttattaaaccaaggaccagtcacggggtgggctgggctgggctagtgtgagaagacagagctctcactgacttttgagcatcccagggaccagccccaatgcccacatggttactgatagccaactggcttcttcccaagatccccagcccacacccagaacagagtcttacaaaagcgaacaaatacatttatcttcctttccatcccctggccagcagaggtgggggttaaacagttcattttaaaaaagacaacgactcataaaatgaaaacagaagaaagaatccagagctggagagctgagatgtggccctggcggggagcacaatgtgcatgggagaccctttctgccatactcttggagggggaagcgggtctttgggctccggcccatggacaccaagcccacgagtcccttggagctcatggccacatggtcacaactgcattgacttcttanaaaagcatcttaagactgtgtccctgng

SEQ ID NO: 660 - DNA, 452 bp, Rattus norvegicus
  Genbank Accession No. AA925212
tttttttttttttttttcagcagtatctgcatctttatgtacactacagggtgggctgggcagagtgcctggtcccagggacacaccacttttaacactttacaaaacccaaaggaaggaaggggcaagtgcaagtccaggaaatgaggccaaagtcacgcagagaggtcgctgttatcaaaacgctcctggtcatacacttcagccaccaccttgcgaccaccaaaccagcgcccattgagggcctggatggccttgtgagtctctgaagccatggaaaattccacaaaaatcttgacgatgatttctgcatcttcctcctcgccctgtttttcttggtagataatgacccggttcacagcaccaaatttgccacattcctctgtcacctctccctccaggtcatcatcaatgtccttgggatccaccatgtttcggagaaccatcactgt

SEQ ID NO: 661 - DNA, 483 bp, Rattus norvegicus
  Genbank Accession No. AA925267
tttttttttttttttatagctaaacaattttattggctttctgtgaaataaaaaacaggaaccgtcatggttaaaggcgaatcagtgtcaaccaaatgaaccagccacttggttcgagcagccgtggagaacacgagaggacattattgcttacgccccatgttcgtgcatgtgtctgttgtgttttggcaagaatacaatcggatggagctttggttaaggtcgactaggactactcattgaaaatccctgcatggcacctcctcaccagctcctccactccaacccggggaatcttcacactccattaaaaaaaggtcgtagaatttggaagaagaggtagcgaggtaaatgcggtgcgcaaagatgtgctcctggtcgtggaggataaagaggacgtcggcgcataggggattgtccagtaaacaggctgcgtcgctcgtcccggtggacggacactcggggactttgatgaccggggga

SEQ ID NO: 662 - DNA, 543 bp, Rattus norvegicus
  Genbank Accession No. AA925306
  misc_feature (1)..(543): n = a or c or g or t
tttttttttttttttttcaccagcactcttccctttattgatcgcctggcagaatcacattatgcaaccatgactgcagcaagaaccacactgaatggaagcaggaagtctggggctcaagagtcaccagagagtggcagctgggagatggcacctcgaggtgcagggtggaggctaggcctcaggtgtcccttaacccttactatggagaggctgaggcccctcatcgatagatagtcctctgactcctggtccctgggtatttcctcatgaagacagattctggcttggctgtggagatgaaagagactggccagggcggaggaaagggactcttcacagctcctgctgaggaggggtgggctggacgggttcccttccccatgattcacatcgatggatgatatgctggggacccgggccttagtcttgttcagcctctgggctcagccctatacatactacagcaggtgctgaggacaaggcctggaaggcacttggcttggacctccgggccctgctanagaatgcttatctggctca

SEQ ID NO: 663 - DNA, 479 bp, Rattus norvegicus
  Genbank Accession No. AA925318
tttttttttttttttctggttgtcaggtctgaaattttattaaattggaaactatattaatattagatcttaagtcaggcagggttggggtcatcaggaagaggtttggctgctggggaaggaggtggctggttttggctcctgcgactgtgaaccacgatgtcatcatattcatcgccttcatctctgttgtcactgtcgctgtcactgctgctgttgctgcaagggctaagcttatcatcctcatcctcgggctcaggttgggttgggttgggggtccgtggcaacaggggcatggctggtgtctggggtgtggtcctggctctgagtgaggtaggtatctgaggcatctcttgggtggctgggacggggctgaagcagtacatatgcacacgtgtgtgccctcacacggcaggccaagtgcagtgctgtgtggccccctctctcagtcaccaacactcctgcgccagctgcataga

SEQ ID NO: 664 - DNA, 571 bp, Rattus norvegicus
  Genbank Accession No. AA925355
tttttttttttttttttacatataggaaaacaactttattaagaaggctttcaagtccaaaaataaaactctggatacaatgtttttaaacccttaaatcagttcagcaaatatataatcagtgatttaagctgtcaaagattaaaggtccgttgctttatttaaaataaaatatattttagttcttaaaatttattccgtaaagtacatatatctaatataaattccctacatatacacagggagtatgaagtaaaaataacaattaaaaaaaaaactttaaaaacctttttaaaaaacaacaacaacagaagaaaagaaccgcaacactgagtcttaatttaaaaacaaaagaaccacaatcaaacaaaagttataaatctgttgatgggaccccccttggataccctcccattaccctcctcttggccactctgtggctgatgtataaaatggtatatatttgccccaaaaaaagggagtgtgttgggggtggggggagccgcctgccttttgaagtttctacaagaatccacactgtcaaatccagtgagagctgtaaatatcgtgt

SEQ ID NO: 665 - DNA, 483 bp, Rattus norvegicus
  Genbank Accession No. AA925359
tttttttttttttttgtacagactttatttattaaagttaaacatacaaaactgaaattaacacacactctaaaaagtatcttcttccaattaacaggaaggccttttccctacctttgttttgtttaaactcaacttgggatagctgtggtgcttcacttatgccaacaaatgctggcaacttgatctcgttaataaaaattacaaactcagctacatgaacataatatacagggaagttatggtcagattaatgcacaagaaatacaggaaaatgtaatcatgaagacattcagtactcttgttcattaatttagccttggatttgttttttttttttttttggttttgttctgttttttacaaaaatagtatctacactgtatacagggctgtacatcagctttgtcttcccatataaacattacacatcccaaaacgggtagcactaccacaagtgaagtcaacaaaggaaaacaccaa

SEQ ID NO: 666 - DNA, 419 bp, Rattus norvegicus
  Genbank Accession No. AA925529
tttttttttttttttttacggaagacacactttatttaaacaggaaaagggaggaatacagcaatatgtgaagttttccagcatttgtattaagaaaataaacaaacaaacaagcaaataaacaagtgcttgtgttgtcttttgtatgagtcacaaaatatttctggaactctataagaacaacttgggtgggggaaaggcagacaggaggtttttactatgtacatcaacaagactcagttataatgtatgtgtgtggtgtgcgtgtgtataacactagacgattagattattttttttaaaattacacatgtgtgcattttgcctgagcacgtgcatgccagcgtggacagaagaggacaccttccagaagtcacttctctcctttcatcctgtgcatacagaagaccacacaggtt

SEQ ID NO: 667 - DNA, 325 bp, Rattus norvegicus
  Genbank Accession No. AA925557
tttttttttttttttttggaagctggttgaattgtctttattaacaaaggggatatccaatgccactacattgagaaaggatacaggagggagaagggctacttgctgctcacactatatacagatgcaagcaagggaggatacacggtgggagctctgagccctctccctctagggaagggaagaggaaagatggggtgggggtggcgacatgctgaagtcccccaaagccttcctggacgtttctattttcttccaggcacggcaaccgtgggggtccaagttgattgtataaaggttggcatcttcgggtcggctccatgta

SEQ ID NO: 668 - DNA, 499 bp, Rattus norvegicus
  Genbank Accession No. AA925603
tttttttttttttttttgggttgcttggtttttattaacagtcacgtttgtatatgggaagagtttcacagatcaaacagggagatccaagcacactcagggttttgactaaacggatactattactaacactgctcacggaggcaagcctgattctacctccaccggaaccacctaccctgcattctcctgggtccattttgtaccctagtgtcatgaccccagcctcctttaagactaactatgaatgcctccacccacatctgcccctccaatcttatcatattcctcaataagaaatatatttgatgttttttctttacttgacgaagtagagttattattgcagaaatgaaaactcaatgaccaactttaattttaaaactagaaaagaagaaaaaatgtcatcaataatgaacttgggtagagtacaacaaggagtatgagttattttcaaaggcaacatatccctattttgtacatatttgcatataaaagt

SEQ ID NO: 669 - DNA, 408 bp, Rattus norvegicus
  Genbank Accession No. AA925662
tttttatttttttttttgttcaaaaatagaaatttattaaggtgtgtttgtttttaattcccaaagcttcttaaaaccgtcttttcattgagcccatgaggtacttgaacgtagacattatacagtatgtagcagtgattgtcgtgtgtatgtgtgtgtgtatgtttcactgtgtatctcaggctgacctggaactctctctggcctcaaagttacaatcgcctgcctccacctcccagatactggagattacaggtctatgccccattcctgtctcttttctctgtaaagtgaaaaggctcaaatatctgaagtccacttaacccctgacacgacctagctttggtttgactattattgcacccccagtcagtacccagcccccagcacacccctgttgagtcagta

SEQ ID NO: 670 - DNA, 171 bp, Rattus norvegicus
  Genbank Accession No. AA925693
tttttttttttttttttgtaaggcgtgcacttttaatacaacggtctcacgtcagtgtacatgccaaccctgactgcctcaacacctcacactactcccagggagaccaacgccttcatacatcaggttggcgggacaataccctggggcaggtcacagtggctgaccatt

SEQ ID NO: 671 - DNA, 436 bp, Rattus norvegicus
  Genbank Accession No. AA925708
  misc_feature (1)..(436): n = a or c or g or t
tttttttttttttttttgaagattcaacatttatttaggttaacaattcttcagcaggagtgcatggggagatggatatcagactgacccccatccctacaaaccctgttttgtccccagacaggatactaagcaggacttcctgatgaaaacgggctgacggccccaactcatgcctcctgagtctgggagaagaacttggacttggatttgagaaatgcttactgagagccaggcacgatgatgcgtacctacaatccagaggcagaggcagatactgttgcaccttcaggggggaaatgaagcacaaagccacaatgtcataccctgcctctctganggagttcctgtaacagggcagcatgggatgggatggaccaatcacttcccttgttctcatcatcccggctgtgggacagggaaagcgcctgccctt

SEQ ID NO: 672 - DNA, 381 bp, Rattus norvegicus
  Genbank Accession No. AA925710
ttttttttttttttgttacggtattatgtactgtaatttggttaaattggattttgggtgacttcaaattctttcctcctttctcataagactattcacgttctttactggagatgagagcatgagaatttgactaaatttcagacttcctttaatgtccgtattttgttcctttctcagtcttcttacatagaacagagattgggttttcccaacttaacaaggagaagggtgggaaaaagttagggtatacacaagaaccactgatgtacgcgtgaagctcctccatcacatagccagcctgtgctgtgtctcttccgtctgctagtggctgacggaggccgttccttgtggttaaatgtctaataaactcaagaacgt

SEQ ID NO: 673 - DNA, 501 bp, Rattus norvegicus
  Genbank Accession No. AA925752
tttttttttttttttttgatggacttaacaaaatacaagattttattaaaaatataggcttagtgacatattaatcttttcgaaatatgctgtggcttattgcaatatataaataaatatatatctgcaataagagagagagcgcgcacaccaccgtttcttcaactacagataggtgtgttttataaaaacaagcatgtcttaagtcttcgttttggagattggttttaccaaaaatgtagctagtgcataatgtaggctcatccactacttattttccattcttagatctgcaagcacagtatgaaatcataaaagcaacaaacatcactactccaacaccaagtaagaccatctcaaccaggcccaggagctttattttcccggtcacttgggttctgaacatttctgctttctcatcgccgatggtcccagtctcatttagccacagtataggtacaatgtaaggtctcttcagattcttcagtgcttctatttttc

SEQ ID NO: 674 - DNA, 379 bp, Rattus norvegicus
  Genbank Accession No. AA925844
  misc_feature (1)..(379): n = a or c or g or t
tttttttttttttttttaaggatcatgacgctaccatttattggagaaaagaaaaaggagaagatagccatgtaagggagaggtagctctctccagcaacactctttctctttgaaaggagtcaaaagagaacatgaaccagagcctcaagacagaaaaggcagtactcaagaatatatattttgaatataaaaattcagttatacaatcagtagcattcanaatcaactacacctacacaattataaaaattgtttgtgtttttttttaacaatgtgttttaaaagctcactgtattggaacagatacagtgttctgaaggcatataaacccaccacggtcatttggatttggctttgctgctgggaagtgtgcccag

SEQ ID NO: 675 - DNA, 440 bp, Rattus norvegicus
  Genbank Accession No. AA925854
tttttttttttttttttcagacaatgtaccattttattccttataaaatatatttcatatcattgctgtaaaaacattacatttcatttcacatttaaaaaaaatcttaacagtaaaaataatacttggaagacagcggggaggggcgggggagaagcgccaataagacaaattcacagatgggattctccctttttgtgttgttgtttcttgcccccggtaaaatcagaacctggggtgatcagaaagtaacagattttttttccccaccaaatcagtttccgtatccaatttcatagggtcctctaaggtgtcaagttatacactcactcccacaaggcggccactgctcgaagtgctgtctggagcagcaacactgtcttcaaggccaggtgaaaagccttgtacacccaagccttggttcccagggagccctttgg

SEQ ID NO: 676 - DNA, 531 bp, Rattus norvegicus
  Genbank Accession No. AA925876
tttttttttttttttttacaaagatagggtcatttattcatgttatattactgcatttcaaaggcaaaaatacagatgtctgttctgaatatcaaggtcagagacagccacccactcccagccccagtggtaaatacatctatacacatgggatatcaaaatacacacagagcatcacaggtctgtaacagcccagtgggcagccgagaccctgccaggctaaagggcagcacgtttcctttgcctttctgtgcctctgagctttcccaagggccctgccacacaggccaccacaaatatagacagagaaagacacagcatgggacaacagggtgagaattcccaagtgaaggaaatggtccctgccccctcaatcctccagcccccaacggcatctcctgggtcaggcaaatgcccaggcctaacaacagtgccttgggtgtgccttgggcctgaggtgccccaaagcatgctgggaggaaacggaaagaacaggcaagacaatttcccttgggtctgagaatgaacctc

SEQ ID NO: 677 - DNA, 525 bp, Rattus norvegicus
  Genbank Accession No. AA925920
tttttttttttttttttagcctcaaaacagaattcttttattttgtccaaaacagcacagcatcgacatcctcaacaatacataaacctatatataaaatatagaatatcttcaatatttttcttttatatggcagcacaatagtatatatgcaagtgaaagtgctgttgatgggacacgaggacacttatctgagcaatgtcctagttaaccagatgtcagcagtcaatggccagtaaaaaaaacagtctgaagagagttcctgcaaagctgggtatacgtacctcgttctgcgccctgccattccacgcgcgcctgactcttctcaaccacacctagcctttggaggagtactacaaaggtacagaaaatacctgcctgatactaatttttcaccatgaaaatccaaaatggcttaaaaaaaaaaaaaagaatatactggatttcagaagttatttaccgtcatctgaaaaaaaaataccgtaaattcttccaaaactacagggtttctaacaccctgtgtcc

SEQ ID NO: 678 - DNA, 480 bp, Rattus norvegicus
  Genbank Accession No. AA925959
tttttttttttttttttacagtcataatatatttattttaagtgccatccatgcatatcagttctggcagcgacaatcctaatgacacttggaatatgtctttacagcactaaacagttacaaagaatgggtgccactcaccattggcagaatatgaaatcgtgcaataggaaaactgtagaaacattaaaacactgactgtccaacagcagcacagagagcaggttgtttctgcacaaaagccaatgcatgtcaccacgtatatacaacagaagtatgtacacgtcacccttccaatgaacatatcaaaatactctattccatttgaaatattcccaagatcgatcccctcccacttcaaagggcgtctgagacacgtattaaatatttacaggaacacacaggagcacatttacatttcaaacactgccacaaatgccagtcggactcttctcttggacagagcaccccacctgtgta

SEQ ID NO: 679 - DNA, 405 bp, Rattus norvegicus
  Genbank Accession No. AA925961
tttttttttttttttatgttataaatgaagtactgggtagatcgtcagtcatctctatgatttaaaagaaataatagataactctaattgagagatagaaacggtgttcgggcctctcttccctagctctaagtatctattcatataaacctaaccttgggctccatttttggatactttctccacatattttattagcttgtcctaccctcttcagtatccaacaaacgcttttacaaaagtaatacgaaacacacagctctcaacactaactggtcaatgggaggagacaagcagtgtccacttaggatgacagagattagaagtaaaaataatgtctgaaggcagagtttaacattctataaatgtacaaaagacgatagatctatggatgaaatttggtta

SEQ ID NO: 680 - DNA, 494 bp, Rattus norvegicus
  Genbank Accession No. AA926016
tttttttttttttttttgaggagaaatctggtttttatttctgggaaatagcaatactttttgttacatctcacaatctgcaagggaagggaaagtgagtagagatcgtggatggacatcttgtctctcactgtagggcatggaaggtgaggacaccccgctggatagacaggaatcaacaagacaacaagatcccttgtgcctggggtaggactacaggcaacagcacttgtggtctaagttcacttcctcaaggagaggtctccatggaatgaccatgattcccaacatggccagaaaacccatcaatcccactcatagggcagatgatcaaaggagccgcactcttccctcccgagtaacttaggctgaagtagggccggactggcccacagaaggtagcatgagagaaagtaaaggtatggcatctctctgtcacattgtagaaggaaacctcaccagcatcatagtccaagaaaatccctaccctctgg

SEQ ID NO: 681 - DNA, 361 bp, Rattus norvegicus
  Genbank Accession No. AA926021
  misc_feature (1)..(361): n = a or c or g or t
tttttttttttttttttcaggggcagaactgagtttattctccatcacccatcttgatcaaatgtctactgcccccaccctgggaccatgggcgtgtcacacacacaggcaggcagttaagctccacacacttgggcctggtcttcctgtaatcacccagacccgtgaggggacgtggagctggtcatccctgggctccaggccctctatgacttcatgggaactccctgccaactgctccaagaccagagcagcccacatcggttcagaggagcaggcccagggctagacttggtctanctgggcaggagatctcagccaagcctccccaaaggcaatgtgtgccttgggcctggaaagt

SEQ ID NO: 682 - DNA, 488 bp, Rattus norvegicus
  Genbank Accession No. AA926044
tttttttttttttttttggaactggaatgttttaatttttttttcccagactttaaaagtattccataataccttgaggatgggatccaaatctaaacacaaggtccgcttgtatttctcgtggctggaagataactttatgtatttttagcgcacctgtattttgactgcaacccatcacgaagtgggctgtgggcttttccactcttggcatcgtgtctgagcacaggtgttagattttacagtgcttctgagcttcagatttttcacattaggtatgctccacctgtatgataaatgctaacttaaatgcttgtcagtacataccaacaaacttttatttccaagcctgaaagttatggtagcatggaggtcagaacatgactcttctacacggtcagattcagtttaccaaataatactatcaagaaccaactggaaacttggtgagagtccttccaaagctgcagccctttccaaaggggttg

SEQ ID NO: 683 - DNA, 525 bp, Rattus norvegicus
  Genbank Accession No. AA926085
  misc_feature (1)..(525): n = a or c or g or t
tttttttttttttttgtcaacatgtaatgccctgggtttattttgtgagaattctatcacaatgtttccaggtgggattaaaaaccttaaggataacatatgtctgccattggactgggcattcagacttcggtactaacaaagcagtagtagtctggtaagtaccattctcttcacagaagagaggtcaaatatttccaaaggaaggcacccgatatttgtggttctggcctcgcagccttctggagaatcttaaaaggaaaaagctggctggctgttttacaaactggaatgacgatacacggacagcattcttctcccctatatcctttctgtaagaacaagtaaagaatgaagtctttaaacaattccacaatataaaagtacatctttttgtgctaaaaaaagggcaagacaacataaactccagttgtaaggactccgtttgtgtacttgatttaacactttttggtgtggaaggaaatgggacgactgggctgtttgtaaggcancaacataacatta

SEQ ID NO: 684 - DNA, 369 bp, Rattus norvegicus
  Genbank Accession No. AA926089
tttttttttttttttttaccacttaggacattttattggcatatgacaatttacaagggtccctgttgaaatatacaccacactgaggaagaatcgtttagccatctacattcattctcattggatattttcccctcaaattataatttaattcccaacactgattttaactgtgacgaaagggaacaataacaattctttgaaatagagtgcaactgggaaagactttgctttttatattaaaattcctaagatgttgaagcatacaaacctaagaattgagtcatggccttctaaaaactgttttcttattttttttttctggaaaaatcctttggttcctttttatttcctttctccgggtaaagg

SEQ ID NO: 685 - DNA, 425 bp, Rattus norvegicus
  Genbank Accession No. AA926098
tttttttttttttttttcatttggcaataaatatttaattaaaatgtacgtgggtgacagattcaaatatggttaagcagtgagaaagaaaaattcaaatttgtacggacccttcaccacccaatcttatcttgccccagcatttagagtgattaagcccagctcttcttaaaccactgtctttagtttcaagccaacgtcggttgttgggattcttctacaatgtcatcggcgggtacccgtacctggggcgaccttgtctgcgctgggtgcagatgctgctgcggcagcgttcctagcccgaatgtgggaggccaaggcacttaacatttcctgagtggtgaggtgggctcctcgcataatcagccgatacccatctccgaataacacgtccacgcagggctcagagccgtcatgcctcacgt

SEQ ID NO: 686 - DNA, 341 bp, Rattus norvegicus
  Genbank Accession No. AA926137
  misc_feature (1)..(341): n = a or c or g or t
tttttttttttttttttccagaaaatacttgagtgtaataaggatttctgcctgacattagactctcccgacatgcaagtgttgggagctcaaaggattcttgagctgggaaatcctcaagggagatgacgtagagggagccaggcgtccaaggcgtacgaacaaggtttaatgctgcacccgtcaaggcaggagctccccagatcgatgcagacttcttcctccgtgtcctccacaggactaagctgtttctgaggcctcagcgcatgctaccatcgaggcctgtggtggggganggggctgcctaatcgtccttcttaaacttgccattgatgtacggc

SEQ ID NO: 687 - DNA, 466 bp, Rattus norvegicus
  Genbank Accession No. AA926149
tttttttttttttttttccatgaagatcattttattgtaaaaatgtaagcaaatacaaatcaccctatgtgaaatcactgtgtatcagcataaacataatttcaaggggaaaaggaatccgatcaactacacaggaataaacattaagtttcaacagtgctaaagttatttttggaagacatgatccaagtatggtttttcttataaggaccttagaaaaataaaaaaaaaattctgggtgggccatctttataatcccttcattcatgtgtgtgtgtgtgaaattttaaattttttaaaaatattaataaaaacaaacaatgagaatggaatatggaaaggataagagaaatcactaaactttttcaaattctttctctagtgaacataggctcgccactaattactaagtgtggtagcaaacaaagttgtttacatttcaaattctctaagggtcatttcgggt

SEQ ID NO: 688 - DNA, 406 bp, Rattus norvegicus
  Genbank Accession No. AA926193
tttttttttttttttttactattcaagtttgtttatttattagcttattaagccatcttactgatttgtactgaatagtggagaaagtatacactggacataatatgattttgtgaattgtaaagtgatgtcagtaataacagagtcggtgtcacagtccttggcatttacagtttgctttctgatcttcctttggctggattgaggcttgcagacagactcctgtccttgatgtctatcttctcatcttgatcagagttccatgcagaagtttagagaggttccgtccatcttttgctcatagatttcatcaaacctctcattctgggccacagtaaagtggtttttccaatcacccacaattccttttctcatgaaaggggaaatggactggtccatgatagtc

SEQ ID NO: 689 - DNA, 433 bp, Rattus norvegicus
  Genbank Accession No. AA926205
tttttttttttttttttaaaataaccttcccaatactggaagatgttttgttaaaaaagtcgcagttcaaaattgtactgaaaacttatctaaaaataggtctgtagtcatcttaaaaataaaaggtctctcctctgataaggagagacagatattatcagataccaacatgggaggcatctctgatgtagatttggaaaatggcccggtggaagaaccagaaggaaagagagcgagggggaaagacaaacggactaatgatgaggagggcgagacacgtgggaggaatgagcctcagcccgtacttctctctctctctgcagccaagcacaaagcagatccgaggcagggaagaaatgtggggactcatggtacagtgacctgcagaacacgaaacctaccaaagcggacccggtttaaccatgaccgctga

SEQ ID NO: 690 - DNA, 277 bp, Rattus norvegicus
  Genbank Accession No. AA926231
tttttttttttttttttggtttatagagtaaacattcaacatttatttagtctacatagtattgtcagaaacactttgtccaggataatgtatgctgacagtaacttgccctcctaccatatgcacacaatcagcaacagtgcaaagctccgatgcaaaatgagatagtacacacttctatttattaaagtttattattctcataattacaactgtaatttataagtttgaaacacgaggaaaattctatgaagagagctcaaatgaagctgaacta

SEQ ID NO: 691 - DNA, 538 bp, Rattus norvegicus
  Genbank Accession No. AA926303
tttttttttttttttatctatcggaacgactttatttaagtacactgggccccaccaggcaatgtggctttgcgaggctgtgcaggggacaggcttgggctgagagaggtgagctggctaagcgcactgcagtccacgggctgccacatcgattccacacacaccagcttcgctttacatctggcaggggcctttggtcataggatggtggagagagaatactgtctggaatctggaactggggtgagacggcatcactagtgagggtgccgtgcacacagactcaccctagctttgtactgggtacaaaggcccttggaccacttccgaggacaaggctggaatccatcagatcttggcactttggtctggccccttctctcccttcaatctgaccaacctccaaaggggcctccctgccactttgacttactcgcccggtcaattagagtggcaaaggcaacatggttaactgcagcttgctttgttttgaagggtctaaatctccaacacacccccctcacaaagggcctctgcc

SEQ ID NO: 692 - DNA, 571 bp, Rattus norvegicus
  Genbank Accession No. AA926305
tttttttttttttttttgaattttaaaaaggaaatgtttattgttgtgttacaaggtgattataaactcctctaaaaaaagcaaagatggatttaaaatatcaatatacatattcatctaaaaagcaaaagagaaaaaaaaaaaccgaaaccctgcaaaatgcggggtcgccgtaattaaacatacacagagcttgtatactgcaagacaggtcacacaccaaggatccttcaaacacaaacgctcctcaccttcttggttggtttcaggtttttgtgtgtgtgtgtgtgcgtgtgcatttgtttttttgttttttgttttttacaaaagtttaaaatattttaaaaatattttgaagtttttaaaaaatgtcctgatgagccagacatatttctgaaggaggcaaaacccacgttctcagcttttctcttgtgctaaatacagtcacagttgttagggattggcaaaattggtttaaaagaaatgtaactaccatctcattttgaagccaaatatctaacaagatgccctgtccttcggggaacatgccagaacatgcctgcaatgacac

SEQ ID NO: 693 - DNA, 516 bp, Rattus norvegicus
  Genbank Accession No. AA926360
  misc_feature (1)..(516): n = a or c or g or t
tttttttttttttttttattgtaaaaactcttgtttatttcctgaatgaattttggggttcactaggtattgtcagaccatactccttgacaaaattaaaaggtcttgttttatttatttaagtgtatgttcatgtgtatatggaagcacaagcatgtatgaacatcagatgtcagaggtcaaccctggctacagtttctcaggaacactatctaacttgattttgacacaggtaactcttcgaagtgatacttgttcacttaactatgatggttgaccagtaaacaccagggatccacctgtctctgtctccccagtgctagaattacaagtgtgtccgcttatctgtcttgtttttctgacacaggtcctgaagactgacctcaggtcttcttgcttgcacagcaagcacttttgcagctgatgaatctttgcttctccctcagttgttttatacatganataatcgcactgtttttctccataatgaagtacttccatggagcataaatgctt

SEQ ID NO: 694 - DNA, 587 bp, Rattus norvegicus
  Genbank Accession No. AA942670
  misc_feature (1)..(587): n = a or c or g or t
acctcgttcactagcagttctgtgatgcaaggttaccacacacagttagataatgtctgcattacacatccagggctatacagcaaaagaatcagggttagtacaaatacaagaactgtatttacattttgtatactcaagctccaaacattaatatttacaaaataaaacatgagagtgaatccagaattaataatgtacattgttgcttgtgctcaactccttccctggggagagatcagtttgcaaagtcttggttcaaaaaggccacttatgcttcatggattctgttatagcatggggaggatgacgagagactggactctcaacagacaagtatgtcagagccacaaagtctacgacaatgcttagacgtgaggaagctggtggatccctcaggtgagctgatgcctgaatagacagcatgagaagggtcaactgacgacatgacaatggacggacaacatccagggttggcacctgcctctgcctgactgtctgtctgagcggccgtctaccgtgaggctctctgatctgcangactgtgactgaacccgaagcatcacatagaactgccaagtgctcta

SEQ ID NO: 695 - DNA, 518 bp, Rattus norvegicus
  Genbank Accession No. AA942681
ggggtgagaatcctttaattatattcatttccagagaacaataaatacaaaaatcataaagaatataagtaacagtaatatttctctagatacacacaggacctacttttatacaacttaacaagcaaacacttttattcccccaggaattaccactgggaagagctatacaacagaagagaagttgccattaaattaaaaactatttgcttttgaccctaaagactgaggttctcactccagtggcccattggaggtgcagaaaggctgaagaagtcagttcagcttcgagcagcagcagtctggggctgctccgactggagctgtttaccaagatactcccagttgtgcaccatgagcttctgcacagccagaagagcattgtagcggacctgctggtcttcatggtgcatgtggttcatcaccagctgcttcccaccgagctgctcaataacccgtttgccccggggataatgccggacatattctccaacatcatgagcagcaacagctaaaac

SEQ ID NO: 696 - DNA, 432 bp, Rattus norvegicus
  Genbank Accession No. AA942693
gcctgatgatatttggcagctgtcctccagcctcaaaaggtttgatgacaaatacaccctgaagttgaccttcatcagtggaaggacaaagcagcagcgggaagccgagttcaccaagtccattgctaagttctttgaccacagcgggacattggtcatggatgcatacgaacctgaaatatccaggctccatgacagtctcgccacagaaagaaaaataaaatagccaattctaaaagttctccttctgctggatcatacgaattactggtgggtaggggaaaagacaggaagcttaagcttggtcaagtaagaaatgttaaagatgcccctgtttagtccaccctggataaatagaatttcctagtacagatatgcaaagttgtatctttgatggctagctgtagcctccttggtctgctgaatggcttt

SEQ ID NO: 697 - DNA, 717 bp, Rattus norvegicus
  Genbank Accession No. AA942704
tggtttgacaaaagttttctgaaaatgctttagctttatgtgggaataggtataaacctcatttttatgctgtattttatatcttagttgtgtttgaaatgttttgatcttaggaaacatcaaaataaataatggcatttggtgtacagtgtggtcctatgtggtgaccagccagggctggggacctggccaggctcaggatgctacagtaagctacagcaagggtcactgaacactatgaagaaagccatgcatggagaggaatcttcaaccccgctgatgccatcttctgaacagaacctccaggcccactctggacagcagccagtgtcaggacatcagtggccagttccaaggacacccaaaggctttctttacaggcttcagcgccctagctgcttaaaggaactgaagttcttgggcttgtgatgatggcttttgaacttcttggtcaacggggtgagctccttcttcctgagtttacggcccctcttgtggcccactttggcttctctctgtgcagtgctcttttctgactgtttgggcttctcctgttggtctgtctgaaagtcttcaggcttgagcagttctctctctgtgaacagctcaggtgggtataggtctgtcatgctgtcatcactcaaggcgcctccctcgtcactggaagttggttcccagaattctgttctctggcctgggaggtcatcgacatccatc

SEQ ID NO: 698 - DNA, 588 bp, Rattus norvegicus
  Genbank Accession No. AA942716
aatgaaacaaatccaaaagatgtacagtcaggctcacgttgtgcagttcacaagcatggaagaaacaaacagacagaaggacagagttccaacagaagaagctaacccaagaccaggctggacttgccgccaggggggtttctcctggatggcgctggggccggagccactgggctgggcacaggagcagcgggcaccggcttctcttccacctgtgccaggctggcttggaagtctgtgtccacattttcatgcacatcactttctcccttgaggtctaagaaatctccagagcttgcttcagaagagttacttctctgtgttccaggcgactccgaatcctccctgccacctgctgacttggcccaagatggggggttttcttcaggtgtcccaaagatgttagaagccatcttgttcttcctcacgggctgttctgttggctcatcaaaacctaatgaaaaattggacccaccacctggaggccgcaaaacccgggagctgttcctgctgttagggtctacacccttgaaggtggtggcagtggtcatggcgcaaaggggcgaggtagactggccctgaaaacgc

SEQ ID NO: 699 - DNA, 323 bp, Rattus norvegicus
  Genbank Accession No. AA942718
cacagagtcacagacaccatttattactgaactgcactttcaccttcacacaaactatttcaaagagctggaaaaagtgtagggtgaggggaggagagggacaggtgcctctcagaagccacgaccctcagtgggcttccccaggcagggcagggacggagcgtcaggctgtcagtctctgggcaccagctctccacgggcacgcgcacagcaagccagcagctcctcatacataaatacagacacgcttaacaaaaatagtatatcatcttcacaaggaactaatgactagtctcacatatgtacagcagagatcccggggt

SEQ ID NO: 700 - DNA, 511 bp, Rattus norvegicus
  Genbank Accession No. AA942904
cactctaccaaatattaatgtttattatacaaaggctattgagatttgctgctggggtagcgtaagacataaaccagaaatgaacagagaactcataaacagaccaacagaaatgcgctcacctgacacttggtagatggcagaaggaagcataaagagatgaatgctggtacttctctcagttcccctttttattctgtctgggaccccagttcataggatgtcacaacatttaaggggaaatttcccttctatggtaaatctgtctagatctgcacttacatacaagcacagagctgtctcctaggtgattctaaatcctattaaattggcaatgaaaattaatcattataattctacttcctgcaagcctgacatcaaacatcaccttagttattctaccctggttcataaagtctcatttggtctctctctttaacagtttcagctctgctcaaaaaatcagtctctgggttcggtcctcagctctgaaaaaaaatcagtgtcttct

SEQ ID NO: 701 - DNA, 452 bp, Rattus norvegicus
  Genbank Accession No. AA942914
  misc_feature (1)..(452): n = a or c or g or t
aacttgcaggcaactgtcaggccagttgtcttcttcacacatcatgtggaaaggagctctctccaccctagttactctgagacatgcagtgctgctctggcagtacccagtcctgagagatggagtcatagtcctgtacccagtttcttttataaatactttaattacagataatcctcactccaagtagtatcagtgacgcagtgctaccaggcacacaagctcacgcacacagacacagacacagacacagacacagacagacagacagacagacacaacacacacacacacacggctcccacactttcacagaaagttggagagccaccacacgattataaaggggccctacctcagtgaagtaagggtgagaatgacttggtcatttcagtgtaaataagccagaggaaggagagtgttgtcacttgagggaaaanataagagggatt

SEQ ID NO: 702 - DNA, 461 bp, Rattus norvegicus
  Genbank Accession No. AA942995
  misc_feature (1)..(461): n = a or c or g or t
gagcaaatgttttaatcaacgttgagggaaaacactttggaaagcatacagaaaaggtagttaacgttgaatcgcttggaaacggaacctcagggaggctaacccaatgcacccttggncaacttttgcttcctaaattccttgtctgacgtctggtcccagtgcacgtgggaatgacagctgccacgaggggagtgccggcctgctgctgctcagagcgtgcgtggggtgtactcaggcagcctctgcagcctctccttctcagcctcgctctcatctcgtgctatcaccaatgaatgtgaatagcccatggccacctgttcggagaagatccatccagagtcttcacctcctgagctgcagtagaagacttgggcttgtggtccccatatcccaattccccgaaggttggtgatgggccccagctgatggtactctcgtccgncgctacgatgatgctg

SEQ ID NO: 703 - DNA, 345 bp, Rattus norvegicus
  Genbank Accession No. AA943004
  misc_feature (1)..(345): n = a or c or g or t
aaatcatgattaaaccacacagtgagtatcactatacaaaagcagtaagaggccgacacttcacaaaacaaattcaaaagagcccagctccatgtctactgcgcgtttctcactaactgggccgacacttggtgagttggaccatcttccaactgagtcttcacattctcagagctacacacgccgtaattcaggatgactcttttggatgctggcttgcaaatcatcctccaagcttgtcacagacatggaactcttctgaggaaacagagcacagcacaggggggtggcgancaccatacatcagccaaccagcgtgacttgaattggtgcgctcatccacgg

SEQ ID NO: 704 - DNA, 601 bp, Rattus norvegicus
  Genbank Accession No. AA943015
aatctagatacaggtactttatttacaaatatttagataatagcattttgttacatcaaataaagagtacagcagtctgaataaatccttctgtcacaaaaacaattgagacccactgtaactaactttgggaactggggtattgcacctaaacaggccgagggtctttactttgtgattgccaccttatatccccatgggtgatttgttctgtaaatatatacacacaccagcaggccatggtccctgggtgaatcccttgtgatgcaacagtatataagcaaatggatcacgctaagtctttaacagaacataccagcctacgccaagattcctgtaagttaaacaaggacaaaaacggtgaatccacccaaaaaaaaaaaaaaaaaaaaaaacccgaatcctattttctgcacattccagttttggcttttatttaacattgactatacaaaactctggaaccacatgtttataatccagaagatgtacttttacattagtgtctggtaaagagggatttaaaatgtgtattttaaccacagcattgagctaggagcattttatataatgtgctcaggcttacctacgtgcatttcca

SEQ ID NO: 705 - DNA, 506 bp, Rattus norvegicus
  Genbank Accession No. AA943131
aaaagatcacataaaagttggtaggaagggagaaggttaactgtttacatgaaacctgggttaggggcagagctgcctaaagaaatggtggctggagcgaactgcagggacatggggagtggagatggcagcccaggcctgcacagcgacacacacccatgcaacccacagggctactgccctgctcactccttagacatgttcttgatggtcttgtgctcctttatagctcgctcccagtcactgccgttgaattcctcggtgaccacgctgcgcacagtgccttcatccaggcagtggggtgcgataccaaagcccccagggttggagcgtggggtatagaagctctggacaccgcatctcttacagaaggtgtgctgggctttgtgcgtgttaaatgtgtaggtggttatgctctcagcacccttcaggagtttgaagcgagaagctggaacaatgaagtgtctattctgcttcttcttgcaaatgctacagttgcagtcaac

SEQ ID NO: 706 - DNA, 488 bp, Rattus norvegicus
  Genbank Accession No. AA943159
  misc_feature (1)..(488): n = a or c or g or t
acgacagcagcgtggccgcgttgccggcgaagtccgtggccgtatcgtaggccgaggccgcgaagtccagccggttgttggccggcgtcacgaaccagcgctgcggcgacggcgcgcccgggtcctcggcctgttgcggggacagtagcccgttggtgtgaggcacgctgcggtccgtgccaggcccggggcccgcgccggcgcccgggtggaagcgggccttggcgtagttgctcacgaattgatcttgcaggaaagagccggccatggcgtagcgagcgccgggcacgatctgagagcgcggagagtcgttgggcgacggggtcaagcggtccatgtcgcagcccgtgtagatcgtgtcatagttatctcgaaatccttttgcaaaggggttatgatctatttttagttgtgtaatatcggtgttctgatangcggtgacagcgatgaactgagtctctgggaaagtgaacgtctggacgcggcct

SEQ ID NO: 707 - DNA, 401 bp, Rattus norvegicus
  Genbank Accession No. AA943202
aaaggactttattgtcctgcttctacaccataataaaaagggacctgcaagctccaggcctgtaccatttgttatcactgtgaaacatgactcacttgaacatatttcccaccccgcccccagacttcacaagataaatatgttacaattttttgaaaacagaataaattaataacttaaatgattaggcaccaacaatgacttgaaaaattaaatgtcaatcttaaatggtaacaagacacgatgtaagactaggctgcttctatttcatttttcttcccaacaaatagtaacaatcctgaatgaaatgattctaaatttcaagacacaaataaccaacagattacacaagaacacacaccaccagataccacaacagcacaaattattagcaggcgccc

SEQ ID NO: 708 - DNA, 115 bp, Rattus norvegicus
  Genbank Accession No. AA943217
aaccttaggaagcagtttaattaggttgttaaaaattagaacaccattttgggagggaaaatgccgttcgccagggaaaactgagaccgcaggtacccctggagctgggggacag

SEQ ID NO: 709 - DNA, 405 bp, Rattus norvegicus
  Genbank Accession No. AA943240
ggattaaaaattcatcctctgacaaaggctttactgacaattttccatacagttagtcaaaaaaataaaataaaatataaaaaaatacagaatacagcagacagaatctcatacacggaaaacaacagtttcttcctataaaaacaaaaattctccccaaatctaagaacttagttttagcagtgaacaggatgccaccaaatgaaccacaaaaacccagcagagaatccagaccagggtaaggtaggtagaggagagcaggtgtttagaataattgcttttgtgacacagacagctggaaggccaggtgggctaggcggcgtctcttactatgactatcaccatgtgttcttcctctaacttgcccaatgtccgaagtgctgactggaggtactgctgtgagaa

SEQ ID NO: 710 - DNA, 186 bp, Rattus norvegicus
  Genbank Accession No. AA943280
aaggacaacattttattgcaaccaaaggctttcccagcagtaaacggttctgactgcagtgccatcttcagactgcaaagggagctcaggggccaaaagccaatcaaagaaactcaagggaaaaattccttataaagaaaatcctaatagcgcaataaaaaacgagggtaccgaattcaattaaaa

SEQ ID NO: 711 - DNA, 411 bp, Rattus norvegicus
  Genbank Accession No. AA943314
caatgcgtacagcaggggaaatttattaaactatccggtcagatagggccacgagccttggtgccagggagaccactttactggaaaaactgcctaaatgaacgtcggaaatggatgctcagaaggtcgcgtgttccagtacctttactttcaggtttaaacgtcgggtcactggctgggtttcttagcttctcacacccaagccctaagcatgatgttaccctagatcttaaaggccaaggagagcccgtcatccaggggcaggaggctaatgtagaccctggcgtcccgcaggatgcgctcgtttaggttccgcacacattcaacagccttgttcttgggctgaggctggagcacctctccgcgccacaggactctgagcacggcgagcacgcctcccgggcgtaggac

SEQ ID NO: 712 - DNA, 457 bp, Rattus norvegicus
  Genbank Accession No. AA943364
ccagggtaccccgggagttgtttccgccaccccaacctcctatccccgggctggggtacggaggagttggtggtcgaaaattcggtcggtgcataacaggaaacgaagctgaagagctcactcgccaatgccccaccggaacctcagtgatcaactgctagaagaaaactggtattcctgtttatgcagtcctccggctgccagcggagtagcgcaccttagttccggctgcacaaaggttccgacctcaccacgcttctgcaagagagcagattaaatagatcactcaaatcggataagggtgggtgtgtctgagaggaggaaagattgtaaaggggaaaccaaattcccgaccccagcgtccccgaccccagcgtgaacaatgccacccaccgccttcggggagacccccagtatacggaaacggaagcggtagagacacaaccggtcatcatgc

SEQ ID NO: 713 - DNA, 729 bp, Rattus norvegicus
  Genbank Accession No. AA943544
  misc_feature (1)..(729): n = a or c or g or t
tttttttttttttttttttttggttggaataaatttatttcatctgtctgtaaacaaggtgtttaatagttatggcatttttttaaatgcatattaaatcagatgagttagactgtatcccagatgtaacaaagtgcagggaaagaaatggacaaatcagcaacaagatttgtttttaaatctgtacattatccacaatgcccaaacaatagaagcaaatactagaatgtccctaaagtagtgccattcgaaagaaattccatctcacaatagcaacagttcattttaacaatagtatggcacaggatacatatgaaaaaaatacatcacaagacagccaagtccacaataatgcaacttcatataaaaacctaagctgcaaataaaaattggtcctatgaaaaataaactggacacactccagatggttatgttgggttacctaatatccataatggcagccttttacaattttactcaagagtacagctggtgtgcaaagaaaagacaagaagtctgagctactgcaatgatcgaatgtccctgggaatttgatcggtatggttactgtagtaaggtcatgggaggaagtgcctttctctccacagctgcactcatcacgtgctattgacactacanacagtgtgtcccaagtgcaatcactgtatcaaagtaaatcactgcgactctcacagctcagcgaggaggtattgattaggttaaataaac

SEQ ID NO: 714 - DNA, 435 bp, Rattus norvegicus
  Genbank Accession No. AA943555
aagcttgcccctctggcagagcttctgtccaaagctaagagtagaagcaggattatgaagtgtccatcgcctgtgacatgggacttagacttgccacagaatgaagctacagggaaggacaccatgtgagaatccagggactgttagggttttgtgcttcccgatgaccctacctggtaagaagtctgtcatcagctctgtcagtttccactgccagctctgggcctgcagccccgcctcctctgggttgggaacgaggccttgggtgccagctagtggcacctgtgcacaagaactacatctacagacagtgggaagaagccagggctagctgtggctgacaggaagcctgtgacagccttgtgtgtggtggaagcagggcacatctgagctggggaaggctgacagcagcaacctgtagttctctggagggaa

SEQ ID NO: 715 - DNA, 618 bp, Rattus norvegicus
  Genbank Accession No. AA943564
  misc_feature (1)..(618): n = a or c or g or t
cctaggtcagctcccaccagtctgtctggtggcctgggtccaggccagagccatgacacacattagatgccaatgactctaaaggagttctgggacaggccagccagcatggctctagcacaatctaggtgaaaagtcttgtgaatggtggcacacacctgtgatcccggcacttgggacagtatggggatcaggaattcaaggtcagccttggttatataagcagtgtgaggtcactttgagtatatgatacattgcttcaagaaacaaaaattcaggactggagagatggctccttggntaagagcacttaggaggatctgcttttttcctagtacccacagcacttcagtaactaaagatccagggttccaacgctctcttgtgacctctgtgggcaccaggcacacacatggcacacatacacacatgagggcaaaacggaaaatacataagtctagacaacttcactctgtcgggggataaagctcccctccctcgggccagggctagctccctctatgcagccatccggaaacaccacacggcaaccagagttaaggagatgcttcctttggtataaatatattatatacatccaaaacatgacattaanat

SEQ ID NO: 716 - DNA, 500 bp, Rattus norvegicus
  Genbank Accession No. AA943610
  misc_feature (1)..(500): n = a or c or g or t
gcgggcaaagctttgtttagatgagccaaggggggagtggagangaaaaggaactagaacattacatagcagagtatggctgtaaaatctcaaacaagacaggcaatgctttatttagagcaacaaaaataatgtttctgagaaagggaactgctacaagcaatgcatagctgcatgttctcgtttgccatcaatatcaattccctcaaaaatactttgagagtgctttgcggcttccaagcaccgactaagatctgttgaacagaaaacagttttcaaaaccatctttgtttaacattaacaaataatcaaaccatgtggctcttgctaacaaccaacggtgcagtctactggaaccatgtttaacctaagtatacagtcgtgaatgtatccctatgaagacagctatggctgtttttatcctgccggcacacacagcttgtgtagcagtgttactttggaatacgttcaggcaaccaagaagtcatcattacagtttt

SEQ ID NO: 717 - DNA, 574 bp, Rattus norvegicus
  Genbank Accession No. AA943738
cactgaacgtccaaattctcaacaaaactgcacgtgtgagactgacggcttcattccatttgttcttctgtcggctggtataggccactaggttctcagtgtattggaggatcagttttaagaacctcagatactgctgtcgttcctgagcatctttaccatgaacagcatgaacactgaccaattccagtgcaaggagcaacaaaatcagggaaagcacaggacacaaaagtccaacattctctgagggaagaccgtccaagccatttatagcgcaggcactcgcaggcaggtagtggcagagctcacacagaatcttgctaattaaagagttgcaggcacatgcttccgaattaccttccgatctgcctgcttcctgacagcactcttctggcaaaggcagcacaggccacatcctgaggcttttctcacagctcagcacctgtttttgcagctggaaagctggatggcagcgagacctgtaacgttctgcaagactaaccagcaactgtattgctgcttcctccacagcatgtccaaagacatgtgcaagctctgcagatgcaagaagatc

SEQ ID NO: 718 - DNA, 519 bp, Rattus norvegicus
  Genbank Accession No. AA943748
gacaagactcaaacacaaaattatatttattttcaatgacaaaaacaacacaacaaagtggaccaatcaactaaattttaagtctacataattttcagcagaaaacttacgttccataaaatttacaaacatatcacaattaagagtctccaacctaccttgtctgaggatagcgacaagggtgaaacacagaatcacaaacttacagcacagagctttaagatctgtgcgtgtgtctataacttgattttctctttgattcctgactgtgaagtctgtatatgacatcttttatgttggaaagggtggaagctcccccaggcctagggcttcgtgtacacagagtggatggtaagtaaccaaatacatgctatagagacttgattcaaaactcaaacagcaagagccacggaaggagaggagatttcaaagactgttagcaagatgcctgtgggataattcaacaccatcgaaacagagcccagagctccctgggggaatgggatagtttgggacagt

SEQ ID NO: 719 - DNA, 620 bp, Rattus norvegicus
  Genbank Accession No. AA943766
acagaaacaacactacagcatatttatttttgcacttaatttacacaagaacttgaaataattgaggatcactccatgtcagtgagcaaccttcccgccgtcacgtctttcctctttaaatacatatgttgacagacaagagagattacatgcagtctactttttcttcaatcgcctgattgtgtagagagttataaaccatgaaactaaattgagtaaatgttggaagtctgttgcaagcagcaccataacttcctgtcacattggcacatataacagctccaaagaattttggataatatttctgaattcttgaaatcactttttggcaagctctggctggatcatctcctcctctcatatattctacagcttggtagcttggcagaaatctcaggagtgtgtcaccatctccagtggccgcagctgctccagccatgtcatcagcataggctccagctccagggattggtgagtctcctacacgaccaggtattttgaattttaaaccatttgtagatgtgccagcagcagtatgtcccgtcttatggattacaaccatgcctgcttcggtggcattcttaaaaggccaagtgttgacgaccaggggtagagggttg

SEQ ID NO: 720 - DNA, 597 bp, Rattus norvegicus
  Genbank Accession No. AA943794
aataagaagctataaataaataaagttttaaagctcctgggttcaagtgagacagttccagttcagacgcgtcagctgggcaggttccctgcttcccattctaggagggggtgtctgcagggttgcagggtgcctggggactgagttctcggcttgccggggaacagccctgtaggcagagtcctcggagctggagaagcaccctgttctgagatgccgcgagtaccaggaagctgtgtcccaaagctggtagcctgagcctcaggcaggggtggacaattgagggactgaggacgcttcaacctggcgctggcctgagatgggagggaatattttttcaaatgcagcaaagattgaggagagacccgtgcttctgtgtgagtcaggaagacggggcatacgttaaaacctattccagtatgtataggacagagcctatgttcaggtcgggtacacagaaggttgtgaaggggggaggggtaacgtggagctggggcgcttcctgacagaagtggcagcaaccagcatgacctgtaagagatccatgggttccccaaaatgccccaggctccccaaagataatatattcactccaaa

SEQ ID NO: 721 - DNA, 598 bp, Rattus norvegicus
  Genbank Accession No. AA943829
aacaagtttatagcagtgtacagcagttacagacatttacttcataataagaaaagtacaaccatatttattaaacttgaggtaaggtgggcagggaaaagagggaaaagcacattctggaatgatttctcaaaccaacactcacactggtatcccagaccaatggcttgggcactgccctcccagctggcagagcccttccttccctaggaagagcagcagagggtggctgctgctgccctccctctgactgctccccccactgtccccttacccctggcacttctcaggtggcattctgggaatagggaatcacctctcgcctgtaagttctttcattaaggacgaagaggagcaggaagagtagctgcttatgtgtaaggcacgagggtgggactgaagaaatcccactcttgccccagactatttactcataagttaatcattatttcctgacttaaaaataagggcacaattataaatgggagctgtaacagtccttgaaactggagagaggacctagacacgtttttcttttcctttagagtacacgtaaagccccacaaacactatggtctgattaattctatcaatctga

SEQ ID NO: 722 - DNA, 577 bp, Rattus norvegicus
  Genbank Accession No. AA943847
cccaggagtttggttttatgagaaaagaaacaaaagacaagagaaatgggatgttagaggtgattcactccaaacactctcaagtaatcctcactggcagagttaacaactccttgatggatggggtcaatcagtgaatggagattccagatacaaatgatcaaaaagagggattgtcacctaccccaaggccaccagcagaaggaattctgggtcccaaggtgtgtctgaaaagtggaaccctatgaaaggcagctgtgatgtgtctataagacaccaggtcattggtggggaaagatggacgggagttggctcacaacactggaggtccctgaggtggtgctggaatttgaatgaggacacagtctcatggccttttggaggggaactctcgacgaccttgacccttgcgaccaaagttgcgcacacggtggatgatctgtagctgctgctcgattgtggcactgatgttcacaccgtctgggatatggacatatcggacattacgacctgtcacgaaaaggtcatccaactcaacctgatgcccccagcggtcggtgtatgtgacattggcctc

SEQ ID NO: 723 - DNA, 522 bp, Rattus norvegicus
  Genbank Accession No. AA943866
gcactttgcacaaaatgtatttctgtgacatcctgaagtacagacatttccccagacccaggtggtaaagcagtggatgacagctctgctcagggcctggcagtgccagagggcgtgggatggaaagggcaggctgaggttgcccaagtgctgcatgggggaagccacctgccagggaaagtttcctctgggaaggtcagttgcctctccccgagtcctgtgaacagctgggccccttctgactgtaggcaggtaagcccggaaacaaacaggcacagagaagaaagagggcagaaaaagccacaccagaggctgcctccggggccagctttgctccctacgcctgctgtgcacaggtctcctgagtacctgtaccaatgaaaggcaatgcagagacacaatgatgggtgcacggatgccccgagagcctacaccacagtgcagcttctcagggcagcctgactgggctggagggacagaggactgtccacatgctggtctgaaggtggtttcctgctgcca

SEQ ID NO: 724 - DNA, 615 bp, Rattus norvegicus
  Genbank Accession No. AA943886
gccaagagttcaaaatggtcaacataaaaaaaaaagacatcttgataataaatactgctcttggggctgtaataaataaaaagtttattaacaaggaatgcacttttccagccacaagtgtattcaaaaataaccaaaaaaaaaaaatatgtatggccatagttcacagttaagcagccaaacaaaagctgctctgattgtagcctttcaacagcgagggagcttcctcccttctccctccccttcaggaagtttattcacagttccaagtcttccaactgaaaacactctccacagagagaacttcagagtcaatgcgtctgtctgcaaaattgtccgataaactttgtaaagacaggtatctcaaggaaaactgtacttggctccacacttaagattgcccaaagtcaactgtccaccttaggctggtctggttccagcagtccagcaggccacagacgactcgtattcgtaccagcacctgtctgatttctctaacatgctccgttatccctccactggcttccctgttgatctcacagtggaaaagagcccccacgaggtccgctctaaaagaggtttttcagttacatctctgcaagagcatgttcaggg

SEQ ID NO: 725 - DNA, 258 bp, Rattus norvegicus
  Genbank Accession No. AA944052
ttgcgggcccaatgatttttttttatttttttttttggaaagcaacttaagatttattctggctcacaagttgcaagaaggtacagtccctgtagcagggagggcataggtgagaagtgtgtctcatcacatccccaatcaggaaacagctcaatttctcctttttcccttttcagtcagtgggaccccaggccatggtgccacacatagccaatcagtgggaccccaggccacgggtgccacccacattcaagtggc

SEQ ID NO: 726 - DNA, 506 bp, Rattus norvegicus
  Genbank Accession No. AA944073
cgtgttagctgttgtttcgacttcgagtacaatccattaacatccgacctccacatttactctcatcacagcagactaacggcaatttcttccctttctttctagagactcctgcgccatgagagcgaagtggaggaagaagagaatgcgcaggctgaagcgcaagagaagaaagatgaggcagaggtccaagtaaaccatcttgtgcacccacgaagcctgcgggagcagaagtaagggatgctgaagcccggaacaagtggatggactgtatgctgctgtcggtaataagtcgcagtagacccggaatgtcacctcgccgagatcagctgggaaagtgactaccttcctcacagccacaacagtcccgctggtcctctgccctggacctttggcattctgggctaattctgtgctcttgtgggcaagtgtaactcgtgtacaagaaaacctcttgctgtcagctgaagagtcaatggaacccactgaggcatatgcattgcggc

SEQ ID NO: 727 - DNA, 641 bp, Rattus norvegicus
  Genbank Accession No. AA944161
ccaacagtttattagaaagaatgtagacatttaaaaaaatccccactgtcatgaacataaattgaggttttccagccagggcataagctgaaatcaaaacaggaaataaaaaatccaatagtgtattaacattttccactcatttgccatactgacaatgcaagtacaaatctggtctaaaatgtacatattctcaagcaacaatgtacagctttctttgtcctccatgctaagagatgtaaaagcttaagggccaaacaataccaaaggtataggcttcaaaaaccatctaagttagggcatccactagtcttagctaaaatacacctgaacactgacaagtgatcacaaacaatgatgtaaagtacatttttttgaaaaataaactttagtggaataattctgaaaggtatcctggaagaatggcggggcatcagcttaagatattagccaatttgtttccacctccttcaagcccattatctaggatctaaaacctttatctttccctaagctgagaactttcttaatggagaagttaagtgtattatgacaaaagaagacttagatgagatgcagttattcatcagagctgctgtagcagttgcctaagacctcaactgcttcatggaattctggga

SEQ ID NO: 728 - DNA, 587 bp, Rattus norvegicus
  Genbank Accession No. AA944165
agccacaagcacatttattatcctctggaacacaagggcctccttcatagcagcggcacacagaaaagaatcaatctcaggagggagccacactgcttccggaagcaggcccgtggggtggtagtgtcatgggtggcaggaacaaggcctttagcttgcctgacaggctggcaatctcaggatcctgggcttcgtaagacttgaccaggcgggcaaacttaaggagaccttccccgtcgcagctgaagccataggctttaataacctcctgctggatctgtgtggctacaggcagcacgaattgcagcatcttgcccatatcgttgcacgcattgtctctagcctcgtccatacgcacggcgttctctggggccgagaacgcttggatcacctccgccaagaccaccttggcctgctctgcgctcagagccgcaggctgagccgaggcggacgccataggacgccactcggtgcttgaatagtgtgaacactgagatccggaggagcctgcagccagccgcctcccccacggctgcggactagtggaggcagaaaggaagctgtattgcacgaggcggaagttcccg

SEQ ID NO: 729 - DNA, 582 bp, Rattus norvegicus
  Genbank Accession No. AA944169
agagtctaacacacctataaagtaaaagtccttggtagtatctgctgaaagaccaaataattccaggctgagctggttcaagtgtccagacaggaacactctgactggagctgcctaggctttgaacagctagagctgcaggttcctctgtgggagagcattcctacacaatgactctgtgaacagcgagtccctctccagctagtcttgccaccacagtcagcagtcagacaaagttgagtttattagggaagcatgagagccactgataccccaagtgacacaaagaaaactgaaaatgtcccttcaagccaactgggggcctggctttgacctcccagaacaagaaactggtgtgttagcaacaacattttctggcaaccacactgcagggcacgagtctcagccaggactgcccccacctctcacaggcagggagaaggctgactgtggatagaaatcagtgcagaggccatgggagctgtagggaaggaaagtctgagagaaagagactgagaggtggggaggaccttagagagtcccagctttggcccctcaacacctcaagcacattgacaatag

SEQ ID NO: 730 - DNA, 669 bp, Rattus norvegicus
  Genbank Accession No. AA944170
agcttgcggccgccggctcagcatgcgcacccgccgggggctgctgcggctgccgcgccgctccctgctcgccgcgctcttcttcttctcgctgtcgtcctcgctgctctacttcgtctatgtggcgcccggcatagtgaacacctacctcttcatggtgcaggctcaaggcatcctgcttcgggacaacgtgaggaccatcggtgcccaggtgtatgagcaggtggtccgcagcgcctacgccaagaggaagagcagcctgaatgactcagattatcctctggacttgaaccacagtgaagcctttcccccaaccacaacatttcttcctgaagatttcacctattttgccaaccacccttgcccggagaggctcccttccatgaagggcccgatagacataaacatgagtgagatcagaatggacgatattcatgagctcttctccagagacccggccatcaggcttggaggacactggaagcctgcagactgcatgcctcggtggaaggtggccatcctcatccctttccggaaccgccacgagctccttcctgtgtctgcctccctgcagcctctgtccctgaagcatggatctgtgtgtggcgaggagcgttctcctctggcctctgctcttcgcctttttgccttcagcacccttgatgttca

SEQ ID NO: 731 - DNA, 670 bp, Rattus norvegicus
  Genbank Accession No. AA944176
caaagttgaaaactgctagtttattagattagaaatgaaagaattggggtaattatgattacatacagaacccagcagttagaaatgaagtttgtttagatctagcttgagagtctcagagcagaagcatcctataaccatcctgacttttccgtttgcatggtctcagtgaaccagatagactattgtgtcaccgatgtctgcgcgcagcccgttctcagtaaggtgaactttcttgctcactaggtccacgtggaaaatggcattctcagaaatgagtgtcttctcgttctgctctctccccaggactggaactcgtcgaggccccaacagaggatcatcaaagcgcatgagtttcactttggagagatctttgattcctcggtccattttcgtcaggcgtctgattatggactcacagctatctccttgtctgatgtcgattttggtagagaagtgcccgctggatggctgaggatttactagggaaactgggacaccaggttctgttctgaaaacattaagtggcttcccaggacagcactcttccctgactttatcttcagcttcagaggcaaacttgacgtctatatgttccagctcaagagaattggttaggtagactatattctccataaggactgcctgctcatcaaattccaactcgaaa

SEQ ID NO: 732 - DNA, 622 bp, Rattus norvegicus
  Genbank Accession No. AA944180
aaatgcaatatacaaactttatttaacaaaacaggtaaagtaaaacaggcatttatattaagaaaaaaactacaagaaaatttatctttaacaacttaaaataaccctacttgcagttgcatttaaccgagctctgttgctgtgaagaatacagctcatgcacaggtatggatgaaagatttgtacatttttcaagtattcactgaatactaccttatatacacatatacattaaatttgaaaaagattattagatgatcccagctgtacttcatttttgttgttcttttggaagaggccgtctaaagagaagaatatgcggttctggctcatggatcatgtaatgaacccatcctagactctgttgaacaccaagtctcctccactcctcttcggacatcagatgagttttgggtacttgtttagaaagttctctgggtaacatgacatgccggtactcgtagtgctcgtcgaagtacttgtctgagtagtagatctgcttgtgggccatcctgctggcgtgcgaaggaaaaaaaccgggacaaggaaacggggcacaaggagctccacgtccgcctaaggccggggcaacatcagaatggtacctcgtgccgaattcctg

SEQ ID NO: 733 - DNA, 546 bp, Rattus norvegicus
  Genbank Accession No. AA944203
agctaaaatgcacctcactaaatagaataagcttccggccgcaattgtattttttttttttttttttttttttcaacactgcaaaaactttatttgtacattctttacaggacagtttggggctgtgtcactgagtagacacctgttgtctcaggcctgttgctaaaatgtaaataaatacaaatcagacttactggtgacaatccttttggtcctatcttgtttttaacagtttctatagcactgcagccttcagtggtattgtaccactctggaaaagataccttcaggctcctttccatcccccaaagctgcagcaaatccttcctgctgcctcctcttagccaaagcagccaaagatttaaacgtctttggttcatagatggccaggtccacaagtactttcctgttgagctccacctggcacttaactaagttgagaataaatgctgggtactgtaagccatgttcctgggaggcagctgtaattcgattaatccagagggtcctcaagttccgcttcttaagtctgcgggagttcgtaca

SEQ ID NO: 734 - DNA, 522 bp, Rattus norvegicus
  Genbank Accession No. AA944278
cagtatctgagagagtgtttactttgatttaatcaaacttaaaatatttcatcaaattacccaggaaaatccaggtagcagaaatatataacatatccatttcttcacaaggtcacaaatcagttttacaaggctatatatatatgtatgtatatgtactatgccatttaaaccacttccgctttctgtactgaagaactcgagtatagaaataagctttgtggtgctgaggtaacgttaggaccctcccccacaggactgcataggtgtttaaggttaaatgtgaacattatgtgaggtctcaagtcagtcaatccccatttgaattgaaggttcaaagcagcatattagacacgagtcccagggagacaccgtcactgagcctctgtgtgtgtgtgtgtgtgtgtgtgtgtgtgtgtgtgtaaggagatgggcagattcaggaaggcaggctgactgagggcatactgataactaactgttagccatctgcagtcgttggcaagacagaaacatatacag

SEQ ID NO: 735 - DNA, 486 bp, Rattus norvegicus
  Genbank Accession No. AA944289
aaaaccaaatctttattctctagtttgtaaaggaaggtaaatggttgttacgtttcgatccaaggaacaaaacaagacccagtaggcagaagtcataggaaagcagaacccaatccttgtaagaatttctaacaattagacagtagaagcaatgccttctggaggtaacggtgacccagcacccaggtgcatgggtagaggctggcatctataccctggaaaccttaaaaaggaaatctacccaggactttccctgcagccaaccccccagctagtctttcacataacccctgaagctctgaaaagagttggggagggtcaggggtttaaacaaaatcaccaggaaggcgtatatttggggaagagcgggcagataaaaagccaggcaggtaaaggagtaaataaatgccctgggaggataatatgcacaaaagagatggaattgctaactgtggatgggtcgctacacatccggggtacctccgc

SEQ ID NO: 736 - DNA, 549 bp, Rattus norvegicus
  Genbank Accession No. AA944315
cggacgaagccccttcagctggtgagcagtgcagctgcagggtggttaaagaaacctttaatgaagattcaaagtgcaaagggaagatatcacagaggctgagctctcagccctagctgctgcctcacgtgtacatggctccatggaggttctccaggcggtgctgctgctgctgcctccgagccttgtctttcttgtgctcttcataactgtcgtcatcggtgggcagctcatggcggcacagagggcaggaatttgtcttacttaaccagggcagaatgcagttggaatggaagagatgatggcagggcatctcaatgacagtctcctcctcctcaaattccaaaagacacacgggacacttgagctcagccttggagctacggatgactgttctggggaggctctccaccacagccttggcagctggtgggggaaggtggtgttcccaatctaccaatcccaggtcctcaaagtccatcctattaaagagtgatctgctgccatgggcccaactccaagccccgcgcactcttctcgcgagttcta

SEQ ID NO: 737 - DNA, 572 bp, Rattus norvegicus
  Genbank Accession No. AA944316
cactaatagcaataagctcgcggacgcaatgtatttttttttttttttttttttttttttttttagaattaatattttattgtcatttataatcagatggcagttgggtatagactctccacacttcataggttatttttgcaaattaaaaaaggtacaggttttaacctgctggagctggtcacacttttcagagcatgattaggcaaactccgtaatagtggcttcgagcttttccttgttagcaccagagaactccccaaccttttgaccctttttatagaactggaaggtcggcatgcatttgacttcacagtctgcagcaacatcctggcagtcatccacgtctacttcaaggaacaccacattggaatacttgtcacagagggaatgaaagaagggcttgatcattttgcaaggtccacaccacgtggcagagaagtccactaccacaagcttgtctcccgcagcggtcagggcctcctgaaaagcttccttgctctcgatcagcttcaccattttggctgttgcggggagggagccacacgagtttcggcaaaacccgatggaaa

SEQ ID NO: 738 - DNA, 559 bp, Rattus norvegicus
  Genbank Accession No. AA944324
agcaataattttcagtttactagatgaaacagacttggaacatagtctgcatgaatgcaaaataagccatctacagcaagtgataagaaactgggcaaaaaggaaaaaggcatacatggggggagattctctcgaaataaaaaaaaaaaatcaaaccattattataaaggactttaccaagagttgctattaccccaccccgtttgctggaagtcacaagagcatatagcactgtattcgtgtcaaatgtcagatcagagcatcctaacgcaaagccgaaaggaaatagaagagggggggtaaggggaacaaagaaaacccccaaccccactaaacggtagaacagtaactcgagttcagtttcaaaaaagagagtggcaattgaaagaggtgatgatggtggcgataatcctatgaatgggtttttgatttctctccttccgggggctgggtggagggcgctcattaggatttgtagttagaggttaaccatgtgagcccctcatagagtccgtccccggaggtggcacaggagggctgcacataccagttcctgtcc

SEQ ID NO: 739 - DNA, 474 bp, Rattus norvegicus
  Genbank Accession No. AA944352
cccatcccaggcatagcccacagaaagctggtaaatgggctgcggcacccttggggtgagggctactgctgcaaggcatgcacttgcctcccactccacattggaatgtcagggggctgcactgcaggtgggtgcacccagtaaaaagcatccagccagctaacatcaaggacttgggccagcagtagcacccacccttccaatactgtactgttctcttgacttggggtttctctaatgtcttcattgatcctataaaatacaggggcagaagcaatgctggggccactggtagaaatctgaactggaggtttaactgtttggtgtttggctggaccatcctaagtcatttactagtttgagctaaggatgtaaacttaaaactaagaagggacactgctttgaatgataaggtacagctcagcatgacttgaagtccctcaaccccaaaaggaactgagacaggaggcatga

SEQ ID NO: 740 - DNA, 488 bp, Rattus norvegicus
  Genbank Accession No. AA944365
gatgcacttcctgggaaatccaatggggacttgattttgtgcttcaagtggagaaccttgagcactggggtgggggtgggggtgcgaagatgacatgaaggggaacagaagctctgggagatgaagtccagagaagttagatttattaacagcaaagattgaagggtagggacaaagggctcacaaaacagacaactagaaaagtgcttccctgccctaagaatggtgtctgtgctgacctcattagaaggtcttgaggctcagtcactgtcactgtcagcctcactggaatcagaagctgcagcttcactgccatcttcctgagctgagtgttcactaccactggggaaggggctggcactccggctacgactcctgctctggctgcggctccgctggccaccaccatcactgccactgtccgagtcattatcactgcccctgtgggcctgccctctgtcttcatcatcagagtcagccctcgtgcc

SEQ ID NO: 741 - DNA, 539 bp, Rattus norvegicus
  Genbank Accession No. AA944380
ttaagtgcctactatgtgacagacacccataaaacaactaaaaatagcgacattttaatgggtaaaattagactaccctgctcgtgctttttttttccagttctgaaagacttatagtgttcaaggtgaaaaattggctactggaaaccaggtaaggccctcacaatcacggtgtacgaaatatattcacacctgtcagataccactcgctaatgctgctgttctgagcataagctcatgcaaaaacctcgtgtatgttcttttgggtttcggtgacttcacaatttgctggaagaacatctatgaagaaaggtcttctcacaagatggtatcaggtcatggagatcaaattcggtctcgaaggaaggacttttttcaaaaataattaaggcagccagcacagccaattttgaggtcattcccttgatgaggtacttcgagccagtctcaaggtctgtgtattcaaagcaatgcaaaacaaaatggtaaccagaatgtgtgaagtgactctggtagtagacttggggacagaggaaata

SEQ ID NO: 742 - DNA, 580 bp, Rattus norvegicus
  Genbank Accession No. AA944384
gttctgtacacaatcgtggacacagcacacctgtttacagtaaggccaaggtcaaggctgtcttttcagtctgcagaggacaaaatatcaaatgaagaagtttcaacactggccacttctgtctgcatcaggggagaaacaaattccattacgttttaacaatttggagaatttacaatgactaattttagcagcaatactgacttttagaaaaggaaaaagtagagtggtttttctgctactctgggtcaaacctggtgctcccaatattaaataatgttattgataacttattaataatattcattaaaattgatccaaagggtaatttcatggcaacacaaagtacacaatgagaaagactcctgactgtatacaaattcatcattttggaagaaatctttcttataacatgacaaacaggatcatttttgtgtctccccctaccccctttgggtttatgtctgtcttgtcataagcagagagcgacattaatgtttcttgtgatggccagacacacccaccatgggataaggacccttgtctgggtggggaagggaagagtaagagtaaggggtaa

SEQ ID NO: 743 - DNA, 534 bp, Rattus norvegicus
  Genbank Accession No. AA944401
ggggatacaaaaggcacctctccctgtacctgaggactcatcaatcaacagatgagccccaggtgggtggagcccttgctggaggaacaaagcaaggataggggaaaggcagtggaggaactgggggctctgggcacccagaatccccgaggtctcatcttgacacctgggcagtgaggtctttcctcactgggtgcagcttcgtacctggacagtgggcagctcagcaggggccaccattgcccttcctaataagccactaaagccctcttcaggctccactctgcagggggatgggataggccaggctgtggtgatgtcttctctaatgcctagactggtagtgtagattctgaagggctcctgtgggcttctctggggaagggagcaggggaattccatggaagcagccttacaccaggtcaattaggtcgcatcaggtcagctcgtccggggccccaggtctcagtaaagtcatagtcggtagcaagatgggaagaaggcagaaccagtcaggatcccagtggagggttt

SEQ ID NO: 744 - DNA, 656 bp, Rattus norvegicus
  Genbank Accession No. AA944417
  misc_feature (1)..(656): n = a or c or g or t
gaaatttaaagaaaaaatttattgaagatctgaaaaacaactcctacaagattgacttttccataaaactgtagctacacgatgcattgcgtctatcatgttaaaacgtgcattagacacaaatacaaaaaccatgaaaacaagccaccaaccaggaacaatatgcagagggcaagatgagaggggctgctccagggaagaagacatccggtctgcaacagaaaaatgttgaagtgaaaacaaaaaagaacaaacagaaaacacctggaaacggagatggtggcagtaccagtgagacccctcagcctcctaggaagaagcgagcccgggtagatccaaccgttgaaaatgaagaaacattcatgaacagagttgaagttaaagtgaagattcctgaggagctgaaaccatggcttgtagatgactgggacttgatcaccagacaaaagcagcttttttatcttcctgccaagaagaatgtggattccattttggaggattatgcaaactataagaagtctcgaggaaatacagataataaggagtatgctgttaatgaggttgtggcaggggataaagagtacttcaatgtaatgttgggcactcagctactctacaaatttgagagnacacagtatgctgaaattctggccgat

SEQ ID NO: 745 - DNA, 568 bp, Rattus norvegicus
  Genbank Accession No. AA944419
gaataagcttgaagccgcaatgtttttttttttttttttttttttttttttttttttgcccacctgtgccctttccagggcaggtttattggcacagtttgtgaaacatcttcccatcagcctgagtcctcacctcccttcacgaggtggctgggtctggtcctagctctgtacgaagcagctgcctttgacctgatgtggcctcaaagcccacatgggatagtctctgttaaagggcccaaaggcaagtctgtctagttccagggagcaggggaaggtgaccagagttggatatctgtgtgtgcctcaggcagagccctggttggtgatgaatgggcaaggtgtgcaagccccatgggcacccctgctccagagcccactgctgtggctgaaacccacgtggggacagtaaatctgagatcctgagaaagtagccttaggctaaagtgtgtggggtcagacagcatcagcccagggtgacagacatgatgtgcatggggttatgcctccctacttcagggctctgtgaccctgggtccccaaggctgagggaatccacctgggagtg

SEQ ID NO: 746 - DNA, 641 bp, Rattus norvegicus
  Genbank Accession No. AA944422
  misc_feature (1)..(641): n = a or c or g or t
tgcggccgaacttgtttttttttttatttttttttttaatgttcaaaaaaaatatttatttataaaaaatacaatgggataagtttatgctgagaaatgcagcaataaatacagttgaagggaacagcgactctacagtaatacattggcacaaatgaagtctgcaggcacgccacccacacctacatgtctgcggccatttctgtagacgcgcctttagagcgccactcgggagagaccttgtcagcttcgggaaagaatgagtacacatgtaatcacgaatcacactgatcacgactttatttaaaacttagcagacaacactgtgcagaagcatccacgtgtcaggttctaaagctgcatgttagattacttggcaaagaccacacttagcaaatcaacttcttagtcttccgtgtacaagccagatacataataaactgtaaaaaagaaaaaaatagtttcctattgtttgaaaataccagtttacgtgtaagtgtaaaaaaatgcatagatcttcaacgaaagagctggctgccctcgcacagcgttccttctcacttcttccaacgcgagttactggttaggctgtaggcttccctcgctacagcactagaaggcaatttanggaggaagcacga

SEQ ID NO: 747 - DNA, 508 bp, Rattus norvegicus
  Genbank Accession No. AA944439
ggcaatttcagtctgacgtgaagggcagagttttctgcttccttctccagtgtctccagccatcttcttatccccttggctcggctcctggctcctggtcccacggaaggaaccaagggctgcagtgcccacagcccagctcaggtgggagcctcagcttgcagcagcagagccttgcgccctctgtggtgacttgtccagccaccctggggtggcacgtccgggaacctcgctcagtccctggggcggcacgtccgggaacctcgctcagtgagctgaagaatccaagagctgactcctcacgtatctggcaggcgaaggagggttccagaactggtggggacacagtccaccagcttccagcatcacggacagtgaggactccagcattcaccaggtgcgtgatctccgagtccctgaagccgtaagtctgtgtcatctggtcctgctggaaactaaggtccccacaggctgggagcaccgatgccaggaacttctgcaccgcccc

SEQ ID NO: 748 - DNA, 583 bp, Rattus norvegicus
  Genbank Accession No. AA944449
gaagatttggtttcgtcatttacgagtgtaacatagttaaaaatagagcactctgcttgttctcggagaaggggtaaggctgaccacagctctgggtgacactgctcatgtttcagtcactgacaaagttcaggagactctggacgctcacagcaaggagtcgtttcaaatccctgggactgaggacacatgacaaacactgccaagccccccaggcctggtgtggaccccgaacacgtactgaccaaaagtgaccagccatggcttacaagggcaggacagcagcagtccccaggaggcacaggggacacagagaccctgactctgggcccagaagatgacaggctaccaaagtaagtcacaaacacacaagatgaatggtcacagggccgagggtactgagctctgccccaggcaatgcagaactggatttaatgccatggaacttgctgggtctgttttaatgcagagcaagtcaggacctccctgcccctgaggaagagcctggttagctcctgaaaccaaagatgcccttgatgtagcctgtgaggccgctcttggtcttctgctccaatttgtcctc

SEQ ID NO: 749 - DNA, 570 bp, Rattus norvegicus
  Genbank Accession No. AA944481
aagggatataagcttgcggccgcaatgttttttttttttttttttttttgttctgaggttgtttttattgtaagaatgttgtgagctgtgccttggaaccacagttggcacctgttcatccacagcacccacaagagcaccattgagtgtatccagggctcctgggaaccctatctccagtcggtcaatatgaccgagtccgccattaagggcccagctagttggactgaaatggtccctctgcatctccaacttctctggtaggcgagaagtgagagtcaatgccccttgagcccacgttttctgggtctgggccatttgtttcctgttgctctgactgtttcagacaacagtgcttgcagaccccaacacggaaaaggggtcctccagtcactccagttatgggcttcttctctgtccacgagactccagatagccctacttagagctcctgctctcagcagaaaacagccatatcttaaggtcacaaccaaagtcactgtcttcttaggcctggaaccaggctccagtgaggaggctaggaagctgctgtaacctccatgggctgga

SEQ ID NO: 750 - DNA, 599 bp, Rattus norvegicus
  Genbank Accession No. AA944572
tgcataaaggtcgatgaaaaaccattactagttctagtaaaactgaacatttcaatccaaaagtatagtaagtgtacgtattaaataccactttctaaagtacagctttaaaacagctaacatgctttttcaatttcagtacaatggatccaagaccaagaatacagttacaggcgacaaggctagattacaaattatcatagtcatcatcatcatcatcatcgtcatcatcttcttcttcacgttttcttttgagtgcgtttgccgactcattggctgtattttgtgacaccatattagtagtaataagaatgtttttggacccaattaatgatggattaataagaacattctgaactgctggtgttgcaggaatggaagcttttacagcaggggactgagaagcaggcatctgtactgtaaacctctgccctgtgagggacattggagtgcctactttagttgacacagacatggcttgtggagttggtgtgcctagtgtgggagtactaggtctactagaaactgaaccaacacttaaccttggaaccgttattcttcctgcaggaatatgtgcctttttttgtaaagacttaagc

SEQ ID NO: 751 - DNA, 513 bp, Rattus norvegicus
  Genbank Accession No. AA944605
cgagcaaaacaaaatcaaatttaatggtcttaaatgcaaaagtaaaaacaaacaaaaaacacaaaaaagcaaaagaaaattaacagaacagaaccccaaacgtcaaggcagttatgaagagaactttgagggttaatccttaaaactacaaatcaaaggtttgtgttaatagataactggcaagaagtacttttctgctgagtgtccatacaaaagcaaaatttcaaagcaaaaatctaagattggaaaaagcctagtgctcacaagaagggatgcgagaaatacaatgctcaaatgttctgtgtcattagaaacagagcagtcattgtgcattcaagctaggttaaatggtctcagaaactcgggaagttgcatgaacaatagtatctgatgtgtgggcaccatgcatgcaatgtgtggacagacactcaggatgtcagaggagggggcatcttcaggcatgcctggagctcaagcttgactctggaatatactggagctgccctgaaactc

SEQ ID NO: 752 - DNA, 488 bp, Rattus norvegicus
  Genbank Accession No. AA944628
gcaggggggccactgccctagttatcaagtttagtgtgctgttctcatgttccaaacccagctccctcccaccggggacagcagaaggactttcacagtacctgtgtgtctccttaccaaatttcccctctaacacccttagtccaaccatggtccatttaagtgcagctaggaacaaaggctgaggagaagcaggaaatcttccgagaagaggaggaagggcctagagaatttgacattcccccttcccatgccctaggaggacagagtcagcaaacagtccatgccatccagcacagcaggctgggagaggaagctgatggaattccagcacagctgggcttgctcaagtgccagaggtgtcagggaggagacgtggggtagcaacttaggaaaagcgctctttacagatccaagaaaaggagaaactttttggagttaggaaagaccttgggataatttcctcttcttccaggtcctcaggagca

SEQ ID NO: 753 - DNA, 428 bp, Rattus norvegicus
  Genbank Accession No. AA944752
gcactataaatattgtttattatgagtttctgtgttcagtacacaaaataacatttaaatatttaagtatttctgggatatatacaattcattctgattattgctaaaatggtcacattcaagccttgaagtgtgaggaaccagtgttctatgcatggacgctgtctaacgtgtaccacaggcctgtccctgcagggtcagtgactctggagtggacaaagtactgctcccatatccagcctacccaccagtggatggtgtgtgacagtcagcactcctcactgtcctcccagtgttaaaggcttcccagggaagcctcgctgacccaggcagggttctgggcctgcctgcatctgtcagcctaaaagcctagcggtcccactcgacagggctctgttcatcattgtcctcctctgagtcagcagaca

SEQ ID NO: 754 - DNA, 402 bp, Rattus norvegicus
  Genbank Accession No. AA944811
ggacgggttactttatttcatagaaaatcacactgaggaattgaaaagtcaagtatactcagcttggattcaccgccacggactccacactggagggtgagactgccagagcctacatgcccagacacatgtgcaaaggaacgcagagacaatctgaagccacgatgtccctctgcagggactcaggccccagagtttgctcactgcatgacagggctcaggtcccccgggttcacctcagtagcatatgagcccagacaagggcagggcacaagcgactgacaccgaaagaacagtcatggtgtcacggggacagaaaggcagctggtctcagaagggaaacactggtgtctgcatgggagaacactctcggaagtcccagcttctgtcagactgctttca

SEQ ID NO: 755 - DNA, 491 bp, Rattus norvegicus
  Genbank Accession No. AA944823
gaaagtatacaagcagtttcaatttattggaacaaaagtaacatttctgtttttgcaggagtgaaatcattgtacatttcaaagaagacataaaaatgttcaaaacaatcacagttgaaatgaaacgctgtgactgttaaatacctgctctacaggaacacttttataacagtgttcagctgcttgactgaaaggatgcatatatttccacactgtttaacacttataaattaattcacaggattcatagtattactttatagctccaaatgggtattagcaaaaaataatacaaaatgactcctctttcaagcaacaccatctgcctcaagtaaaacatattaaactacaacttgttagtacacaagatttcctgttttattatcctgggacatctcgtgctgtgggctactgctgttgcttcattcatgtacttaactcttacctccaaagactggaatgtcttttgcaaggaatatgtacacaggcaa

SEQ ID NO: 756 - DNA, 429 bp, Rattus norvegicus
  Genbank Accession No. AA944824
aatgtcctatatcattttatgtactgacaagaagtagtttaagtagaatatcagctttgggtgttgatggtggggaaggaacttttaagtaaattagaaaagatgtgaggatttggcttcagaatggaagcatagcagtaatttgtattttaaaattatgtggccgagtttcttggtaggaaaataagagacagttcttggttggagatcagaaaaaaaaaaaaagaattttttttttttaaccccagttagaactcaggaaaggcgcttgaatgcgcttttaaacaatatttaaagcagtttagacgaatgcattgtgaagaccattcccaatgaactctattgaatgtctaatacacaggtattccagctactggctaggcttcaataaaagtttagctgcatttttttcctcctaagtaagtctta

SEQ ID NO: 757 - DNA, 546 bp, Rattus norvegicus
  Genbank Accession No. AA944827
  misc_feature (1)..(546): n = a or c or g or t
ggcaggatgaaatgccagaattttgatatttattatctgagacaggtttaacatttggagacatatgttcaaacacatatccctagaaagaaaagcaagctgataggacagagaacagggtgtaggcaggaaacacgtgctcaattttgctgcgtgtcaggcaactgtagaaaattgggtgctttggagaataaagagcttgctgctagggtaaacacaaaatacaagtcaatttccacttctttatgagggccacaagataatcaattgtacatatatatgactacaaagtactaaataaaatattatatattttatttagtactttggccagatcagccccctggaaaggatcataggtttaagaaagaacaagaggccatcatcacttcctgacatggtcacagttttcttaattacttccactggttctgctttgttctttctgcanggagggcggcaagagcttttctatcagatcagtaatgtctggttcttatccaaatattccccctaataagaatgaaagttctcacggattggaca

SEQ ID NO: 758 - DNA, 339 bp, Rattus norvegicus
  Genbank Accession No. AA944856
gctaaaatagtggtgcttttaggatttacattattgtactctccaatacaaagtatgggtgtgttaaagtatacagtagaccattttcatacatgtacaacattggtggatgaagaatgtctcttagcagtaatactggatgtagcctctggttttaccagctgcatactctagaactatcatataagtcaaaacctctcgtgatactggaaagtgattagaatgtgcaaactgatagagtagctttcgtccgcctcttacagggtaccaccacgggaaagtccatttaagatgttggtaggtttaacaaagttggaatgctggcactgctgaattggg

SEQ ID NO: 759 - DNA, 516 bp, Rattus norvegicus
  Genbank Accession No. AA944906
acaacacttgagacggattttattggggtttctcacagtggttggagccactctgtcttccggacaatcacagcacagggtatcgtcgcgcagactgcccagggcagcctgaatcttattgcttaagatacacatagtcacgatgactgacagacggtggtgggcctcacgcaggaatgtgttagcggctgcaaatctgaccgtagcaccaagccttctgcctaacccctccaacctggaaacccaactcagtcaagtctccctggcccctgactcactatttcctgtgctctctctgagcatcaaggtggctgaaacagcagggccagactggctccgtcatcatggtgggtgcttcagtaaagcttcagcactcgggccagctcctcactctgccaaggggaagagactcgagagggtcccacctcaccaccagttaactaaagaggggttggttttgggaaaactcactcctccgacacacatcagtgaggtgtctggcattttaacaagaaa

SEQ ID NO: 760 - DNA, 457 bp, Rattus norvegicus
  Genbank Accession No. AA944912
gaattaaaaaagttaagatcccacattttttaagaggctcttttacatacagtatagcatctaagtgacagatgtggaaatcagtcagatgagacttcctcatacactgccatgacgtggatctgatgccctctctcaaaagaatcctataaaaaattgctcccaagcccctctgaaatcgcaatagtgcagcaaaacccaagtaaacagcgcctgctgacccggtactcaaatatagactgaaagccaacaggcagttttttgtgtgtgtgtgcaacttttaaaaacagatcattaagttgaaatatccaatctgcacagtgctgtcccttcacagaaggcaagaaactgccggagcatcatgtcggaggccggcctcggtgctgtaggctgtgaaagtgagcctccttcagggtctgattgatgtggaagtaagggccttggcacagtgcagact

SEQ ID NO: 761 - DNA, 466 bp, Rattus norvegicus
  Genbank Accession No. AA944936
cccccaatgtaagtagcacatggtttaaatatgaatgactgaacttgtgatctagtccttgtctggtaattgtggattaatgtcagcgttaatcagcccctcaaagggagagagaagctgggcttttcccttgttgtacctcattcagcttctgatttccacggccccaccatttatgtgcaagatttgaaatggttgtcagcttcctctgaggactgagcttgaagcctctcttccagctgctgttagagatgcagagccgagcaagggtcaggagggaagctgacctggctgactgaataagggggaaccccaggactctccactcatctccaagacttgtggtccccaggaacgtctggaaacaatggggacattgttggtcggctgtttggtagatgctatttataagtgactttaaaccttctcttggctgttaagaaatgtgttctagatttagctattt

SEQ ID NO: 762 - DNA, 456 bp, Rattus norvegicus
  Genbank Accession No. AA945052
cctccacttataaacaaacacacgtttgcatggttggatattagaaaattaaacctttaattacataagctgttttcaagaatcacgtacagagatttcccagagacgctggagttggcagtcggccaccgcagtagattgagcccaccatttcagcaaaggcgctgctgtcctcagaggtagaacatgggacccgcggtcgtggcacatggatgtcagctctgctggctagtggactcacccagggccagcccaagcagtgcttaggcacgcagctctggggagctggtccgggcgtgctggcagctctagcccttctatgtaggagagggacctctgtgaggccggctcatttgccttcattccatttccccatccaggaatcatgttctaaatatccaggtcgacacatcttatgaagttggttggtctttatctgatattccaatcgccagg

SEQ ID NO: 763 - DNA, 445 bp, Rattus norvegicus
  Genbank Accession No. AA945054
actttacaagccagatatattttaaaaagatcatgtttacaataggtaaattacgtagtgaagaaatgtcaaaatgaagttgagtaacaaaggcacatttgaaagtttaagagtacaaagagtcccatgtttgttctccgagcataggaggaaagggagacagatatattacaattacattctcagggggagggtttctgtcagtggaagtgattaacactggcttcttttctcccctctctggggcagtcttttccttccttggcttcggacagacaggttaaccttctgccatgtagaggcgatacatcagagctaccaccatggctgagatggctgggatcacccagttggtccaccaactggaattagactcgacagtagtgataagggtttctgtactttgccaagacagcttgggaatttggcttctgacagactccca

SEQ ID NO: 764 - DNA, 605 bp, Rattus norvegicus
  Genbank Accession No. AA945069
cccaaagctggttttaatttccaaaaattatgaggtctcttcccacactggggataataggatgggatagcccagactattatcccagtccaacccccagcctagcccaaacaccattgctgtctctgggtcccgtcatttcaccactgggagcttatttctaactccctcactggccaagacaggtggatggatgtgaagtttccaggactcagcactgtctctccaaagtgaccctgggtctcctctgtgaggggaagccatctgtgtcacgtcaaagtggattggtgtaaccaccaggctcaactcagatccaagtcaatcatccctgggtctaagggtcagcgcccaggtcctggtggccgttccagtgcctgtgtgcctactagtacatccatgaggtagtccagctcagcctcatccaactctggagtttcctccttggctgggccattctcagggacaggtttgagaccctcagaggctggtaaccaaagttcactgtcatacatggaggtatcaatgtcctcaaacaaaccctccagtccatcgtccaacagacagcccgtggctgggcctagcaagtccaaggcacccaggttggg

SEQ ID NO: 765 - DNA, 664 bp, Rattus norvegicus
  Genbank Accession No. AA945076
aaaagctacttaattttaatactccacaagaaaattttaaaaagacttgacgctcttgacgttgggcatggtggcatatgtctttaattccagcagttggaagaaacagaggcaggcagaactctatgaattcaaggccagcttggtatacatagtgagttgcaggacaggcaggactacatagcaagaccctgcttcaaaaaaacaagaataccagtgaagaagcattaatgcactatttgttttatggatcaattggagaacaaaatgtggagatgttggcatcaccatgaaagagcaatagtgttagcagtcgtgttcagacctccttgactaactcaggtagacagaggtgaggcgaaagatgaagcctacagatatgttggtctcagctagagagactctactgataatggccttgggcctcgacaatggattttctgaaaatgctgaggtagaaactgtttagtctgttctatctgaatggttaaaggtgtttatcattccagaaaccacttctgctgctaattatctcctcggtgcatgtgaacaagtgttaaaaggtgacttgtgtctgctgaaacatctctgtttactgaactttcatctggaaatgagaaatgcgaataagaaataagaggtaaatttaatttaagtaaattta

SEQ ID NO: 766 - DNA, 687 bp, Rattus norvegicus
  Genbank Accession No. AA945099
aagttacactacactttcttagatatataaaccaagtaatgaaaaattatggacaatgttgagtaaaaaaataatttattatatatgcaataggccagtacaatacatttccaagcactaatttgaagatatgtaatattttaatgtttccaaagttgttacgcacagttccattgtccagacggccaatttcttctctcaatgctccacagtacttgaaagatacagaattcagaaggaacctaaaacaccataaagatccattaaaaataattataataaattagttaattaagcccaaatatttatatgtagaaaattagtgaatcatgtcagcataagatatatgtaagaaaggctacttttaatactaaaaactaaaatatttcaattgtgaatatgaagagactgcaatatcaattttagaaagcttctactcttaggatgacaacagaattgtgagtagttttaaagcacttataatagcatagcaacacttgccacaaaattttgaggatttttattttcctaaaaaaaaaaatccaaatttgtcagtggtcctttctattactaaggaaaactttcaagtacaagacattattgaagtgattctgatttattagctctgagatagaaacatttgtacatacactatcttcctgctggttctctctatattaatatagt

SEQ ID NO: 767 - DNA, 670 bp, Rattus norvegicus
  Genbank Accession No. AA945113
acaagagcgatgtttatttttcacaacagtaaagtaaattactgtgaagttcggcagcacagtgagcactgatggatctgactttcagaatatgtttctggtacagtgcggtgaagccacttagacaattccagttatttgcccagcaccttccaaacagtttacccatattgctcatcaatgttctttgtagaattgcttcatggaataaacactttcaaagccccatcatagaatgtacttacattgactggcattttgaactccagtttattgttaattatttcactactgtacacatttaaaacattagctcctattgtaatgtaccattacattccttcacagagtcatacgtaaagaaagtgacatcagggtttccttctatgattaaacgtttgataaaccagaggtgttttactactgtttatttccttaacttattttctattattcttatttatatagttttaattttataatttagtaaagaagactattttttaagaaaaaggcaagatttttttagtaaaattaaatagtaaagttaacgtctagttgctaaatcaaaattaaacagttctctaaagaacatctatctgcacctttcagttttgtcagaagtatatgtacagagaatcatgagtatcagcttatctgattagactta

SEQ ID NO: 768 - DNA, 604 bp, Rattus norvegicus
  Genbank Accession No. AA945128
acagatgttctcagaacctttactgggacttatcaatggcttggtttggggtatgaacacagaaagaggagtcaccagggaagaagaataaagaaagattccaagttcagaaacatgtgtagatgctcccaagggtcctaagtgcctgacactgacaatccaaaggctccagtgcacatgggagccatagagatagttgatgtcactgtctaagccaactttgcaatagccaatcagagcatgtatgtcagggcatatacagagatcagcatccaggctctgttccaggatcctgggcagaattgtcagattttggggagcttcagactcacatggggttagtgactttgcccataaagaagacagactgaccattattgtcagtgataaccagcatgaatggccggttgaaattcagaagaggtatagtttgcggtaaactttttagggctgctgtgactgctgtggcagcggctccttctgtgcctgtctcatccacatccagcacagctttgtggaccacctgagagacatgcaggttcttggtccctgtgatcctactcagatcagcttgctgggagaagattttcctaatgcccagctc

SEQ ID NO: 769 - DNA, 664 bp, Rattus norvegicus
  Genbank Accession No. AA945143
gcaagcaatgcgcagacaaaaactaaatttattaattaaagattcatttgaataaattttgtacagaagaatagtatttattgcatctatagtataaaagaactgctcaccaagctttataaagtatgaagcaataaggaactaattacttaaagtgtttctatggaggtaagtgtcagggtaaattgagttataaccagaatacatcatatgtatgatgatgctaacattttaccaagttatttttatcataatgcttaatctgcttaatcatacatcatcatgatatgcgaaatcataattttttccaggattggaccacaacatcacgtctctgaactacaaatataaatatgttacaccaatcacatatttgtaaaaatttataaaataaaagttgactgggaatcctgtagcctggactgatgttcagaagaactcaatctgattcatcgctgctgaagtaggagctgtcgctgtactcagctgtgtaaaggaacttgtgaatgatcggattcatctttggtatccagtgtcggggaaccaggtacgatgagaggttaaataaatccacgaacaccttgtacctgtcgctcacagttgagcgcagataataatagcctgaggatcccccagtgccagccttgctgcctagcatcctgtg

SEQ ID NO: 770 - DNA, 620 bp, Rattus norvegicus
  Genbank Accession No. AA945149
  misc_feature (1)..(620): n = a or c or g or t
acaacaacacatactaaaggagccagaggcaaacggtctgaaagactcagctatcactatgctgttaatgatgtctttattaggtaaggcgcataagagatgtccaatggcaccagacatcctgtgacagtttggagctggagacaggcagaaggcaacagtcagagttagaaggcttagagcaagaatttggaaagtcagaacatcaggaaacttccactcctgcaagggcagtcacgaaccagccctgcaccccacctataccagggagcgaagaccctgaggacaaaggcctttcactagtcagtcaatccccatctctgatatgtattcaactcaaaaatcatagagtctccctgtcaaactaaggaagggaggcgctggggttgaggagcacagaggtccacgtggtgccagatatcaaattgagtgtgtgtgtgtgtgtgtgggtgtgggtgtgtatgtatgtgtggcacatacatatacgaagggcacggnggtcactgtgaggtcagaaaaggaaccagggaaccagaaaggtatgacttggaggttggggaaaggttgctttgtaaagtttcaaagaaaaggaatatggccaggtaagtttctcccaagta

SEQ ID NO: 771 - DNA, 720 bp, Rattus norvegicus
  Genbank Accession No. AA945152
aggatcctcatcaatagatagaaacgtataggaatagtcaaactacatctacgaagtgtcagtatcatgctgcggcttcaaatccgaaatgatgttttgatgtgaagtggaattttagttgtcgtagtagacagacaattaggaaagttgagccaataattacgtggaggccatgaaatcccgttgctatgaagaatgttgagccgtaaattccgtctgagatagaaaatgatgtttcgaaatactctgaggcttgtaagatcgtgaaatataatcctaagagaatggtgattagtagggcttggtttatatggtttcggttgccttctattaggctgtgatgggctcatgtaattgagactcctgatgctaagaggactgatgtatttagaaggggtacttctaggggatttaaaggggtaattcctgttgggggtcagcaaccgcctaggtcgtgggtaggaactaggctggaatgataaaatgctcagaaaaatccggcaaagaagaatacttcggagacaataaacaggattattccgtatcggaggcctttttgtacaataggggtgtggtggccttggtatgttccttcacggatgatatctcgtcatcattgatatatagttaggatgtttgtcaggaggcctaatgataggagaattgtggagttgtaatggaatcatattactaagccggatgtgagtagaagagctgata

SEQ ID NO: 772 - DNA, 614 bp, Rattus norvegicus
  Genbank Accession No. AA945166
catccattttattgtcagatagtcagagttcattatataaatctttcaaaataatgagatcttacaagaatagtttacaagtcagctccgattgcacaaatacttgacacagaaaactgttttacaaatacataagttttcttacaagaatactttaataaagaaaataagtctctatacatcgtaaagcaaatttgattcagtttctttttctgatcccaccatcattctggattcgtttacagtaagtctatgacgtttcacaacgcaaagtacgacctatggctgtttctctttcagctactactgctcttccttttctgttcttccctgaaattaaaagaattatcatattcaggctcaaagaggtaattttaagaacattccttcaaaacttggataaggttagccaccacccttaatgactgatcttttctggtctgacttaggctagagcagctgacagtttaaacctgcgataccaagttaatagttcataagccaagaagggagccctgggagcaaggataaaacacaaggtcagggagctcaaacggtgggtggtgagcggagagcacacccaattcaaggtttctctcgggctgaaatgacag

SEQ ID NO: 773 - DNA, 461 bp, Rattus norvegicus
  Genbank Accession No. AA945171
caagaacaaacacctttattgtgggttccaggggagggaggtacgtggtggcactttaaccctgagtccagtccctgcagagcagtctgggacacaggctgtgggtcttgtttaggaggtggtctctggagctctgcagccaggcctgagttcggggacccaggtctttcaggtgatcttcatagtaggtctgcacgaagccctggatagctctggggccccagaaccaccgccatctgtccctggttctggtcaccagtggttccaccatctccatcaccctggctcttaccaggctccagcggctgttctcagggccaggagtgggggtcaagctttctgtaggcatggatgctacaaagcaggccaggaacagcacagagaggcagagtgatggcagggtctgctgcctgcatctcagcagggacatttctggggacttgggcctctgtgtctctgtc

SEQ ID NO: 774 - DNA, 646 bp, Rattus norvegicus
  Genbank Accession No. AA945181
gtgttcagcttctcatttttaatatttggttaaacaaaatacatctttgtaaacaaacccagcacaaggccaacaaagaaagggaataaagcaagaaaaacaaagcctagggttgcccttgctgggcatcagggtcaggatgccccttaataggaatggggctttttgcccttgggcatcaacatgggtccctgttcctaagcaccagaattggatatgaacagaaccagccctgaaatgcttaggcatctttatacatcccaccagctcatgggctccacgtgcgtgggactgtttgcagtgccatttgcaaaggcccaagcagatctgtagggaggagtctcctcttcccaagaaatggcttactctcaccgacagtgccaatggaccaaggtcctgcttgtgacaatcagcaaggtcggctgtaacttctggctggtagtgattggaatgtcattgtgcaggggcagagttagctccccgtggtgccaagcagatctggtgtagaaaatggtgcagatgaccatggctgagcgcaatgcagtagccacttgaggcctctgctacttgaataaaaaacggccttgttggattgaagatacatgtgcagaaaaagtgctggggtaaacatgcactccagtcacaa

SEQ ID NO: 775 - DNA, 592 bp, Rattus norvegicus
  Genbank Accession No. AA945193
aaaagagtatctggtgccaggtaagctttaaagaacacagacttattttagcccacgattctggaagctggggttgaaagaagcccacactggacaggagagccatgtggcttcaatgctggatggaaacacagaactgcaggcaagcatttatgaagagttagttcttaaggcaggcagccctccaagagagtgctgtctcctgagaactgctcttctcagtccgtacatctgtgaggaaagtgtcccgagtgatcgagaagaagtaaatactatgaaagtcaagactgttgttctggtgacaggctctaggtcatcatccactgagtagacggcaaccttcacaggctgttctggagtgtacacaggcttgtcagtgtgaacaaagagagagctgttgtcatagacgattggcattatttctaattttgaaaaatgctttgacacgacttccgaatacacatttgagaaccagttttgttcttcagacaactcttgggcctgaattgttaagatagcagagttttggaatttattttctggtgataattcaacagtgcccgaagagtaattaacatttttattaggatag

SEQ ID NO: 776 - DNA, 316 bp, Rattus norvegicus
  Genbank Accession No. AA945278
gtatttctaaacaaaggttcatccataaggtttactaataaatctattgtgattttacagacaagtgggataattgatgtgaccatcaatgcattttgaacgaaatggaggtgatcctcttaattttctatatccaggtttacacatgaattcaatattctcccctgattgggaataaatccttccattttctctccatctcagaactatgttatgtttttccagaatatcttctggtattacacatgcatgtaagcaggttggtgggtcagaccactttccatttctgcatgttattatcttatttcccttaagt

SEQ ID NO: 777 - DNA, 330 bp, Rattus norvegicus
  Genbank Accession No. AA945284
agatgtttctatagttgaattacaacgatgatttttcatgtcattagtcacagttaaatgctgtgtagaaataatgacaaattatatgtttattttaagtttactgtttttgactggttgtctagggttggcgttgaagccttcacctatttatggtgggtttggattgattgttagtggatgtattgggtgcttaatagttttagggtttgggggttcgtttttaggtttaatagtatttttaatttatttgggtgggatgttggttgtatttgggtatacaactgctatggctactgaggagtacccggagacttgagggtctaattg

SEQ ID NO: 778 - DNA, 664 bp, Rattus norvegicus
  Genbank Accession No. AA945320
agcttgcggacgccacactttttttttttttttttttttttttcatatttgatagcagcttttttattggttacaaaacctaagcccatatacaaaattaggaacacgtttagatgcctcttttgaaagaacattttagtctttttttaaactgagtttaaaaaaaaatagaaacaatgcaattttaaaacactgttttgaaaacctaaaagtgcagcaatacactcagtttccttatctacgaagtggtgcgattccaattcaaaccggtaaggtcacagcaaaccggatcaagcagatgcagggtctgcactactcgatgctaacgttactcaaaggttagtgtgcacttaggacgcaagaggaaataggaatcatcacagtagaggcccaattttaatctcaatgtgtgcaaatttgaaaaggtaactgtcagttaagtagggagagtcgagaagaaaataaactggaaaggggacaattcacaatatcaagaagatattttgactttaagggtttcaccaaagtgtgtgaccttaattcattctgactttgttactcctacttttagtgaacaactacacagtttcaaaatttagacaagtgtttgaacaggatgcagttaccacatgaagctttaactcaaaatctgggtaaagaaaaa

SEQ ID NO: 779 - DNA, 354 bp, Rattus norvegicus
  Genbank Accession No. AA945432
cagggacagagaactttaatgttcaggtatcaagggttacatcaaggcacagacatcctcaccaaaaccaaataaataataatctgtataggaagataagtttatggctgggctggcagcaatgcagccagtccctagggtctggacaagtcatggcttttagtcctggagttctgactcccttactcactctctgagtcagagtactcagccaccagggaggcgttgggggtgttggggtgcagcaggtcctcctgggaggaacctaggggtaaggcttgatcactacagtttctcttagattctaatgtcatgctggttctgggtgcctctgctgtcccttgaagtgtcttg

SEQ ID NO: 780 - DNA, 367 bp, Rattus norvegicus
  Genbank Accession No. AA945454
gaaaataaaatcatcatttttatttcaaggtcattgctggggtaggacaggaataaataatggggcggaggggaggcagtgtgttgagaggtcaggacaaggctcttggctctctatgttatgcaacagagaccacaggaggaattcttacagcatttacagcagaagaggcatatggggaagttggtgtctcgcttccttcgcttcagcatcagcagcgcactgtcatcagtcttgctttctgccccatgccaaggctgcagagccgtagtctgtctcgtctgttgccggagataggcaccgctgctcaggctggccaggaggagaagcaggagacaggcagcctggatccgagtgcttagtgcca

SEQ ID NO: 781 - DNA, 300 bp, Rattus norvegicus
  Genbank Accession No. AA945533
aggaacagaaaagcatttcaaaaggccattttaatgcaaacaaaatattttaacacatagcaataaagcaagttcaacttctatcatccaccacactagatctgatcacacaagaaaatacagtgtcaacagatatctgtcccattcactcaaccttaattttagatatttggggagattgtagatagatagatagatagatagatagatagatagatagatagatagataatagatagacagatacatagatggatagatagatgatagatagatagatagatagatagatagatagat

SEQ ID NO: 782 - DNA, 616 bp, Rattus norvegicus
  Genbank Accession No. AA945573
attattttatagtgaagctttattttaactcaggaatggatacacaatgacacaagggatcataaattgttatatgaaagagataatacaagtggatttgtgctataactccagaaactgcatgtgctttctggatcttaagacaagagtcaggatggatgatagagggaagggactggataaaaacctgaaggggattgcagaaggcaacacagtagaagccaaaatgcctgatctattcaggaaggaatgaagcagagctggtaagtgggtggcagagaggcaaaaccattcagaactggcatcgtatcaatgtcctttgggtgaaccagagatttcaggttaaagttctgtaaaatggttgtcaagaatagaaacaactgcatgcgggccaggccctctccaacacaagctcgttttcctgctgagaaaggcaaaaagtagtcacttttcttaaagtttccattctcatctagaaagtggccagggtcaaacatctctgggttggggaactccttgctgtcatgcagcactgatgtcagtgatgttaacacttttgttcccttcgggatcaggtagttcctgaatttaaagtcacaggtcactgcatggggca

SEQ ID NO: 783 - DNA, 601 bp, Rattus norvegicus
  Genbank Accession No. AA945577
gaatgaaataaaggtggtttaataagaacgtttcacggcatcttcccgagttgctaacacggtttatagagcaagaacactgtttcagtacaaatgggaagctactgctttggcaagatcctggtcctcctgggctgggtccctcagttctgggggttactgacgacagcagtggtgctgtaggagtacgggctgagcagggctgcgatggtgtagtggcgatgaccagagtcattggctgtgaaaaccacctctgcgtattcatggaatggggaaatgccaagagccttccagtacgatttggtgtccagttctaccctgtacaccccttccgtgaacttctcatctgtggtgagcccgtgcagctctccagactcggcggtcttcccagaggcaaacggctcccagcttccgtctgcagtctttttgaacactttcacggccacatcaacagcagggctgcctcggacagcatccaggactttgaccatcagaggacacttggattctccagcacccccagggccagcttcagacgcaaatatcagtccagcgaggcagaggaggaacaggcgaagggaagccatcccctcgtgccgaa

SEQ ID NO: 784 - DNA, 616 bp, Rattus norvegicus
  Genbank Accession No. AA945578
cagtgacagaatcagtcagcaatcttttaaattttctttctagaaacttttacaaattccaactcagctatttttacagtaaaaaagatgattttttttttacaagaaagtgcattttttttttctggtaaaatcatagtaactcttcagatactgtaagcaagtatcaggctaggctcacaatccggccatttctactcaggatgtgggcaaaggagaggcagagcttggaaatagcttgatcccggaggaagggcaggtgggcttggatttcccaatcagattcaacattcctcgtgtgactatagacctatgtgagacaggaagccttccccatgaagaacacggcctcctcagtacaactttcttaagcgcaatcaatgtttatgtgtcaaaaaaggtatcctggggtagaggacgtagttcagttgattctgttgctttaacatgcttgaagccttgggtgtgctcttcaaacactacagcttagcagaggaggattcaaactctagcagtcgcccaatgtcatttgggagcgtcatccagctaccaccatcaaccaccaacacaatccctgagacataggaagccagagggctggctaggtacagcacgc

SEQ ID NO: 785 - DNA, 578 bp, Rattus norvegicus
  Genbank Accession No. AA945585
aaaaagcttgcggacgccacactttttttttttttttttttttttttcaaattaaaatatgtaaggctttcaatttattacagatcacccaagaacatatgatatacatgtagtcagaaaacacgatgtagaaatcatagtgagttgtccagacatggtcagtagattattctttctggcatgctccactgtcaagactcaataaagagcactaaaatccttccatacaattaagtatcagggatgtaccatattgcagaaaggggtggctgagcaacagtttgttgatattataagacttccatgctcaacagtcgtaccgatgcactcagcacagctctggtttccatatacaaattttccatctcgagtggttactacaacccaggcacaaatctcatcaggataagtctgacatatacgtcttccaacacgacaaagtcctgtagaatcgaggctttcacatctgaagcactgcaaagctagcagggagctcatgagcaaagacaggcccagtgggagcagcaagataggctttcccattgcagtgagattgatcttcaaaccagcctcgtgcc

SEQ ID NO: 786 - DNA, 505 bp, Rattus norvegicus
  Genbank Accession No. AA945591
  misc_feature (1)..(505): n = a or c or g or t
gtaataaaaattagtttattgaacaggttggggccagctgtggtcgtatacacctttaataccagcgctcaggaggcagaggcaagtggatctctgggagttccaggccagccagggatacatagtgggacggtctcaaaaattatttgaacaggtacttgagacatgtgagatgatgatgtggacagatatgactagcaccctcaggtcctccccagggtacagcaaaaataatcacaaaccaacattctttaatcagaaaggcacttgagggcccctacagagtcttacacaagagcagccctgcggattcccactcagccaccctcccttcccatccggctcagagttcatcgtgacctgtggagggatctgctccgggcttgatgaagattccttccatggccttccacgtgttgtgtgcattggcactangcatgccatgcacctcatgctgcccacggattgggttaccatactgttcaacagtaactgacaggaacac

SEQ ID NO: 787 - DNA, 588 bp, Rattus norvegicus
  Genbank Accession No. AA945611
aagcagatttgatgtgagatttattattgaacatgatttgatagggtataggagagcactgtggaagccttcaggaatgcagggctctccacttgtcaagaggaccacgattggggatatatttgacaccacagccatcaggaatgagccgcttctcagcaaccatgtcttcaaattcatctgcattgaacttggtaaaaccccatttctttgagatgtggatcttctggcggccagggaacttgaacttggccctgcgcagagcctcaatcacatgttccttattctgcagcttggttcggatagacatgatgacttggccaatgtgaaccctggctactgtgccctggggcttcccaaaggcaccacgcatacctgtctggagcctgtcagccccagcacaggacaacatcttgttgatacggatgacatggaaagggtggagcctcacccggatatgaaagccatccttgccacaactctttaccatgtatttgttggcacaaatacgggcagcctccagtgcttcagaagagagttgttcatattcatctgacaccatgtggccacaaagtgggaattcatcca

SEQ ID NO: 788 - DNA, 437 bp, Rattus norvegicus
  Genbank Accession No. AA945636
cacaggttcagctctttattggacatgttaacaaaagcagtttagtcaaaaagaccaaagcccatgtcatcctcggattcttcagattcttccttctttgcttctactttcttctcctcagctggggcagcggcggcagatggagcaggaccaccagcaggcgcagccccagcggctggagctggcccaccagcccctacattgcagatgaggcttccaatgttgacattggccagagcctttgcaaacaagccaggccagaaaggttcaacattgacaccagctgctttaatgagagcattgatcttatcctccgtgaccgtcacctcgtcgtcgtgcaggatgagggcggagtagatgcaggcaagctcacagacagaagccatgttgtggactgccggcacggtgctagtcgccggatgaaatgagggcccctc

SEQ ID NO: 789 - DNA, 450 bp, Rattus norvegicus
  Genbank Accession No. AA945679
ctccggggtcccccgggaggcgacagcctggggctctccgggcgggggatccaaatctgctgcggggtggcggcgggcctcgctggcccgagccggcactgctggagagggatagcgggcgggcgggcccgtcggcgtgagtgtgaaccggtatgcgctgggggtggggtatgcacagtggagcggtgtgcagaatcggagttgcgagccaaaggcctttgcagcggcgaccccgggcgagccgactcagcgcgggccgcctcccgcgcacgctcaccgcagagttcgtactgggaaagagttaaaaaataaacatttacaacggcaaagaaagcggcttcccctccctggcgtccccggacgcgctccggggtcacggctgatccgcagccgggctacagtcccagagagtgaggggagctgatcccggtagtctgggcgcctgggggc

SEQ ID NO: 790 - DNA, 411 bp, Rattus norvegicus
  Genbank Accession No. AA945683
aaaggctttttttctttttaattaggaaccagggggtgtgctgcttatcctctgcaagtctaaagcaggtcgccaggcccaggatggagatggtgtcagtgggactgcagtgggctttgctgaattgcagagagcccaggagaaaagacaacggtggcaagagacgttggcaagaactcgtgttagccaactacagcctggagtgagctctcgccttccttccaattccgcttgagactggagtgtgccacagaagagaatgtgctggaagggcacgatgcagccgtacggtcagaccccggtccactcagcatcccttcacttgcctgccctccattcttcttgccgcttcgtgattaggtacttgaagaatcatacacagaccatgcgatggctgtggaggggatctgg

SEQ ID NO: 791 - DNA, 665 bp, Rattus norvegicus
  Genbank Accession No. AA945698
aataaccttgcggccgcttccaatttttttttattttttttttttttcatatttgaaagtttttatttatattttggtcctatacacgaacattcttaaatggaactcttctgtaagaatattttaaaaataaaaatttgccaattatcagatcgacacaaacccttaacaaaggttttctgtgtaatcctcattaatgcaaacctttataagtattacattcttactgtagatcttcagtctgttctgtaataataaggctataaaaattgtatgtggcacattcattacaaactacaaatacttctgctaaaaagaaagctgggcactacaggagctccaggctctggggcgggcgtgctggtttgcagttttctgtcacttactttcaaagagcacatagcaagggaggcacctcctttattaactcctccatttaaattctgttgtttgtaaaactggaccaattatcaccaactattattagcataattaaccagatgcctctttacaaagcatttcactggtgatatcagcaagtgcagaagaagagagatttctaagagttgggtttgttaaccttgccagatccttaacattatgggctgtggggctacttcagcttcgaatcagaagactgatgccgcacataaacgcctcgtgcc

SEQ ID NO: 792 - DNA, 676 bp, Rattus norvegicus
  Genbank Accession No. AA945699
ggccgcctccaatttttttttatttttttttttttttagtttataaaacaggatttattaattcccatttacagatatagaaattaaggcaagaaataagcatgcattcacaccagccagcaagagcaaagggttgctttagtgcatattctagccaaatataccttggatactaccttttggtactgttcctttggacaaatcagcatgttgtttttaaatgactaagggaagcacttttgggcacagcacagtccagtgttttacactcagccatacttcatacattaggtatctgtacccaataagctcttcactctggcatggaacactgctttgttttgcacactgtcctcttcaccctctgaatgttgctatgctagatgcatcttcttcaatacatgacttgaattctcactcagaaatactcagtagtgtatttaagttcaaacgactaagacaagtaatgtctagaatgaactcaaagcaaaccgtaggaagtcctgtacacacttctggtgaaaattagagaagagctaatgcaactttctattggagtgcatgacgtatggacatttgctttatccaatgttaacaaaagctggtaaaatgattgcccccacgaataagtcatagaaacatcacccatttgaagaacaataccattaattacaaa

SEQ ID NO: 793 - DNA, 520 bp, Rattus norvegicus
  Genbank Accession No. AA945704
caggtttagcatcagtctttaatgctgtcacactgcataatgacaagtcacacactttggtcttgtgttggtagtggcaacttacaatgagtcgaatggtcagagcaccaggctagctccaaagaacagatccattccctccccaggtctgactcatcacagccctggacaggcagtagttgacagggactgctttcatccaagtgcacaccagctttgcatggaattataaaaacatatttacatacgttccacggtgctcctttcatcagaagcaaaggcccttttatcaaaagggattatatctagggctgtgcaaaattcaaaaggactgtatccttttgagaaagttgagtccattacacacacacatacacacacacaaaaaaagtcacctgcacctctgagaagtgccaggtgtggccaagggctacctctggaccagcaagtactgtgactgtaaggcagccatctgatttcaagagagccacaggtccaggggatctcctggctgtccagg

SEQ ID NO: 794 - DNA, 582 bp, Rattus norvegicus
  Genbank Accession No. AA945743
aaggggatcgttatgtgtctgctgacgtctgtgatggggaagcaggcactgctggcatcatccccaattccctcatgtattctgggctggaaacgagctcatgtgagctggaggtaaatcattaggtgagtgcccagcaccggcctgagttctttatagcagtgcacaggcggctgatgaagaacctgctcctttgcatggccgaaggcggtttacctccacacagggccttctcagagatggaggctttgctcatcttcaggaaaaacaaaaggaggaagagaagagaggagccgtgggcatgggcatgggtatggccgcttcctttcctccactgtgccttctgtgtagcagcagcccttccaccccactgtctgccactgtcagcctctgtgccggcagccacaccctcccaggccaatagctgctggccttacttattagctacagcagagagctggtcccgaatgcgacccagcccatctaacatggtgtccagcgtttctttgctcagctccacggtcacagccgagatagagggtttctctccacacagactatggtcctcctggatcttcatct

SEQ ID NO: 795 - DNA, 591 bp, Rattus norvegicus
  Genbank Accession No. AA945746
aagtactccaaaggtttgttttattggcatttgaaccaaagtcctgcccatggacaaaggcaaaaccctgaacagaggtgggaaatcagcatcttactctcctgatacagcctctgagaatccactcagacactcccacttcaccagtggtcagagaaagggaggtgacttaaggccggatgtgctgccttcacggggtctgctgatcctgagctggagggcaaggagtctttgggtcccaccttttagttccacaagaaaacaaggacagaagtagagaacaagacgctatggcctgcatctagctaggtctttattgctgtgtctctcgatttgtaggccactcctcgacttttcagctcccgcacaattccttggggcagacgaccagtgactgacacagcatatacacctggcttaaagttactgacgcgctgccacttggagacccagctgtcctctggactcatcatcgcgatgattccatcaaatgaagagctggtgcagtcgtacaccatctctctgttgcccttcatttgtaggtatgcatcgcaattgtcacacccatcatattcaaactggcctcgtgcc

SEQ ID NO: 796 - DNA, 568 bp, Rattus norvegicus
  Genbank Accession No. AA945762
attttgaagaggcccagaacacgtttattcagatggtgtgcacgccctggggatcggaacacctgctgaaatggaacacactcgtaaagacacatcttgtggggactgtataggtaggtgttctactcccccccgtgcaagtgtgcagaggattgattccctcctcctcaagagactttcataggaccaaaaaggccagattttagcaagagaagatgttattaacacacgcccaagggctttgaaggaacaaaattataatcacatatatcaaagtgacacaaaatgaactgattgcacaaaaacacaaatggaagagcatcctgggacctcctataaggcagaaagaccttaggagcactacttgaattggggtaaataaatactttggtacaagtttcgccctaaaagacaacatgttgctttggggttctacagaaggaaaggggccatacgcatccctctgcgccaacacaaggctttggcacgacctgcagaagcctggcaggcaggctctcctgtgtgccccctgcttcatctcgactgcacgctgccgttcaaaggcgtt

SEQ ID NO: 797 - DNA, 466 bp, Rattus norvegicus
  Genbank Accession No. AA945780
  misc_feature (1)..(466): n = a or c or g or t
aaaaaagacagatttaggatttggtaagaaagtactgagtcacactttttttaatctgtgaagtgctacaataatggagtaaataaataagatttgtaagttcaatgtttacagacatattataaaaaaatgactgaattagaagacagtgagtaatgttgatacacaccaggaagggatctgggcaaggaaaggcacatcatttcaccacaagaaataaagacccacaactggaggtcagtaggtggccacagctttagatcttgtggtggtaggacccccagctctggggggtcgatattgataggacctcccatatagtactcagctgggacaaaacagttggggaattggctgtgattcttctccgttaaaaagaaagtactctttaataagcctggtgtgtccagatggggggaggggggagcagcanaaatccacaatggtttggtggcactgcaaaacc

SEQ ID NO: 798 - DNA, 438 bp, Rattus norvegicus
  Genbank Accession No. AA945784
ccagtttcaaagcaatttaatcttatttacacagttaaggaacgggtgatacattttcatgagttagaaactgatctttctgtaataaaatagattttaactcagtgtcattatcactgctgaggaaatcgtagcccttgtctgccttcaacagcattcactggagttattgctatgtactctcccttctgttaactcactgtcacttagatggtcctgttttccactcagtagtctacagagctttgaggttactatgacctatggaagagaaattagaaacatttttgttctgattctgataactgggggctggagcacaagtttgggtaagttatttaagatgtaattcaatttattcgtataacaataacctaagcaacaggctccatcactactaataaatagtcctaggtacttaattgggtcttagcatct

SEQ ID NO: 799 - DNA, 567 bp, Rattus norvegicus
  Genbank Accession No. AA945866
tatttatgaacttttattcaaatagattttcacacatcttatctacgacagaaacctgggtgattcagactttgtggatcgggagtggctgaggcctgacacatccgttgtggccaaagtacggaaaaaaaaaaatctctcaggataaaaaaaaatatccttttacgtatttacttagttttggaacacatttgaaagccgttgtcagctgaattcattatttcttttagaatttccaagttgctctttatttactttttttttttttttccattttgtttttgcaccaagaaaggggaatggagtcaaataatacccggcaactgatttcctctctttggactgaaaaattaaacagatactaaattatgacagtgaatttgggaaggagggctccgagggctggagagacacgtctagggtaatatgatgctgctaggcgcacggcaatcatatcgtggcaatcaccggagcgtgccgtgtaactacctcctcggctaatatgccttcttcccggtgatgactaatcacgttctattaaacagcggtaatgctggaggaactcga

SEQ ID NO: 800 - DNA, 477 bp, Rattus norvegicus
  Genbank Accession No. AA945867
gatacgaactattataaatatgcacaagcaaaggtcatctttttctaggagtcgtcagaatccaagttggaaggagacaccttttgtaaaaccttccatgggtccctgctttgagataaacatctaattgctgaagtctttattattattataaacgatcacagcgcatgctacttgatatggctctcaactcaagcgtctgctttcccagtgggctgtccctctccccttgcaacaccctcttcatccagccttaagaaacactgcaccatcttctggtcaacagtctggacttgtgggttgctggggagagagtatgagccaatgatagcatgcaaggtgtctattcctacaaccagacgggagggactacaggctctcaccccagcatacagacactcagctgtcatttcacctagctctcattatctatcgataatgcagcagagaggttgggggctacttctcaatggttta

SEQ ID NO: 801 - DNA, 606 bp, Rattus norvegicus
  Genbank Accession No. AA945877
gagagctagtcgcaagttttatttatataaaattcattaagaacataaaagattgagtttcttaaaaaaatctgcagttatttacagcagtattgctcaggtacagtggcaattaccctgtcaaaattcatcagtgcaaaacataaaggaagccagggaaactgcaatacaaatgctacatacgctgggttctgacacgttagtgatggggtacaatacagagatcagtgctgtttaccaaaggatacctgacagttctggatacagaaaccagtggtcacagaacctagacgataaaacacatttgaaagagatcaagtactttgctgggaacttgaggatgctttgtgcaacgctgtttgagaaggattccccgctgatgtagcgacacgtgtggacacaacccgcacacagacgtactgagtggatggacacacacaggcaccaggctaaatcagcagggaggacaaaaccatttacatgaagtcacatggctctagagcttcagtgagcttttttttttccatcttgacacccaggccagtgggggcctctgttgagcgaagcaagagcaagctggccaaatgcagtgaacagggtggggag

SEQ ID NO: 802 - DNA, 585 bp, Rattus norvegicus
  Genbank Accession No. AA945887
ggagtaaatacatttattgatacccattttacatatagttcaatgaaataatctataaatataaaagcatttttcctttggctatcaccgtggtccaagtaaatactcaacagtcagtcatctgcaggaagtgctccaagtctcactgctgggtaacagacctgagtacatccctcaccagcggcactgacgcactcaaggggcccagtggctttggaatgtgactactgggcatgtgtagtaaagaaaatgtgaaagcctaaatcaacggggaaagggtatcagccatgaacaacaggaacagttatgaattcatacctcagcaaagcaaagtaccacagctgacacttggtgtcagaagactgcagagcacgctgtaccaccacaggcctcctccaacccccagaggacagacagtctgccagagcctcagggtcatctgtggtcaaaaacaattcttaaagagcctacacagcatagagtgacagccatggcaccaggactaaagaaaagtgagcgaagtacttcagtgacataatgagtttgccccctcactgtggggactctggggaaagcccttctgtc

SEQ ID NO: 803 - DNA, 534 bp, Rattus norvegicus
  Genbank Accession No. AA945902
gaagggaaatacacaactgtgtttattttaaaatacattaaaaagcaaaaccagggcagtttggtgctataacaaataattacatataggcacacagaaactgggttctcagaggacacaggccagggcccccacgttgctgacgtacgtgtttgggtcacacttgcctaccagctcattgccatctagtgcagtaaccctgggttagtcttgtagaggaaaggtgagtcaattcctaggttgccatcacaaaactccagtggacgccctaaggcagtggtgtaactccataaaacgcacacagatgtctttaatacaagttgcttcaggccagtgagactgcagtttatttgactatcttatggtaggggaagaggctgagcgtcgctgtgaaggccctgatgtcagtaatgggggtggtggactctgccaggagaggagagggtggcaggtagattagctgcatcccttcacgagaattcgggtcctcacaaacgggagcgccgtcctcttccagttcatacttcccatatc

SEQ ID NO: 804 - DNA, 537 bp, Rattus norvegicus
  Genbank Accession No. AA946017
agacaagctggaacttttatttacactaaaagcaaagaagggatacagaggaagggtttggaagccataatggggaagccaagctcttaaactcagttgcagtggggtgtgggccctgctgccggacgcaagagaataaccagaaaaagcgataaggaacagtctgcagcaggaaccgagttttcgtgctggaagaaccaggctcacagaaccaagagtcccacacaggggatgtgaccagagcatgctccaggggctgaagtccacctcaaacctgggaaagtcccagggcagcccctgagagcttttgactttggacattttgcattaattcttagccagactttgagagacaccaggccagacgaactttgctttgttgcctttatgatttgggacgaagagacttggacggaaggaagcatcattgactgtccatcccttccctgggtgcaacacctctccctgactgacagaatgttattgggctccttggggctccgctgtgggctccctggggttcactggcattgggtg

SEQ ID NO: 805 - DNA, 618 bp, Rattus norvegicus
  Genbank Accession No. AA946018
acaaattaaagatgcattgaaaaataaaccaatgtaaaagaaatgaaaggtccatagcaggggcatcctgggctgggagcaggcaagcctgaccaccgtcattcctagcccttgtcctgcccagccaattgggattggaagataacttgtcagccactcagtcagtaccaaagcccagtaaagtcctggcacggaggacagggctcctgccatctctgcctctctccaacaacgtttctcgtgggagctgagtgggatgtgggctggctctgtgaggtattgcaagttgaccatcaggctctctacagaaccatccaggattggggcttctccatctggaaaggaggctgctacttcccctaagtgttaatatgctttgcgatttagtctccaggctcattcatctataactatgtgcttctttctgtccacgaagtgctcaccaatcattgcaggggacagagagcacgcacagtggaagtagagagacaactagtcatccatcctcagtagccatgactttgctactgaccaccaggcccccaaaggaccaactcctttactctccaccacctacggtctgtaccccagctcttgtgcacctgtacattttatccc

SEQ ID NO: 806 - DNA, 454 bp, Rattus norvegicus
  Genbank Accession No. AA946040
aacctttccagtgagtttttattagtagttgcatcatgattcagggtcccagggtagggaccatcatatactgaggtcccccttttctatcggggagaaggtcaaagagcagaggagaggtgggcggagccaggtcagatcttcccaggaaatgtgccttctgctatgcggtcatcccaggctgagacccatgagacggggcagagggacttgtacactcgccggtaccactcgcacacggagacgtcaccgccctttgccgtcattgccttctcacagcggtggaagtccaggtagttctgccagcagttcttagtctggttctggtttgggaagcggctgtcaaagggggcggttttgtagttcttgattttagtcttgatgtcttcggccatcctgactcctaaagactgtcccggagcagcgttacttcaatgtgaccctttgcaaagac

SEQ ID NO: 807 - DNA, 629 bp, Rattus norvegicus
  Genbank Accession No. AA946046
gagaaagtagtaaagatttttatttgtcaatacaagataacacaaataaattaatttttacaacaatcttagactccagggtttctctatgaggttagctcattatgtaaacagactactatctaaaatgatcgagcaattatatgagtgttcaaaaccaacagaccatatccttccccctttcctcggtaatgtgtgttacagaacagatgaggttaacttggtggaaaatggtctcagtgttatcagactacagtggcaccaagttcatgtgaacctgtacctgtcatcttcttctctaacagagctgaagtggttgtcacacctgcaatcccagcactgggaggcagagatgggtacatcttctgactgagtttcaggctagccacggctacaaagtgagacatctcaaacaaaacacacaattaaaacagcataatatccaggaactaggggtgacacgcagtggtagagcacttgcctagcatgagccctgtctgggttaatcttcagtgatggaattggagtgggaaccatttgccagtatgaaaccaacatactgaattagaggttaaagtgcgaaagagaagaggctgcactcaaagcaagcagacctgtggatctctgta

SEQ ID NO: 808 - DNA, 514 bp, Rattus norvegicus
  Genbank Accession No. AA946057
gttcttgttaaattttattggcatcacgctcatctctttacagaagaactcagcctacaccctagaatgtagacttctggaggggaagtgctccgggaagcaagccatgatgcagggcaggacctcaggaggggacagaactgccagggctcaacccaagagactgtgggttagtgctgggccacactagggtgggtgggaaaggaggggatctgctaacctacaggtaccacaaccctgaaaggagcgccttctagaacaaaggtagagtcactgactgggacaggtctggtggggttctcctttcctctttgagtatgacagtgatctaagggcattgggaagtgttgaacagaagaaaaacagaaagggagaaaatgataattttaatttctgaagtaacagcaatttatccattgtatacactactgtattatgcaaatcaaccttttggaaaatttagacacagaagggaactgtctcattcagttttccctctggagagatgaaaagc

SEQ ID NO: 809 - DNA, 493 bp, Rattus norvegicus
  Genbank Accession No. AA946088
  misc_feature (1)..(493): n = a or c or g or t
gaaacacattttaatcaataaataggaatatttgtcaaccacttattaggaggggaaaacaggaatgtagaaagaattccaaagaaaacgacaccttgaaaagaggaaagtgccaagacctttgcctaaagtgtcatttgtagaaccagaggtaaccgaagattattcagaaaaaaaaccttggaatatttgacagaattccagatgtatttgaagtacaaaaacattattctgaatacaacgtgggatgggttactcttcagcacctgtgtggatgatcgggcaagtcagtgaataatgaatgaatacattgtagcacgccggaggacatggttatttaattcacatttggggccaagtttaccccccaccactacccctgccttgctatccgttcctctgctctacnacacaagggagcacggttcccaaggcctcactagctggctttcaagcaccctggaatggtaaggcgctggtggatatgggcaca

SEQ ID NO: 810 - DNA, 493 bp, Rattus norvegicus
  Genbank Accession No. AA946120
agcatattaagactttattttcatcgcccagaacacagtcagaagtcacacaactttcattttcttttacaggtttccaaatactttcaatgaaaagcagctgagtatgacgtcatgtaacttacaacgctccataaactcatccttcagtattcattattcttgatatttccactcacgataatccaagtttcaaagtcttgtataaaacaaatcatatctacatggacgggtatattcctggtatattcctgtagagacagcaacactctgtggattaagatttgaacaataaaacctggaccacatcttagaagaccatggtcttaagcagcttaataattttcatgaactctacttgagtcagactcataattttatggaaaaaattgaaagcaagctgccatgagagttccgcttatccacaagcaatacgcggcattgtttagtcaatcaggaagatacttaaaagtttcacattactccagaaacc

SEQ ID NO: 811 - DNA, 413 bp, Rattus norvegicus
  Genbank Accession No. AA946149
ggcatttaatagggcactgcctttataagaaggaaacggttatattatattaatgcaatattacattgtacaattaaaacttgccaaaacccaaatcatactggaataatgatagtgaattaaaataaattttattttcttagtgtgctttccatttagtaaataatatgaggggctgaagcgcgcaggcactctggctcacctctgcctgagtacgtgcagaagagtaaacgtactgcacagaggagaatgagtatggaagatggctggaacggtgcactgccacctgccgcagactctgcagtcatgtttatgcagggacttgaggacatgtttccttgccaggtggtcttggagattagctcggaaggctttgtcccaggattgaggctgcttccaagctgtgtcctact

SEQ ID NO: 812 - DNA, 465 bp, Rattus norvegicus
  Genbank Accession No. AA946189
  misc_feature (1)..(465): n = a or c or g or t
accacaagtgacttttatttgtgacgctcccaggcgcagcccagacacagacacaacaggaagcaggaggtggccaagcagccactttggaagtcacagggcatctcccacccagctcaatccctgctacacactctgtctcagaaaacgctcaaagagtaggcccagcatgtggttcaggcatgaggggacctgcccttccctccccaggatgaagaacagggctgggccagccaaggtgcttcttccactgggtccaagagccagggtaccccaggctattccactcctgggctctttggggttggcccccggctgctcctccaagccacacagttaaggccagagtttcactttctaatgcagcccatctctgacagtctctgttccctangcacggtggacacagcaagacacagcacacagactaattccccagtgtttggtgggacacgaaggcaggac

SEQ ID NO: 813 - DNA, 510 bp, Rattus norvegicus
  Genbank Accession No. AA946231
caggttcaaatcgtctttatttctacagcaacatctgagaaatagagagcgactgccttacccaacaaatggggtagtccctcctgtgtgtggggggaagggggacatcagaagctgaggctagggaggcgtggcaggatggctcaacgggctgtgcccagggtggggtcaggccatgcctgggcggggctaggttgaaagaacagtgcattaagtccaggaggcagcacaaggccccgtggtgtgggggatccgggcatttgcaaggtggagtggaaatccctccaagaccaggcgaagaggtctaggaaccccttttgggaggctctggtcccagaacttggagcttggaagataccaccactggtaacagggtgatttaaggcctgcgcggtaccactggataagatacaggcaggtggtggcccgggaataccgtggactgacgggaggagggttgaatgacacgggcaataactttattctctatatacagaagcaacggccggc

SEQ ID NO: 814 - DNA, 537 bp, Rattus norvegicus
  Genbank Accession No. AA946253
aaatacctaagaagggacttgtcgtcaggtaccaatatccatgtcatgcaagtacagcactaagataacagacagtaaattcaggaatgttactggggaaagagacagccttactttaaaaaacaaaacaaaacaaaaaacccttacatcagtacaagaaggtaaaacagtaagaatcagattccgctcaaacgaagctaccaaatttatccttagtggagttttttctttttttgtccataccgccgtctgcgctgtttataaaggtgacggaagttaatatataaccctaaaaataacattacaagataaacttgaaggaagaaggagaatctgactttcatcctcaatggatatggcaaagtaaaactgaaccttcctgactcgttgaatactggaatagactggatcactgcgacagcttctgacagacatcccaggggatataagggaatccacatagtgtaacgaagccacgtaagcaacttccagtccatgtcaatacaggacagcatgtagaaggggtacctgaaaatt

SEQ ID NO: 815 - DNA, 490 bp, Rattus norvegicus
  Genbank Accession No. AA946264
gtaaattttactattttatttgtgaaaaaactacaagcagaattcataaatagacatttctatttaaagcaggaaaatgataaagtggcttctaataacatagtcgtgcacatgccaataacaggaatatattaacagcttttatttgctagacaaagagcagtgtccaatataaatttcccccaaaacatttaagacctgtgaatttctgaccagttcacaagaccaccgacactttagcatgaagagaaaacaaacctaacagactgtcagctctaagacggacggagcagaaacttccaaagcgttatacaagccatctttctgggcaaatggaagatacagctcgtataagagattaacaaaagttcacaagggaagattatgttctgacatacttaacaggcattcgctatctgtctccaacatacagagctaagggaataatgtaaccatctttacacagtaaattaggttacaagtcatacac

SEQ ID NO: 816 - DNA, 385 bp, Rattus norvegicus
  Genbank Accession No. AA946344
atcgattatggtgcattcaggaacccaatccccccccaaaccccactaggagggcaccctcccttgccctcccaccctgcttaagggtcccaaggcttaaggtggaggaatgggatcaaaccatccatccatgagactgtccttggcctgcctgaccctcctacggattggggtgttacacttgggcacaagctcccacatgtcctcctgcttgtgcacatatacatattatatatggcccctcattaagctgctcgattcctgagaaggaaggagggataacctcatttaaaataataaaactgattttaagaaactaataaaaagcccatacatcagaggcaagtgggacagatgggaagcaggcaaatgatacctcagaccc

SEQ ID NO: 817 - DNA, 532 bp, Rattus norvegicus
  Genbank Accession No. AA946361
acaagttagaatcaagaaagaaaagacagtctgggggccaaccggagaggtgactaaaatccccaggccccaaatggagtggaagtaaagggaagagtagaaaaaaaagtcaatgtaaaaaaacaaaaagagctccctcttcttccctccccatggaggctggagggcggaccacggcgctacacccccagccttaccacctagcttaaataaattaaaacctcaaaacagggcccttagaagtgaacaggacagctgcagctcagggggcttggtgccaggcatatgcccacacccacccatacccttgccccacccccatcatcctcaacagggacatcacacccaacagggctaggaattcaatcttattttgtctgtgtccctgcattcctccccactgcagagccagctctcctatggaggggtgagatgaagaagcgtcacagcaagggaaaagtggggaagggtggtacaggggtccggtcctgcggagccttcctgccccatctggcctggcccttagcccgag

SEQ ID NO: 818 - DNA, 372 bp, Rattus norvegicus
  Genbank Accession No. AA946367
caataaagagcagaagtgagacctggaccagaggatgctctgccgtgctgagctttgcacaatcacccgtacactgagagcttgctttcacgcagggctccggagcctctcgggaacccctcaccgcacacagaatgccccgtgtcagggatatctgagactctaccagctagaatgtgaaagcaaggagtcatctctgtgaggcctgacaaccatcagctgctggcagagcaagacggaaaacaacgtcaagggttgaaaagtcttaaagggggagatgcctctaacacgtgccttgaaatgtcatcggtatcaccacagtactcgcacttcacaggaacacagggtccacagggtgcgagaagacgacag

SEQ ID NO: 819 - DNA, 658 bp, Rattus norvegicus
  Genbank Accession No. AA946368
  misc_feature (1)..(658): n = a or c or g or t
gaatttaagaacatctttaatgttagaaaccagttatttctgggtgattataaaagcagaatatattaccacaaatacatatttaaagccaattctagcttttgtaagattctatatcataatccatttattataaattacatcttttaacactataacagctctctgaagttacattagttgtggctgagcagaaagagaaaaacctactcagttttcaaaagagctaggcagcctggaacttgacaacatacttaaaataaagagctaaaatgtgctaaaaatagttcatttcatggcgaggaacagaacatataagctctgtgtaagaaagtaaaaagaaaaaaatatctgtgatacctggccttgttgttgccaaggacaccagagagggagaggcttaaacaatatattagcaatggttcatatgtgaattgttcatttttcatccttaaatctttaaaatgatgtaatacttatgacatatcatgtgctgacagtcacaaggaacatttgctataaatgaaagggtcaccccagacatgataacagtttacttcgatgaggaacaaagcgtttcttagaatatatacattcttgaaatttgccaacangaaaaaaaaatcagtaaatcagaaccaaagaagataattagttc

SEQ ID NO: 820 - DNA, 615 bp, Rattus norvegicus
  Genbank Accession No. AA946391
agcttgcggttgcttccagtgtttttttttttttttttttttttttttcctctgtacactgcttttattatttacataatacaatatagcatcaatgctgaataccatgattatgtgcaatacataaatatgaactatctgtacacatctgcaaatctaacttagaactaaagtacataaaattgaagcaaaactgaatgttttaataaagaaaaactaggactgaacactgcaataaatcataagtagtgccttgtgtacatacttaactatttacagatgaaaacaggcattaccacaacactaatctaactatactcatttatatataaaaaacacaagtttcatacatcacaaaaaaccttccattataacacagaagtgatattaccagacaagcatcagtgaagtatactgccttttctagttgttattgtacaatgctgtacataatgcagcccatgcaatacacccaagaacactagagtcctacacccaaatacaatatgataaagcagccctctgcaagtggtgctggataccactaaagaagtctactgcagccatgttggttatgattttccatgcacaagggtacagttacattaagaactg

SEQ ID NO: 821 - DNA, 612 bp, Rattus norvegicus
  Genbank Accession No. AA946411
cgcttccagtttttttctttttttttttttttttcattttccttttctttcctctgacaaggttggacatctaatctatatgtccctccagtctacgtatatacacacagctagaataaaataaatttaaatattatgaagaaaacacagagatacttggaataaatgtatacttcaaaccctgactagaataacaatgaggagatagtaatcataattacagtggcaataatacaagtaatcatacaacactaactttatgagcagcaagggacactcattcctgacctggaagagaaggggaaggacctgtggaagaatgagaagcttcaacgtgagcagacaagagatgacagacaaggacggccctcccagctctagagagtgctgcagcacagcagggcaagtctaggcccaccctcagttgagagagagccagtcctgtgggaaatgctgccatctagccgctggaagcttctgtgacagccaaatttccatgctgctggggctctagcagcctctggctcacaggctccaaaagctccttatcccgctcccaactgtcttggacagttttccagctatctcacttccagccagagctggttctga

SEQ ID NO: 822 - DNA, 435 bp, Rattus norvegicus
  Genbank Accession No. AA946412
gctctcagaactttattaggtggagtttgggcgacagaaaaccctgaaacagttgcccacctggctcaggacaactggtataaaggagcctttgtttggagacaggctttcactgagaaggaagcagatctttgatttctttataaaggagctgactggctgaacatctctgagacgtagttcagatttttttttaaatggttggtcagaaaagacaagtctctagagcaggaccagacccaaagcagaagcccctgctgtgcgcagacatataggcaccaggcttatgctggacaggggtcacttctatttccagattaagatttgttggaagggggaccatgacaaatgacaaaaggatcagtttttcaaaaacaagtatgaagtaattacagagggaaaaacataatggttcacagggagtgagataagtcg

SEQ ID NO: 823 - DNA, 594 bp, Rattus norvegicus
  Genbank Accession No. AA946428
  misc_feature (1)..(594): n = a or c or g or t
agatgtctggacagcaaagtctttattggtaggtagtttatgaacagcttacgcttatttcatttacaaatgaaatttgggaataattaaaaaaataagttaaagactccaatctacatacacacatccattaactattttctcctaggtcttagactagaacacaaagcaataagagctgtaaccttactttgaatagtgaggaggatcataatcataacttggcctttatctgggtttaccacgaaagcagttagcaaacagtgccgcacagttatgttttagtcaaaaatgaggttcagacacaatatggtcccatacggtcctatctctttgtgacatcataagcaccttatattttttaatatttgttcaatggaactccccggggtcatacttctcaaaatccatcccaacaagtggtgcatggctgcaaatgatgatgcttggagaggaatttagctgtctactcagtctgcaaatcacaatgtggtggccttagtagttctaatgacttacgtgccaggaaagggtcccccttccccatttgcttaaaaagatctagctgtgccagtgccanaagttacttacttt

SEQ ID NO: 824 - DNA, 652 bp, Rattus norvegicus
  Genbank Accession No. AA946434
gcaatgaagtgtttattaaatggttaaatagagtgcaaataaactttcaagttgtcaatgcaatttacataaccttatggttttttcatataatttaaaatatatagaaaagtataaaagttgtacccaaaagcccacaaaccagtacccaaaatagctagttattaacatttttttttgccacttccccagcagagccaatgaatttaaatgtagctcgttacctttggattagagagttcattagaatcagtgttaagcctaaagctcacgagaacactcagaaccaagagaggtgaaaaattctacagtgtagtcagggccaactttgaacttgtgatcctcctgcctctgcccccagagtgccggaactataggaaggtaccagcacaatcaacctagactgctttttaaagaaagatcactttcttggtctttaaataaaaagagttattgacaaaccatatgaaaaagggaatccttcatggagatggtaatcaaatacaacattcaggcccctcctctgtctacccataatcaatatggctgccatcaagcaatatctattgtagtatctgagttcccatctcctctggcaatcgtaggcacgcacttcaccttcagtgggtagaattcgtggtgctatgaaagg

SEQ ID NO: 825 - DNA, 616 bp, Rattus norvegicus
  Genbank Accession No. AA946439
atgttgcatggtgactttattgtgggtttccaaacctgaacaccagtcctcattcaggtccgctttgtcctataggaacacgaagcttcaactttaacttgaagagcatccgaggctgtaccctacaacgcctaatgggacccttgcagcctggcacgcaacattaaacgcctccgttaacataatcagcttggcatacaagaaaattcattcgcacagaccgaccagacacagcattcagagcgcttaccagttggtgggtggagccaccacacctagccctccaatgagaaagtgcacagaagagacttagtttgcatacgagacaatgcaacgctaataattgtagaccgtaacctagccagcataataagagttcacagctcatttttgatggtttgggggccctgaaaagggcctttgtgagtgggggagggggccaaggagaaggcctatacacacgaggacgccgatcaaccgccggagccatagagcgtgcggccctggcgcttgagcgcatacaccacgtccatagccgtgaccgtattgcgcttggcgtgctcggtgtaggtgacagcatcgcgaatcacattttcaaggaaaacctttatgacgc

SEQ ID NO: 826 - DNA, 568 bp, Rattus norvegicus
  Genbank Accession No. AA946443
ttaattggcttttatctccagaactctctatccatgcctcggctctagggttcctggacttgcatctccagtttgagggttcagaccagacagagaatatgcaagcagatgctggatctcccacataaggcagagaatctccctggcaagggagcccaggggttggcgcctctctcctgccaaaagcatgcagagggtcacaatgctgttcttttccatggggaacaccaggacttgcttgtccccaccggtgggctgtgggcatcagcctaggagtcactgcagtggtgatgaggaatggggaccaggcactggtgctgacagcgtggaatggtcaaacagtggattgcgcacctccatctcccctgttggcgccaggcctgggcactcgtacacagtgaagtcaccatcttcattctcctcatcggaggaggctgactccagttcctttggagggtccttatgccgctccaggcacagcatctgctgtctctggtgctgataatgatacatctctgcgctatgcgccagacgctcgtccccgggcgagattcgtggtgttgttggg

SEQ ID NO: 827 - DNA, 716 bp, Rattus norvegicus
  Genbank Accession No. AA946467
aaaaccttatttaataaaaggtcttaagatacagaacattcaaaagtaaataagttacatgggtacattacaatcacatccgcaagattctctttagtgtattaattttttttataaaaagcacacaaaaaataaaattttcggtctggtctatcacaactgtacacaaagaggtaatatttatatatatgtacactatttaatatgtaacagtcttttttaaaaagagtgccacaggcaacaaacacatgaaaggcagtgtctgaccattttgtttcaaaataaaaggaatatacttactttatgctattaaaatatctgtacaataattacagtcaaggctgtttctgtgctgtcctctccaacaaggcctttaatttaagagacaaatgaagaagagctctaacagctgcaaattttttttttgaggaaacaaacacagccaaatgtgggttagacacaactgttttttttataaaaatatgcatacttcctgtaaaaacctaagggtttaggctttgccagtctagtaataaataacaacccagaaaagtgagccccaataaaaacacttaaacagctgaggctggagtatgtgttgtactcttcccctccatctttaacatctggcacatgagaagaaagaggttaggtgactgaagcagttaaatataggcaatccctttagacatcatcggcacagggccctgtgccaa

SEQ ID NO: 828 - DNA, 577 bp, Rattus norvegicus
  Genbank Accession No. AA946475
cagcttgggcagcacttgtattcatcatacatttattagtgaatatccctctgaaatcagcaacaatattaaaaaaaataatgattgcactacttggtcaagcagaactagcaactttcattttaaaaaaagtccaaatctgttaaaaatttcaatcagtatacacatatatagtacaacatactagttatgttaaatgtatacacatatatagtacaacatactagttatgataaatgctacaaaccaatgtgagtccaatgggatggaaaaaccacacatttaagctttaagaaccatttgtctctatatattagcattttctcaaatacatacatgggaaaaatgaggtaactgtaaaatgtgcaaggaacagggcccccaaatcacgtgtgtttatatatgtgtgcgtgtgtgtgttcagttatatatatataaaccttttaacacagaacacaggcgctggcccagcagtgctggggaaggtgcccactgtcatgcctaggccagaagttggtaaatgaataaacaaaaactgctgttcctcacattcatgcaaaacgacagaggggaagat

SEQ ID NO: 829 - DNA, 535 bp, Rattus norvegicus
  Genbank Accession No. AA946532
cttgcggccgcatgtgttttttttttttttttttttttttttgtgccccatggtagtgggaaccaaaccaatcacaatgttttattggaacatattccatcatcacaggatagcatttattaaacagtggcggatttctctagctgctacatttattctcattcctcatacataccttgaggtgcatttgattccaggagagccatttgggttttctttagctaaataataaatgtacccgtctcagtcttttggactgagtcgttctgaaggctctcgtgtggacagcagtgtgtgcagtcgtgcttacagcccgtgcctgctccacatggtaccagtcttaccagtgcttgagagctcagacacaccctgctgcatgaagttggaggtctcgggagggttttagattttgtgacgggaaccggaaaggctcgtcagagtgtggctgtgtcatggtgagcaccacgtggctgtagaggcctgacatgaggtaatgcactgagcacacaacgccactgctgctgtctgtggctgt

SEQ ID NO: 830 - DNA, 422 bp, Rattus norvegicus
  Genbank Accession No. AA955151
tttttttttttttttttgagaaacaaaatggtttttgtttctatgtgcaaggaattacgtaggaggacaccatgaaaagctggggaggcgctgttcctctagctcatctctgaatagactacttcttcttcttttgtgccctgacctttgagccaagagcctgcagatctgagtacaggttccgtttcaggatggcactgctgcacagcagggccccttgcagggcccccatcagcccacaggtgaagatatcttggcctgtcaggtagaggttggggatgggggtttgggctcttagggaagccattgcatgaggatgcagacgagccaggtcatggtcagccccataagtagctccccggtgtgcagccagatagtactggttggtcagtgggtatcctccagtcaaactctccaccttg

SEQ ID NO: 831 - DNA, 395 bp, Rattus norvegicus
  Genbank Accession No. AA955240
tttttttttttttttttccgacagagaccctttactgagagcgtcttaaaacatccagtccttgatttgaacaagtttcaattcagctgctggctgacttaggtaaggcttcttggtgacaagaatacttcccatctataatatcaaaataggttcttgacttgtgtatgagcatcttcagggcctctgtcccatcttcttcagggttcgattaagctcttcaaacttgtggatctgccggatgaagaaatccccatagcgtcgggcaactttggtgtctgcgatgtggatcatgtccttatcaatgtagaagtccacctccgaggccgactggaattcgccatctagggcagaaatgccactggtccacaccaggttcttcatcttgtgcttga

SEQ ID NO: 832 - DNA, 298 bp, Rattus norvegicus
  Genbank Accession No. AA955249
tttttttttttttttttacaagagacagcattcatattttatttaaacaaagcatgtattagaaaactgtcatcacagagatgtatgtcttctgcttcactggccttgactaagcctttttcttgcaaacacctgctggggctgtatgtatagctggatggagcccttcactggttctagaccacgcaccacaagcatcacagggaaaataattcgtgtacctctgaggtaaattctacaaaaccaagagcattcagacacatgctttggatcacaaggagactgccctgagaatatt

SEQ ID NO: 833 - DNA, 582 bp, Rattus norvegicus
  Genbank Accession No. AA955287
tttttttttttttttttggtgataacagatcaactttaattctagcacctgaagctatacaagggtccactttataaacgtcatggggctgttgtacacattcagtaaagtgagcactgtgcaataccactgagagtctcaagaccaggaaaacactttgaattgcttaaacacaatccacagagttaaaaacaaaaccagaagccatccacagttacactaattgtcaagtagaggttttacatgtaatacttgctataacagtcaatatctagcggggacattgaacgtgacttcacagtctcgtcctgttgcgttctgttgggaagggtttctgattactggccaccagtggatagaacaaggaccaagccagcaagcaaaagccatggtcgccgtggcttccacgttctctttgtcagctaacggtgaacagtgagacttaaatactcatctttacatatacacaaggtgcgctgtgaaagcatattcgcttacaaacatataaaaatacttgttaactagtttgataagaaaataacgtataaaagtatatagcacaaacattaatcatctctgact

SEQ ID NO: 834 - DNA, 239 bp, Rattus norvegicus
  Genbank Accession No. AA955351
tttttttttttttttttatttgtcacagaatttaataaatcttggaagaaaatatgtattttcttaatacattttcttctttatccaaaccagcatgtagatattataaaaaagaatctatttacatggtgtagtgcacctccaggacgcaggacaaggcagaaacaagtgcaggtgcctgcttcccggcgggtgaggtgcggctgacagagctccacacaggaaccatcagtcaacca

SEQ ID NO: 835 - DNA, 524 bp, Rattus norvegicus
  Genbank Accession No. AA955382
tttttttttttttttttgcatttaaaacattttaatagttttatttggcaaagagaagcctaagaattttttaaaaaacatttccagagggaacactttttttttttttttttttttaccataaaataaactgtgttgtctggaagggcaaatctccagtgtatatattttgactctgccaatcttagaattagtacaaaaaagataatttgttgaaattctttaaaaatgtaaaaaccagtccaggcaacataactatacaatcttgctgtaaaagtacttatatgaaattctgccaaaatatttttcgcaatatactaaattcagtttctcaagttactcttcattggcggctggctttcccattttctgttgtctccatcccattttcctccttaaggtgttgatatagctctgctctgttattgacagagttcaaacgcccagcaaactcctggtgctttctggaattggcagtgtttattctgttactccacaaggataataaggacactggcccttta

SEQ ID NO: 836 - DNA, 428 bp, Rattus norvegicus
  Genbank Accession No. AA955392
  misc_feature (1)..(428): n = a or c or g or t
tttttttttttttttttagcataaaaagcatttattgccaggaacaaaaagaacagcacaaataactgcggaaggatcagattaacaatgtggtaagcggggctggggatttagctcagtgatagagcgcttacctaggaagcgcaaggccctgggtttggtccccagctcggaaaaaaaagtggtaagcaaggaagataaatttggagttgcaaatatttcaatcttaagtagtctaaggagaagaggaanggggtatgggggggcagagaaatataacctctggcacttaaataaacattaatctgctccagccgtactgaagagatcaggcatttcacgttgagtgccactgaaactgctcagatgctacaaatccacaaggaatcaacaggctgtattccatgaggtctgaagtttgccgtgcc

SEQ ID NO: 837 - DNA, 423 bp, Rattus norvegicus
  Genbank Accession No. AA955506
tttttttttttttttttagttttttaaatcattttttattatctcatgttttacatgcaactatgtgttcatgtgcacgcctgatttccgtggagagcccagaaactagagctcgccagccataagtcaccacgtgtgacctgggaattaacctgggtcctctggaagaacagccctggaagatggctcttatctgctgagtcatcgctccagtcccaagactgtttccaaaaaccaaagcacaacaaaagatgcaagaaaaatttccccgactacctttctgtaatcttcagacttcccatttaatttttatttaaacataaatttaaaaacttgtggtgtaagccttagatccagcagtaaggcagatctctgtgagttcaaggctggtctacatactaagttccgggaatgccagggctt

SEQ ID NO: 838 - DNA, 495 bp, Rattus norvegicus
  Genbank Accession No. AA955540
tttttttttttttttttactagaaatcatccagtcatttatttttgtttataccagagatataatgaacatattaaaaagaaaaaatgtttttataccaacatgtttttattgtttgtttctagactcctccatttagaaaataggaaccacggtttcattaagctgtggctccttttcctttaacctaagcttagtttaaggaaaacttccctcgtacaattatgtaactaactttaatcaatacatagtaattatgcaagcctcaatacagtagctaactttttgaaaatgacttaacacaaactattaacaactaccttctttgaaaatttctctatgcaagtatcagaacagatttacttctcttttaattttcatttcctattttttgggtatgccttagaaaagtaaaattacatataaacattgtcaactactttatttgtaaagtcaagataatggattatctcctctaagtaattaaattttgcaa

SEQ ID NO: 839 - DNA, 445 bp, Rattus norvegicus
  Genbank Accession No. AA955552
tttttttttttttttttaccactctacttacaacttttatttaaacctttcgatttccatccatgcctaaaaatatagaagcaaagaagaaatcctgaaatgagaactaaattgcattttctcctgtctaaagaggaaagaaaggagaaacgaaaacactgagagcgccacagtaacaacactgcctgacagcggccggcacagaactcgtcctatcagacaagacagcggaatgaagatggtctgtggacacagctgtctgatgaagccgcctttaatcgagttttccattctgaaggctgtccttggctttctcttgtctgatgagagagatgactttcatgcatccttttgtgattttgatcatccacatgatgttcatcacatctaaaacaatacaagaagagatccagacaaaatggactacagatccaagccttatgta

SEQ ID NO: 840 - DNA, 499 bp, Rattus norvegicus
  Genbank Accession No. AA955553
tttttttttttttttgtgatgccacagatttattatagcacagagaacaagttcaaattctcacaacttccacagtcactaaaaagtaaacagaaataagagatagccaagggatacaatctcataatttcccaaactatgaaacaatgtagcatactcaaattataattctcgttaagtatgaagacacaaagtcctgataccccataggtaattaaaattttgtatttataacatatatattgggcctcaaggactcacagaacttttatagtaaatgatacttaatagctgggtgttttgcttattaggcaagcaaatttaaaggcagtaaagtccttctagcttcctttgggtcattgccctgtttgagtctttgggaattgcttgtgtatgtgacagtgtctaccattccgtcccatcttaacccaggctgggcacacagagtcaaagtaagaaaacacgaatccctgagaccttcgaagtaagatataagctt

SEQ ID NO: 841 - DNA, 485 bp, Rattus norvegicus
  Genbank Accession No. AA955573
tttttttttttttttttgggcctgctctctttattggcatcactctttgagggagaagtgcatcttgtccccaatcatcttgcgctcagggttgaggcgcttgagaatctgcgccagcacattcactgtctgctcgctgctcagccccgtcttcttggtctggaacttcttcagcaggtcctttgtggtcatgggcttccgggtcaggtagcaaagttgactttatcagctgcattaaaagccattatgttgtatcttttggctgtgttcttggggactcggacgacgtactcagtgacattctggctgctggagcctatagccgccatggccgttgctcaagctgctccgggtcggccagacctggatggtcttggctgtgtccctcggacccatggaaagcacctttcctggttgtcacgttagtgtgatcctgtgctttggatttccagacccttaagtctcctagaatgctaatctgtgtc

SEQ ID NO: 842 - DNA, 416 bp, Rattus norvegicus
  Genbank Accession No. AA955600
tttttttttttttttttcagaaggaaatctctttaatagcatagcaacattaggtctgggagccaccagagggaaacattggtagccaaccacgatgcaatgaattgaatggtagtacccaagagcgggagcaggaagttaaaccagacagttctgctttcttttgccgtctgatctgcagcactgtcaggaggcctgtcctgtggctgtgtccaaacaccccacaggactcactgtcccaacaatcctaattgcctagaaatatctttctcttacctgttatttatcaatttttcccagtatttttatacggaaaaaattgtattgaagacactttgtatgcagttgataagaggaattcagtataattatggttggtgactatttttatatgtacatgccaacactttactact

SEQ ID NO: 843 - DNA, 348 bp, Rattus norvegicus
  Genbank Accession No. AA955729
tttttttttttttttttgaaagtcagacatgacttgtcagcctttattagtcaagagtgaagccgggacctagagtttcctttaaaagacaaacagtcaaccaacccaaccttgtttacagcaaatgatgactgatttcaagtgagttttaattaaacgtttaagactacagatcaagaattgtttgttttccagtcatatgttcgtttgagattaaaatacaagtgtaaaacaggttaaagttagattcaccccaatgatttattccacaagtccaattgatagaatttcaagcacgatgtctagaactcaggaccaagggacaaccatagaatcattttacctttg

SEQ ID NO: 844 - DNA, 477 bp, Rattus norvegicus
  Genbank Accession No. AA955741
  misc_feature (1)..(477): n = a or c or g or t
tttttttttttttttttgggtttagcagatactataattttataattaattatacaatccatgtagcaaatgaaaaattatacagatgggccaagggttataaataatagtttacacagaaactgtcaatttacaacacagcactgtgtggtttctaaaccgcaagcacaagacgtcatcacacagatccactgcacaggtacagacaggtccatgacatacagagtaccacctgaaacaggccttggtagccgctccacttctcagaaagtagcaaatggtaaatggatggagtacattttggttcaaaatgtcttctgaaacgtttgagtgtgggaggaaattaagactggggtangagccactggggaacttctgaattcatttttggttctttctcaattattttataaaaataaaataaaactagaaaatttgataaaaccaagggttaaaacccctcaaaatacatattag

SEQ ID NO: 845 - DNA, 531 bp, Rattus norvegicus
  Genbank Accession No. AA955786
tttttttttttttttttgctaggtaggcccaggccagccagccttgaacttactctgtgtagcactggcttacattgaatttgtagaaatcctcctacttcagcttcacaagtactgggacgacaagtgtttaacactatatctatctttctaaattttttattgtttttatgtatgtgggtgttttgcctgcatttatgttttgtcaccatgtgtgtgtctgaaaactgaattggcagaagggttagcagtggttgtttctgtttttatggccctggtggcacagtggctgactaaaactggggtaactattgctagaagaagaaaaaggacagagcacacagtatgcaggtggaaagtgagggagatactcaagaagtggtatgttggggtgatgtgtatatattctgagtcttgtcaccactgaactgggcatgtttacagcagcctccaaggaatgcacctaaggccaaaagccacggatctcagttgcagctcaagatcaagggagtgttaagttcagccaagtta

SEQ ID NO: 846 - DNA, 208 bp, Rattus norvegicus
  Genbank Accession No. AA955914
tttttttttttttttttggcagattagtcctttaatagaaaaatcccctggaaaaagtcaaaagccacatgtgcaacagtagcaacaacacacatttcctcaatccagacagtccagtttcaattcctcgccttgggaagtggcctgtacacacctacaaccacagcgtgggctcgttcaaaagggtccaatgtcaactggtcctgaa

SEQ ID NO: 847 - DNA, 227 bp, Rattus norvegicus
  Genbank Accession No. AA955962
tttttttttttttttttgggcttttacaaatctttatttacatttcaaaggaatctgattgtgtctgccctagatggccagcaacgacggccaccatgcacaggagcagctcaagggacacagattctttcattagccttcacgatccaggtcacagccacctcggcctgaccccctctgctgcagattcagagctggggcagctcgcttactcatctctctgggag

SEQ ID NO: 848 - DNA, 479 bp, Rattus norvegicus
  Genbank Accession No. AA955980
tttttttttttttttttgcaaagattcaaccatttaataacaaaagcttcccacccttactcctcgacagcatcctgagcacaggaagggcacagctatgtaggaggctgtagaaagctaaggaaaatgaggatgtcagatggattcctgggttaagactgggtcgggcacagtcccctttggccagacaatggcatgaaccacacaggaggctggggctggccacacaccaccaaaagcatgacagtgctggctgatgtgtctgtgtttcactagctgcttctgccaagtccaaatttcagtgagggacgactagagctcacacaggtcttgtcctcttggcctttttctcagacctcacagcgtcgtcatgggctttcctcttctctgcaagcttgttggcctctcggattttgcgccgcttgccaaacatgatcttttgataaaggtacttctctcgcttcttcatcatcatgatg

SEQ ID NO: 849 - DNA, 371 bp, Rattus norvegicus
  Genbank Accession No. AA956111
  misc_feature (1)..(371): n = a or c or g or t
cggccgcggagccgctatgggcccgccaggcccctggcgtggcgcggcgcaaggaccggctcagagccagaattgaaactcaaagatggatgatcaggatcctgggggcattagcccccttcagcagatggtggcctcaggagctggggctgtggtcacctccctcttcatgacacccctggatgtggtgaaggtccgccttcagtctcagagacccacggtagccagcgaattgacaactccctccagattctggagtctttcctacaccanatcaccctccactctacagtccccagggaagtgcctcctgtactgcaatggtgtcctgnagcccctgtacctgtgcccaaatggtactcgctgcgcca

SEQ ID NO: 850 - DNA, 354 bp, Rattus norvegicus
  Genbank Accession No. AA956114
tttttttttttttttttaataaagtaaatgtaatgaattaggaataaggtgataaatgcatcaatatacatttttcttatggccagcctcttctgctctaccctgagtcaacagtcacgccagctttgttctactattgcagaaacacgcttttcatattcccgcttgttctcctggtacagctgggcagcctggctgtttgctggactattgggattaggttcatccaatagagactgtatggatgttaaaatggaagacacatcataggttggactccaacggttctgaagtatatccagacatatactaccatctgcatagacgttagggtggaacatcttagacacaaat

SEQ ID NO: 851 - DNA, 473 bp, Rattus norvegicus
  Genbank Accession No. AA956164
tttttttttttttttttatctgtagagttgttctgctttattacagctctgcagatgaaggatgcttaaagacatctaatgaatgcagaaactgaagtcatatccttctccaagctctgagtaagtggaaccagttaccaaacagctgcttttattccagcatctacaggctgtgagaggacgagcagtaactgcagacgcagtactacacaccctttatttaatcacagtggtaatggtacagtttattcttcagattctccaggcttacggatgtcatcaatcttcagaatcatcctaaccatctgtgtggcaagagagatctgctgctttttaccaatcaaggtttctatgacatgctgatactgcatatcattactgcccttgtgcagacagtcaatccccagggcaaggttagactccttcacttgtctagctcggacttcagtcatggtctggatgggattcatgcc

SEQ ID NO: 852 - DNA, 392 bp, Rattus norvegicus
  Genbank Accession No. AA956170
cggccgcaattgtttttttgtttaattctttttttttttaaagggttatctgcggtttattatgaaaggaaataaagggtgggatgtggaagtggttgcccctggacagactgggttgggtggacctgcacccacatagcactgtcactgtgaagatcacagaagaccaacaacctccagattggtaatgttgactttagcgtctactcatatagccagtgtcccgcgctgtcctcccagcacagaagctcatcctcacggaaccaaagagcgatctctctctgagcactttccaccgaatcactgccatgaatcacattcttgccaacctccacacagaaatcaccacggatcgtaccgggcgtggcgtcccctgggtcagtggcccctat

SEQ ID NO: 853 - DNA, 400 bp, Rattus norvegicus
  Genbank Accession No. AA956311
  misc_feature (1)..(400): n = a or c or g or t
tttttttttttttttttgagttgcctctatttgctttatttggtgttttatacaagtgactaaaataaatagagtaacaaaggcagctacacagtccccaacacaccatcagcctccttggactgctgtctanggtacccagcccaacccttcctcttcccagggtaccactgaccaccacccaccctggccatgaagctgactaacaactggaggtggtggtcatattctgggcttagaagggacctangaaagtgtatatgaagggactctccatataaaagaagaactgtctatttaaaaaaatactcccccaaatataagaaagtctattttaaccccccaaaaagcttataaaaaataaagctaaaaataaccaaaggtccccatctacccctga

SEQ ID NO: 854 - DNA, 448 bp, Rattus norvegicus
  Genbank Accession No. AA956328
cggccgctccactgtggccttgaatattttatatgtatgtggttaggacaatatgtgcactttgctcttagagatttttttttttttttttttttgtccagaagataaaagtaggccattcatttaatttttttgaaacccaaagaatatataggttttgtacccagggaattataactcatgctgatgtcaccttaatgccatgccttgactcagttgtttgcatgatttccaatgttaccagatggatactctcttgtgctacctctgagcttgctatagacacaaaggctgtcttctttgcctgtgcacgcgcatccttgggtatgttttaatgttttccgtgtatgctttcatacataactatgcactataaatattaaatgggatgacttatatgatattgaaaataaagcctcattcacttttaaaaaagaacctcgtgccg

SEQ ID NO: 855 - DNA, 456 bp, Rattus norvegicus
  Genbank Accession No. AA956379
tttttttttttttttttcatattccatttttttttagtagattttctttcctggtaggcagtacccttgggaatgaaactgtagcaggcataaggtttctaccacagggacatttgtactgagactccaatataaatatttctagtcagacatttccatggctacagatatttggttgcttgatttatgtgcatagaaagaaacagttgtcaaaactgtagagagcagtccttaacgagtacctttagatggctggccagtcttcctttaatactgcaatacggcctactggtctggaaactagtcagagcaacaccctctttaatcttgtattcctgtatttttagccttcctgtcgagtcacggaccacgttatcataaatcattttagcactgttaagggtggattatataccataatgattttcagatctctttttataaaaaaggtttcta

SEQ ID NO: 856 - DNA, 451 bp, Rattus norvegicus
  Genbank Accession No. AA956405
tttttttttttttttttgtaaacatggcaatatttaatacagtatctattctaaaatattttcatgttcatgatcacattttgttatacctgaaattgaatttatacacattaaagaattactagcaatggctgcttactttacggttaaggaccgggggctagggctacattttattatctcagaaacatcttcaaggtaaaggtaaagcttgtctttgattggttcggcgtatcctttttttgtatccagatttaaaatgaagactgacacaggaaatagctagggccccttctaatttacaatattttaaaaaaaatcagtttaagattctcagggaaagtgtctgttgtgaattaaaaaataaaaaaaaaaaaaaccttgcaaaataaacttaatgaaagaagtgttggagacagttgggtggagagccctggccgtcagtcttcct

SEQ ID NO: 857 - DNA, 426 bp, Rattus norvegicus
  Genbank Accession No. AA956431
tttttttttttttttttaaccaaaaccatctttatttttttagtctttaaaaaaacaagacaaaacaaaactcttcttttcccaaaataaccatgattagcttagaaaaatggatgtatatcttcaaagtgtttccctttaacggaaacttcattttatagaatctaaacattaaaggtttgaaaaacacaaagccagaatccagcataagtcaaggaaatccactcatacttcaggcccttctcctccaggaaccagcattgttatattatttccatttagtagaatttgatctaattttgtaattcttcttccttctggtgtaatttcaaactctgtgacatcttccaacaccatattgacaaagtcatcaaatcctaaaagtgtacccacgatttctttatcactcttcatcacaatgtgaat

SEQ ID NO: 858 - DNA, 513 bp, Rattus norvegicus
  Genbank Accession No. AA956460
tttttttttttttttttaagcttctttaatcccagcttcactttctctgtcaatcctccttaggccttaaacagatcttactggaatcccctgtatcactcacatggagagagagaaagtgctaagagcactaattggttatattcagagtggtctgctcatggcaactgtgggacacagagaacagctacactgtcctcctttgtatcagacctccacggctcaagactatggacacgctgcccacagtcgactcaagtctttaagcagctctttaactctgcacaagacacttgctggctgagaataaagcaattgtcagagcagtggctgggccctgcccctgtccacgcactctcagcagcaggaagactgtttcgtcactgatgtttagcttattaaatctaccgtctgcaaggtgcggcagcacagccggctccgatgaccactgaaggaggtgatgatagacacagagaacccaacacgagtgtgcagctcagtgtgctgagtcca

SEQ ID NO: 859 - DNA, 507 bp, Rattus norvegicus
  Genbank Accession No. AA956517
tttttttttttttttttaaagcaaaatttgtaacacctatttattttgttgaggagctttgccaataagaacatttaaaacatttaaaattttcaaacttgaactttccttagaatagttatatagattgtcaccaacctgttcttttttttttttttggttctttttttcggagctggggaccgaacccagggccttgcgcttcctaggcaagcgctctaccactgagctaaatccccaacccatcaccaacctgttcttaaacaagaaagcccataaaacactgagaagtgtataactggatagaatgtcagggagaccattgcacttcagtgccaggggaagaaagactaaacgattagcacaaaggtctcatttcagtgaacgaagaagcagctggaagagaaagagcatacggtcagtgcagaagtggtaagcattaggtgggactgctggtgtcagtaatgcagactgaatcttctcgccctgctttcacatctcaagctg

SEQ ID NO: 860 - DNA, 207 bp, Rattus norvegicus
  Genbank Accession No. AA956693
tttttttttttttttttcactcacccattttttttattggattacttgactttgccaacttttttgttccctgtacagtttggacagtggaccccgttagatgaatgccggtcaagttcgccctgaaacgtgacgactaaaatttcatgcgatctgagtattccccggctatgggggctctgttcacaaagaccttgcttctgatga

SEQ ID NO: 861 - DNA, 470 bp, Rattus norvegicus
  Genbank Accession No. AA956733
tttttttttttttttttaagaccagatcccaggtcgggctgtctttattgaatgcactcgttcatagaaaacagaattgcaaccgtagcatggaggaacacagaacagagctcagaaacaaaggcccagacctgcctcttctcccagcccaagagctagaaaaccatggtggagaggactcttggcatctggaatggacctggtggagtgaaggatagccaaggactagagtggccggggcctagagctgggtgactctgtaaacgccaaggaccagagtggccaggggccagagctgggtgactctgtaaacgtcaaggctcttaggcctatgtgactaacacagaacttggctaaatactggacggaaactcagaaaccagccctgagtcctttggtgagacaggactaaggactcacagggacttggcatgtccctccctttctaagacaggcactgggactcctgc

SEQ ID NO: 862 - DNA, 310 bp, Rattus norvegicus
  Genbank Accession No. AA956820
ttttttttttttttttaggaaacaagccaacttttaattaaggacatatactccaccaacatgaaacaaaataagaaaaaaaatacaaaagaaatacaaaggcccctcaatattagagaaggagcagattgatgaactcaaggcacaccctgggtccttccctatctggcacaggaaggataacttggaatgagaaggaaagagtgtgggatcaggttgggtccaaaggcagtattggagggaggttcctggacttctgctcgtcaacagctgatagagggatgggggaggatgcctcccttcccatcca

SEQ ID NO: 863 - DNA, 338 bp, Rattus norvegicus
  Genbank Accession No. AA956841
tttttttttttttttttctgtaaccacttacgttttttattagttttttttacaacaaagcacttttgatataatttaagacacacatgctttgattgaagagtgactgtaagtgagtccaatcttcttctacctgtgatgacaacttcaccagctcctctaaaagcactggctccgaaggaagcattctgaggtgtaacttcagaaatttgatttttgagccaaaatcccaaggtttaccaccttagactgctgggggtcactggtgggttcaggtacagcaaacctggggacaagcccgggaactgttgggatgaagaacggagctgactggggaa

SEQ ID NO: 864 - DNA, 411 bp, Rattus norvegicus
  Genbank Accession No. AA956930
tttttttttttttttttaaatatactaatctttttttaaaaaaaagtgttttaaatgcattttccctgaagatttccagtgtattccataatgcttaaaaaatagtctccccaaaaaatatatctttaaagcatttgacacagtggtattgtggtatatctggcattggacgtggcaaagggtcctgtcccactgccattgtcagtgtgaggcccaaggctggcaagccaccagcttgacacacccaaaggcccggtatagcatcactcaagggtgtctgggatgctggagcttcgaagggggtcaaatgttggcttccagtgctgagcctctggcataggcttagacaagatggctgcataccctccagggtggggaagactaaaagctccattcacgcctcgtgccgaa

SEQ ID NO: 865 - DNA, 425 bp, Rattus norvegicus
  Genbank Accession No. AA956958
tttttttttattgtttttttttaacgtcattaacttgtgttatttgctttcctttaaaacacaaataaatcaaagccattaacctgaacttgaggtatatacacaatacatattcaactttaagtaaaatactttccataatattattacatttttaaaaactggaaacagtatccgtgctgatccgtatttgattcaatgtaatgaaaagggaacattcacttggggcaaggtgggctcgtcgaggaaatagagctccaagttcaaatgtcttcctctcccttgtattcattagaactctcccatgtccggagaggattcatcatgagaaaataccagtcacaggtttggaaggaatgagagagcacacgaggtggtgacatttcatccgttttcaaataaatggtcttaattttcttcatgta

SEQ ID NO: 866 - DNA, 480 bp, Rattus norvegicus
  Genbank Accession No. AA957063
tttttttttttttttttaaatgtaaggatggactttattttaaaaaaaatctttttaggactacaaattacaaaggaagcagatcactacacagaatctaatgaatacatttgcctgtgcataaaactttatcaaagtcattcattttacaaattcaccccacccgccaatgttttcactataatgctcttaaggttactatacctttatttcaaattatattacatgttattctcaagatagactttaaataccaaattcttggcttctaagaatggcaccttcaaaatgggcaatttccactcaagtctctggtggcattattcttactattttcttttaccaattaaaaaaaagttcaaaatgttcactttcagcctttgccaaaaggtggctacatcttcccctaccaactataaatggatagcaaaaagaaaagcaacgaaggcagccattaaaatagattaatcaattgaagta

SEQ ID NO: 867 - DNA, 461 bp, Rattus norvegicus
  Genbank Accession No. AA957132
  misc_feature (1)..(461): n = a or c or g or t
tttttttttttttttttcccttgacaagaggagtataaccctcatcttatgatttgtgcactagaatgccacttgggggaaggccaggacaaaaagagaagatctatagatccaagaggaaacactggcagaatggtatagcccagggcctgcaggctgcctcggctcatcatacggcaaggagacccaggagggaaaggcaggtgccactaattccagctaggatcatagccattccatgtctctgggggtgccaggtggacacgccgaccccggaactggaaagtgacaatgccacggtagccagctctggggacaccagacttgaggtcgtccatgacacccagggccttagcaaaggccttaaagctgtctctgctantgtactgtacccgcacctcccccagttccttccgatcattggtcctcactttctccacctgcagctggggggcaccata

SEQ ID NO: 868 - DNA, 155 bp, Rattus norvegicus
  Genbank Accession No. AA957244
tttttttttctttgctagatcatatggtgcttttattgatgcctgacaattgggcaagtccctttctgacaacagagcactatgttgaatcctgcctgcaagaaaagctgctccaattcacttaaggagctggatggcagtgctcaagggggcca

SEQ ID NO: 869 - DNA, 430 bp, Rattus norvegicus
  Genbank Accession No. AA957270
tttttttttttttttttaaagttaaagattcttttattaataagtctccctcccctccaaactttatccccaaaataaatatcacccccttgggggatgggttgtgtttgtgtgtactgggaccagccctcccagagggccagcccccttagtgttatgaacaggtccctcaatctaacccactcccagggctaaaactcagggtagtggcatttcagtccatccgagtgggtggaacccagtgttgtgtctgcccctcaagtcggccaggcctccaggacttgtggggagcaagagattcccttgtgcaaatgctgcagatccttagtatgagtcgctttgtgacctagcttgaggctctctgtctgccccagaaccagagacagggcaattagacaccctggaaggctcccctgaaccctaagcccag

SEQ ID NO: 870 - DNA, 441 bp, Rattus norvegicus
  Genbank Accession No. AA957307
tttttttttttttttttcaagcctggggaggagactggggaagtcttgtgccctccccagagatgctttattgcgtggcttcaccagtcatcagtgaggagaccctgggcccattcgagatgatgggaacacccgcgcagtacccggcagatggacccagatgctgtgcagtcagatgggacagggtgaggagtggtactcggcctctctgttccagggcagacctgggatcccagcaggcagcaagtaagtctggcaaactgggaggaggcagtgttcaggcctcagtgacctccatgttctgcagctggttctccagggtgacctcttttgctttctttttgctgccttcatgttgcttcttctgcttcttagatggctcctggtcaataggtgctggcttcacaaatgggatcagttcttgcctcgtgccgaattctt

SEQ ID NO: 871 - DNA, 216 bp, Rattus norvegicus
  Genbank Accession No. AA957313
tttttttttttttttttgtcctgataaatacggaaactccgtctttattggttgtataaacatctctgtctgtacatacatttcatatatcatagtgcagggcccgaaaggaggggcaaggggagccccagcagcatgacaacgaatccctccccagtcccaccactgtgcaaactgagaccctagatgtgttttaggacagcagccagtgaaagg

SEQ ID NO: 872 - DNA, 463 bp, Rattus norvegicus
  Genbank Accession No. AA957319
tttttttttttttttttgaaaaagttttctctgtgtaactctggccatctggaacttacttgtggtccaggctggcttgaacttagagatctgcctgactcttgagtgctgggattaaaggcaaacaccacaacacgcagtgcaaacaatattttcaaaagatattaaggaaatctcctttgataagcatcataaatattacataccatagctgcaccaacagcaattccagcaaagcccatctccgatatgggagtatctatgatcctcttgtcaccatatttcttccacaggcctctgctaaccttgtatgcaccatcatactgggcaacttcttccccaagcagaaaaaccttttcatctctttctagttcttcatccataccttgattaatggcttcacgaactgtcaactgcaccgccgcgggcgccgagcggtggaaacgcctcttcagcagcccgg

SEQ ID NO: 873 - DNA, 543 bp, Rattus norvegicus
  Genbank Accession No. AA957323
tttttttttttttttttcatagcaaaactttattgaacagaaaacccggcaaaggctttacctgtgccaagtcgccgccctcagtaagtaagcactgcgttttaaaaagcaatgatacaataagtctctcctagaaaagtcctgctaacatgtctagcaagtcactgattatataaagtagtacacttagtgtaattgcaacattccaacaggaatcaaatcgaaccagcagaaccgtttctgcatctatgacttccatgtagagcacacatgcacacacgtctatgacttccatgtacggcacacatgcacacacgtctggggaggtgctcaggcagaacatgcgaccctgggccttctgtttacagtgcctatgagactacatacagtatacattaaagctcttcagaataacgacatgaggggccctgttcagtttgtaccacggcttcatgtcttagtttgtgcttttgcttggcacagaagcacatcgtcatcctgtgggttttcaatgactctctcgagtccacgccaggggacgat

SEQ ID NO: 874 - DNA, 265 bp, Rattus norvegicus
  Genbank Accession No. AA957335
tttttttttttttttttaaaaaggtttctgtaaatattttattttccatattttagaatcagaaagaagcatgtggtaataaaaataatagagaattattttcttcagatagtcccgctctgctgcgaaccgccagcccctccagtccagccccttccagccagctctcaccaggcctcgcggctctctcatgagcagccgctgacccggtatcagtcccactatgtacagatatattacaaggcaaaaagaaagcctcgtgccg

SEQ ID NO: 875 - DNA, 446 bp, Rattus norvegicus
  Genbank Accession No. AA957491
  misc_feature (1)..(446): n = a or c or g or t
tttttttttttttttttactccaaagtaatcaagatttaatgaatgacatcagtagaacaagctcaccagtttttcagtgcctggaaagtgggtagtaagtgtagaacaagtacttcgataggagcaatacaacacgttatcanattatgaagacgagaaaacattttcatacgagatgccttgtgagcagtacaacagtttccaggacagtgaggacatacatacacagactacatagaagctgcttcactttctacgattcttttgagtattaaacccaggcctcctttggcgacttgcagcggtgtcttttcttccttattttcaatgtaaatacttgctccttgggtcaccagcaattttgcttcntccactctctcctcatcacaggctaagtgtanaggagtgttaccctcagtatcttggatgtttgtggatgctttgt

SEQ ID NO: 876 - DNA, 553 bp, Rattus norvegicus
  Genbank Accession No. AA957510
  misc_feature (1)..(553): n = a or c or g or t
tttttttttttttttttcctctgtccatttaaaatgttttatttttcttttaaactagattgtgaagtgccactgaataggcaatgttggcaaaacaatgtctgttacaataaaatacattagacatttaaataaataaccttaaaaactaggcgaagggacagaaacccagtcgattggatctggagcaatgttttctgcacaagcgagacaggcaaacctcgtgaagacagatgtaaacagaaccatcagacctacagaagcagccgagcgggccagggtgggctgggggtgacagaggctgagggtgcanggagtggcaaaccaaaaatactgactgaggtagcaggactctgctcagtgcagaaaaattggcttatgaataaaaattagactgtgataccaaattaaatccagagaatcatgcaaaagacacaatacatgctatttagttttttttcttttaaaaaccacacacattcatttcctaagtctgctgccaattaacttgctgacaatgtctgctggctcaacgatccctcgtgccgaattc

SEQ ID NO: 877 - DNA, 339 bp, Rattus norvegicus
  Genbank Accession No. AA957535
  misc_feature (1)..(339): n = a or c or g or t
tttttttttttttttttgacatttcccaggcaattttaatacattcgcccaccaacacaaaaaccctaaacttgctccctctccctcttatctgagactgggaataaaacattcaacacggaagtaataaaagtcgaagcagacatccaagtgcaaagggaaatactgagcacacagtagttttcttgtatggtcgtttaaagtcacagttatcataaatacttacagaaaacactaaatcccctactttgtagacaaattgttttaacagaacacaactttctcncgttggcacacagtgaacaatgaacaagcccgcttggaacacactattagcaa

SEQ ID NO: 878 - DNA, 507 bp, Rattus norvegicus
  Genbank Accession No. AA957624
tttttttttttttttttggtacacactgaaaataaggagaacgaagttgaagaggttaaggaagagggtccaaaagagatgactttggatgagtggaaagctattcaaaataaagaccgagcaaaagtagaatttaatatccgaaaaccaaatgaaggtgctgatggacaatggaaaaagggatttgttctgcataaatcaaaaagtgaagaggctcatgcggaagattcagttatggaccatcatttccggaagccagcaaatgatataacgtctcaactggagatcaattttggagacctaggccgcccaggacgtggtggcagaggaggacgtggtggacgtgggcgtggtggtcgtcctaatcgtggcagcaggactgataagtcaagtgcttctgctcctgatgtagatgacccagaggcattccccgctctggcctaactggatgccataatacaacactggttcctttgtggaccctcctgttcaaagcttttgcatgct

SEQ ID NO: 879 - DNA, 377 bp, Rattus norvegicus
  Genbank Accession No. AA957640
tttttttttttttttttactgaatagctgctcaagaggttcattgacgatagtccatgggaagcacagagaagaggcaatcacctaaaacacccaacccttacatagcaaaggttaagcaataacttaggactcctcgtgggataggcctggggtggggcaggcgtcattcactcctgtccttgggctcccggtagcgccactggatgtaatcgaaaatgtcctgctcgctgtccaccggaaggggctccccagcaaccccagtgacccccagggggcggatggtgtactcattgattgtgaagcccttttccagggcatgcgctctcatattcttattaaagatgtcacttccagtgaagtagagaacaccacagt

SEQ ID NO: 880 - DNA, 288 bp, Rattus norvegicus
  Genbank Accession No. AA957649
tttttttttttttttttcctacaaaatattttatttgttatcattgtcagatagggtcttgctgtgtagcccaacctggcctggaacttgtaatcctcctgcctcagcctcctgagtttattagacatctcagaacttctcagacatccgctctgcggtcacagcaaacgaggtgcaatctcaatggtgttaatccggaggatggtctgtgggttcacaatgatttttttcttcctgaagtttttccttttcctaaatttcatgttgattttgggccatgattctgtc

SEQ ID NO: 881 - DNA, 435 bp, Rattus norvegicus
  Genbank Accession No. AA957666
  misc_feature (1)..(435): n = a or c or g or t
cggccgctcaggctcaccacaggggaacagcgcccttgagtttcagccttaggaaaacaaggttatcgtagttgggagactgtaagagcagctcttctcaccagcagtgccatctggttatctggccttgtctcacttgtgctggcagcagctggtctgtttgtccaactggttcctggttagttcagtgctagtgttccgtggggttgcatgctttgctcctgcttgttactttacagaaagctgtcaggaacaggggacccaggtgctgtgtcctcagagtctgggggtttgaagcagtgtttgctgcactgacccaggtcatactgtgccactgttgcaaccctctctgcctgccactgaggagtgaagctcccgggcagggcccangaaagcaccctttggcagcaccagggaactgagcttctcaaagat

SEQ ID NO: 882 - DNA, 159 bp, Rattus norvegicus
  Genbank Accession No. AA957682
tttttttatttttttttcagggccaaagttttgtttttaattcaaaaaactcatcaataactttatgacacgattatttataacaacttgttaatcacaagctcaccaagaagaggcaacttcaggagctaacacacatgtcctgttttcattattgtc

SEQ ID NO: 883 - DNA, 265 bp, Rattus norvegicus
  Genbank Accession No. AA957683
tttttttttttttttttacactttgaccttttattaaggcgagtttgtgaagataaatttactacaaccaaaccccttcatgaaccttccgcttatattttttcaagacacacacaagagaacatgtcctgtaaagagccactcagtaccagaactaaaggaaggagagatgctgagccgggctgcgctcgccctggtgcaggggcttgctactcgtcatctttagagccagatttgcttaaatgcttcacgacgtcaacccagt

SEQ ID NO: 884 - DNA, 555 bp, Rattus norvegicus
  Genbank Accession No. AA957708
tttttttttttttttttctgccagacagtcttttattacatcataaaagcaacaaaaggcactagatcttgcaaaatatgctctgaccaactttctgaaattaaaaatgcataaccacatctgtaagatttttaatgaacaaaagagttaaatacaaactttcatatgcaaaatagatgactgtaaacccggcaacctcagagccgagcacgaatctctgcgaaggctcagtggggctggagtagagcatgctgctgagccagacttaattcagcttcatatatatttaaaaaaactctgaggaaaaataggcttaaattgaggagcatctcctgaaatacagctcaagccagcccttaccactgtgagcgcaggctcaccaacctcgggtttgacatttatggtcacagttactttgaatccagtttcatgaggaagccaagctacttcagttctagagaagaaagtcttgaagatgagtgtgccctgctgtgaagactcacggaccacgttccttggccactttccatgaactgtgcccgtgtcatagcatca

SEQ ID NO: 885 - DNA, 546 bp, Rattus norvegicus
  Genbank Accession No. AA957770
tttttttttttttttttaatagaaaaataattacattttaatgtatatcagtgatagaacccaaataaaaatactgttattttcatagttaaaagtttcttaaatcagatcttctttcaaatgttttcatgctttaattagagaatcagtttattcaaagtcattttatttacagtcacaagctttgttctgtttttaacctactcaatgtgtgtgttcttcgtgggatcaaacacctgactgagttgggatcttatgaacacagccaggacagcagtggagagagtcgtgaacaaagacatcgcagtccacacagaagacgttccggcacactgtgcaaacatagacatgttggtctttcaattcaccctgacatccataacaaaacctctctcctttatattcttccagggggatttcttgaaaagcatccaaaggaaataaatgatgataagatcttgccaagtgaggtgcagacaccaaagtaagaccacatattttacattcgacaggaagctcacagtactttgctcgacactgtgggca

SEQ ID NO: 886 - DNA, 447 bp, Rattus norvegicus
  Genbank Accession No. AA957896
  misc_feature (1)..(447): n = a or c or g or t
cggccgctgtgcccacagggacaaggacacagactgctgagcgatggctgtcacactgcagtacgcgtgggtgtgctgggctgcttcagccgcagggttctgcatagccagccagcgaagtccacgtcctccccctcagagcgtttgatgaaggcatggttcgtcagcagcttgaggtctgcacgctctgctgggttcttaatgagacatttattcacaaactcctggaagtctgagctgaacacaccactgggcagcttgggaggtggctcattcactatgtagtccagcagccgttctggggacatgtangagcgtgtcnctacaaatgagttggccatggagtcaatcaactggccgctcactccgaagtcgcacagcttaatctctccacgagagttcaccagaatgttggagggcttcacatctctatgcatgatctggtgc

SEQ ID NO: 887 - DNA, 419 bp, Rattus norvegicus
  Genbank Accession No. AA957917
tttttttttttttttttgccttaaaattttcatcctaaccacattggactggtgcacatttcacctgtaccactgtgtcaataaaagcattccacacaccaaaatgagctgaaggaatggaccgttcactctccccccaggagcctcacgtacaatcttctcacgaggaggccaaacagacaggacggtttgaactccataaaataaccgcacataacatacattcaccgctgactttgacttctgtagcagttccatggctcatgtattctctgttggccactcacttggctacctcaaccatacctggactcaagtatcctggcactgagatccccactaagattctttagtgtttgggtaccaagaaaacagtaagcttttattagaatgaaataagtttctgcctcgtgccgaat

SEQ ID NO: 888 - DNA, 313 bp, Rattus norvegicus
  Genbank Accession No. AA957920
tttttttttttttttttggctttggggatttcttttccccttaagttcattatttatcttccttcatttgcttttataacaaaaatagatttttaaatgcctcaaatatataaacaatctgtgataacacacacatcccagaaatgttgaggtcactctgctatgggacaggggaacaaatgcagtaaccacgtaatctcctcttattcatcctcccaccacctggactcttaccatatctccccgtcgttcacaacataaaagcagagcctttcccagggtcctaaggtccctgctgctccaacacccataa

SEQ ID NO: 889 - DNA, 499 bp, Rattus norvegicus
  Genbank Accession No. AA957935
tttttttttttttttttaagataaaaacatttcttttaattggtcttggctttgatttgtaccgccaagccctggagacaccgatacaatttgatggtaaacaaacagaactgcggcagttagagagaacacagacccacttcccaggcaggcaactgtttcccaatccccctcatgctcccagaacactcacggttcctgaggatgggccgccatcgtgaaaacggtgcgaggttgattctatccctgccgcctggtgtactgctccacaccgctgggctgtatgacccacttggctctgttaccccatctttaaaacagagaagagggctgggctcagtgagtgaacttttaaaataggaagcgaggcgtttgctgccttgaccctaaccttcgtagacaggtgtcagctttgaacgtaaacccagcatgctgtaaccaggcacgttacactgcgcatgacctactgtgacgttagtaaggcgttacctccatcctt

SEQ ID NO: 890 - DNA, 491 bp, Rattus norvegicus
  Genbank Accession No. AA957999
tttttttttttttttttaaattaaatagcatgatttaatttacttgctgcttaatcctcaatcctcttaagttaaaaaagaaagttataattaactattaacgttaatgaatttaaaccttccagaaacatgaatccaaaaggaaatgtccaacaggtgacacgagccgggtattctatggccttgctgtttcagttttgaacactaaacattaacggaaaagaaaatctctagggttttcagttttattcttctagagcacaactgtgtggccctgtcactaagcgcgctctcccagcaggtacacgatgaactcgtaggtggacaggacaatggcagtattggggatctgccggatgagctgagcaaaaagtcctcggtagaaggcgagatagccttcctcccggaataccaggcgtgctgtctgcatgaatgacgtgtacttgctgccttcttcccggagccgtgtcctgatgacctcgtgcgggtaa

SEQ ID NO: 891 - DNA, 343 bp, Rattus norvegicus
  Genbank Accession No. AA962961
tttttttttttttttttcaaaattaattaatttatttattcatttatttatttatttgagaactatactagagagcacacagaaatatatgttggcgatggtttgggagcaacacacttaaccctatggcagagtcaattgcgttgtcacctatccgcatcctggaggaggcagcgtgtgctgtggtgtttgcccagggaaagagagttaagaatacacacccagaaccagagataggacccgttttctggccaaatcaatgattcctgttttacatttctttgtcttctctagtgccaaccatccagaggacaagatggattggggcacactacagagcatc

SEQ ID NO: 892 - DNA, 410 bp, Rattus norvegicus
  Genbank Accession No. AA963008
tttttttttttttttttccagaaaatacagacaactttattagaataacagaaacttccaatttataagaaggaaattaacaatgaacccagcaccacctgggaaatgtcacatcacattactgttctgatggcacctggccaccctgagggtccaggacaaccccatcatagctgctgcaagagcacacttctgaatgacagttttgtcaaggcggtatactgacgtgctctgaagcttttgtagtgagtgacatctcctccagtctgcaagggtgcttgctgtgtgggaactcgcttccatctcagcaacacggggaagggaaagaaggggtggcatgggccagggcgctagcactagcaggctgctctggtgacactctgaactccgttccctttctgctggtggta

SEQ ID NO: 893 - DNA, 397 bp, Rattus norvegicus
  Genbank Accession No. AA963036
tttttttttttttttttaactgaccagaacagtttattgacaagatagcatataaagacactacagagcatcaagcagggagccttttctagagatggttaatcaggggctgtattcccagggaggcgatgtacggtaacccaaaatgcactgctttcttcacagaatgctccagcagaacatagctatcggctctcttctgccccagcacataaagccagctcaaacagtgctgcagacacacgtgatcgttggactcctgggcaatcctaattgcctcctgcagggcgagctctgcctgttgatagtggccgaagcggcagtgcagggcagccaagttgaaagcggcgtatcttaggctccggccataaccttcttccccattacttttgccctc

SEQ ID NO: 894 - DNA, 459 bp, Rattus norvegicus
  Genbank Accession No. AA963102
tttttttttttttttttaaatatcaatgaaattgttttacggagtttattgacaactggttctggataaagttcaaaaaatgcaatttcttcaaagtaaaatagtgcttctgaggtcttttaaagtatttttttggtacaaaaaataagtgtttttctcaatgcttatttcaatactttgctgtaaattaagaagtgtttctcacatcgaatggttccgttaggcacattcaagtaaaatcataaaatatccaagttaaacaatgagacagccagacatgtggctttgataaaagtccgtccattctctggaatggaataaactgtcacttcccttaacccaaggctcgtggtttttggtgttaatatccattccctaacacacagataagcttcttttaaaaaaaaaaccaaagagaaagaaaagttcacttattctgcatccagaagaaccagcgag

SEQ ID NO: 895 - DNA, 218 bp, Rattus norvegicus
  Genbank Accession No. AA963167
tttttttttttttttttggtacgaaatcacctttattcacaaacacagtgacccagttcacaaaggaggcaatgctacctctgaactatcaggatggacaatggcttcttttcccatctccagccactcagctctgtactggggcctttcccccaccgctaggatgagccccagctcgacgtgccagctccagcctgaaagaacctaccagggccagt

SEQ ID NO: 896 - DNA, 346 bp, Rattus norvegicus
  Genbank Accession No. AA963185
cggacgcaattgtttttttatttattattttttttcttttttgaatacaaatgctttatttaacagttgcaggtcattccatgggctaacgagtggatatccagaacccagcagcaaggtcagcgcaacctccgagcttctctttctgactccaacacggtgagcacatcaccctctcgagcagggcctttgacgtttcggatgatagagcggctggtgtcatccataaattccactcgcacctgcgtgcactgtccctgctatccggtcctgcccagcactttatctaccctatccagcttgatgggctgcgctcgactcgtgtccatgatggcggcctcttgcc

SEQ ID NO: 897 - DNA, 215 bp, Rattus norvegicus
  Genbank Accession No. AA963322
tttttttttttttttttgtacttgtgtttttaatgtgtaacttaacaaatgctttcaattacaattatccttgaaggtcactgcagagcttgcccggcctaatgctgtgatcgctcactctctggtggctgttgggaagtaagctgctgacacccctgtgggcacggggatggctcctaatctgaatggcgctttttcttcttggtgtggctctc

SEQ ID NO: 898 - DNA, 525 bp, Rattus norvegicus
  Genbank Accession No. AA963369
  misc_feature (1)..(525): n = a or c or g or t
tttttttttttttttttattttatcattaacgtttattgatgggatggataaatacagattgagaaacatccttgacagcaagatatcaaactgatagccagactataaaatgtatacaatatccttctttaaatttttttgcgtttttaaagttttttttacaaagagcccttatgataatggtcacttccattgtactgtcattcacctaacagcagtagagatcccaggagtagcacccaaaactcaggtgccccacagaggacagaagcaacagcagaataatatgctgagcagtacaaaanaaaaaatcagacaaaaaaacaaaacctcaccacacaattgtacctgagtgacataaaccggtaaaagtgtgactttgctttttcatttttctcttctttttgttctttggtctgataagaaaatgaacagttttgcgtgtggcaagtcaggtaataaagatcagtctccagttcagaaccctaaatcacacctacaaggctgctgcagcactgtttcct

SEQ ID NO: 899 - DNA, 473 bp, Rattus norvegicus
  Genbank Accession No. AA963447
tttttttttttttttttgaaagtgccatcttttatttatcctaattgaattttaaatgtccttttgacacaaaaaggtatatacatgacacagctacacaaccttttttaactggacaacaagtgtcaaaaccctgtggatgtatagggtgaaacaagattggtcaggagaagagaattgttcctataactgcaatctgacacaatgtcctattgccattaacaaagcaaaaaaaaaaggtccatttcagtttattcaagttttttttcttggtattttatccctcttgataagaaaaaaaaaatcagacttttgtaatttgtgaatgctgatcttcatcaaaaggttcattctctggatcagagtcagtggtgtcagaatatctataatgatcaggttcattgtcactaacgtctggagtcacagaagttgaactgctagcctctggatttgatggttcctctactgttttt

SEQ ID NO: 900 - DNA, 332 bp, Rattus norvegicus
  Genbank Accession No. AA963674
cggccgctgtgcccacagggacaaggacacagactgctgagcgatggctgtcacactgcagtacgcgtgggtgtgctgggctgcttcagccgcagggttctgcatagccagccagcgaagtccacgtcctccccctcagagcgtttgatgaaggcatggttcagacacacagtccaccaccaccagtgctccatcagtgacacgcagagcagcggtcacctctgaggagaagtccacatgacctggagagtcaatgaggttgatgaggaagcccgagccatccttgctctgcttaatgaagttcaggtcgttctcggagagctcatagaaga

SEQ ID NO: 901 - DNA, 345 bp, Rattus norvegicus
  Genbank Accession No. AA963703
  misc_feature (1)..(345): n = a or c or g or t
tttttttttttttttttggattttgactcctgattttattattcaatttctttttctactaaaagtagtcttcggtggttgggaagcctggcctcccaacaccagagtcagtcggagctggtttttttgttgaaaggagtgggcgggtgggtgggggaccgggatgagggcagaaccccgctctgctggtagtcttgggtggagaagacgaactgcacttgacagagcctggggtgcggtgggagggggtgaggcangagtgacaagctggggaggggacccacctcagtcnccagctccattctcctctaatgtctctccactggtggcgttctctgcagtctt

SEQ ID NO: 902 - DNA, 471 bp, Rattus norvegicus
  Genbank Accession No. AA963782
tttttttttttttatttgggatctttttttatttttatacacatgacaagattttacaccaatagtcagttaaatagtacaaatttacattcaggaggaatgttaaaaaaaaaaaattcaactaaaaaaaccacttcttcctgtgacccataatcccaacattttacagtgcaggggagagggaggcttgggggagcatccaaaacaagtctctcaaaagaaataactttaaaatgtcacattccctctccacacaggattcatagtgagagtataattacaattcatccttctctgtaggttcctgtgaaaacaaagaccagaggacattacaaactagcagccaactttaccttacagacagactcacatttaaatcatttctacggttttgttggtacttgattattggcaagataattcaaaactcactaacaagatcagtgcctaaatagaagtaatcaaaacttt

SEQ ID NO: 903 - DNA, 351 bp, Rattus norvegicus
  Genbank Accession No. AA963968
cggccgcaaaggacgacctgtgggattccccatgcggggaagaggtggttttgacagaatgcctcctggtcggggtgggcgtcccatgcctccttctagaagagattatgatgatatgagccctcgtcgaggaccaccaccaccaccacctggtcgaggtggacggggtggcagcagagctcggaatcttcctcttcctccaccaccaccacccagagggggagatctcatggcttacgacagaagaggacggcctggagaccgctatgatggcatggttgggttcagtgctgatgaaacttgggactctgcaattgacacatggagcccatcacctcgtgccgaattctt

SEQ ID NO: 904 - DNA, 480 bp, Rattus norvegicus
  Genbank Accession No. AA964080
tttttttttttttttttccttctgtggtgtttgcctttattttttccaacagaaaacgtagggggtggggctgggaaaggacaggtaaaccaccatgtgcggagcctgcagctccaacatgaaactcaaacaagcctggaagaagccagcccttcaaaggacatccaaggcttaacagtcaactcagactgggaaccttccagaaactgagtaagtggccagtcagggatttcactggatcagacgccaagtggggcttcacgcaaaggcgcccggaggtctcctcacccaccttcctggactcagttcaggctgggactgctcactgcttgcctgcctgccgccctggcttcttctccggctggcctcggcctgcaccagggatgccaccccggccccggccaccaaacacacctctgccagcgccacccatgcctcggcctttctgctgcttctgctgctgcggtcctcctcgccctc

SEQ ID NO: 905 - DNA, 362 bp, Rattus norvegicus
  Genbank Accession No. AA964094
tttttttttttttttttacactccagattttatccccctctgggtctactctctgactgttccacatcccatacctcctccggtctccacgaggatgctcccccatcagacctcccctctcctgggacctccagtctcgagagttaggtgcatcttctctgactgtacgcagacctggcagtcctctgctgtatatgtgctgggggcctcatatcagctggtgcatgctgcctggttggtggtccagtgtctgagagatctcagggtccaggttgagactgctggtcctcctacagggttgccctcctcctcagtttcctccagcttctcccttctgtgacatttttggctctcctcactct

SEQ ID NO: 906 - DNA, 293 bp, Rattus norvegicus
  Genbank Accession No. AA964114
tttttttttttttttttccggtagatggtacggcatataaacttttaattttaaaaaatgtacaataaaaatacattatcacacacgacacggaactaaacacatgagaagtgccacaaagaggccaggcagaagcagcaggagtcagacgtgtcctgtccgtgggcctcccaggaaggggccagggccaggtcaccagcctcactgagagttgctctccaagaccctactagtggtgcagttgttagtatatgcccacagcttgggggcacgggaactaagttagcactgca

SEQ ID NO: 907 - DNA, 363 bp, Rattus norvegicus
  Genbank Accession No. AA964218
  misc_feature (1)..(363): n = a or c or g or t
tttttttttttttttataatggacagaattttatttggttctaagtcgggaaagtctaaggttgaagggacatgctctggtgagggccatcttgcttcatttgtctgtgtctggagaggggtctgggaacaggacacgggacaggaacgaatgtttggttggatggaagtcctaacaagaattatttctctcagggaaagaatgatcgagaggggaggcaggtgttgccatgatgggaaatgtttgctgtgaagagacttaactttctttgcgcttagacttcaggaagcctaggttttatttatttattttttgagacattttggtgaaaggaaaaannnnnaaaaaaaacccctcgtgccg

SEQ ID NO: 908 - DNA, 508 bp, Rattus norvegicus
  Genbank Accession No. AA964227
tttttttttttttttttccacaccagacagatgtgctttatttaaaaacaaagcaaaaacaaaacaaaacaaaaaaacaaaacccaacaacagcaacaaaaccctttaataagaaaatctgactcattaactcaagctccttgagaactttcaggaaagccagggtccgtgaaagacatgcaggcagctgtcgacagttctttggtggcacaagctgccctcctgattactgtaccagagttttattattaaaaaaaaaaaggcctcaaagcatacaccaaagaaaacacacacacacactctctctaatgtgctgcaaaagccaacatgataatacatacatcatttataaaatgagccttttgattctagaaaattaaaacacggcaagctcacagaagggtaacagcgagtggggagactcaaccttccctgatgacccgccatggggacacagctagtaacagtgggctttcgtttaccagcccagccagctgagctgtcctca

SEQ ID NO: 909 - DNA, 469 bp, Rattus norvegicus
  Genbank Accession No. AA964244
  misc_feature (1)..(469): n = a or c or g or t
tttttttttttttttttatcataaaatctcatttattgtcacctccagggtgttttcccccaagatgttgcttctaactgaaagtacagtttgtagacttgaattctgtcacttgctaataaagaatagattgggcacaaaaagacaatgggatgggaggggccggaacaatttgcagcagtaaactgagcaaaccagacagtagcagtcagagctgatggagcacactgcaaatgaatgctgcctaaagtaaacacgctaatttcatttttaaagataggatctcgtgtatccaagagcctttagctcttggctcttagccaagtatggcctggaacatcgtcttgccttcacctgagtgctgggattacaggtatgtattccatgcacagaatggaacccaggatttcatgcaccctgngcaaacatgtaatagctacatccacctgactctgctgtgttaatgaga

SEQ ID NO: 910 - DNA, 535 bp, Rattus norvegicus
  Genbank Accession No. AA964301
tttttttttttttttttggtggttccccaaaaagcttttattaaacaacaccaacaagggcttgttgttcataaaacaacaccaagggggctgggagtgtagctcactggtggactaattattcagcacgtctgaagccatgggtcctactccagagccgcaagaaagcaacacagaaatgactgccaaagctacagggaacacaaattcagtcctgctgtttgctgcgggaggcttctgcattggcgcggagcacagccccaggggaagggtatgggcgctgctggaagagaggcccagccgctgtcgtgtcagccccagtcttggcctcattcctcttgggtagtcctgttgaccatgtgccccggggtgcatctgagtatgagctggggtccatggggtctaattcttcatctttccggctcgtcgctttcttgttcttggggtaaggagccagttcctctctgcgatggtggcgccggtctttgccatcttcccggtctgccttgtcaaatgcccgttctcgttccctatc

SEQ ID NO: 911 - DNA, 417 bp, Rattus norvegicus
  Genbank Accession No. AA964320
  misc_feature (1)..(417): n = a or c or g or t
tttttttttttttttttgagctttattacggattttattaaggtgaaacctctaggaacaaggagtcccattcagagggcacgagagcccacggagcctcctcagatctcatagtgaaccacgggctcaggttctttggaaggatcaccgcctcgctccaggtacagattattgtacgggtactgcttcggacccacaggctggtaggaagggaacatgtcccctacccagaacatgaaaaccatgaaagccacaaagccgaagagatgtctacacatgacatcccaggaaaccggtgtaggagatgtgtccacacgattcctgatgtacatgtctaggtcccagtgtatcggttcaccccagttcagcctgaggtctgggtggtcccattcataccacggatcnctctcatgctgt

SEQ ID NO: 912 - DNA, 477 bp, Rattus norvegicus
  Genbank Accession No. AA964379
tttttttttttttttttcagttaagagttcgtggcttgcactgattacaggctgactggacccatttattagtttttcaaaatgctgtcgtagacctgatagatgtactgagagacttcaggggctctacacttcagcgacagcgtataattggggtttcctggctggatccgcagctctgccaaaatccaaatgccattagtgagcttcagggactggtacagcatgtcctgcccctccacattcctcttggcgatagtgtaaacattgttgttttgcaacttgctggaaactgtgtcagcgtttaaatgacactccttaatctgaaattggagctcattttcattgggaatatccttccacgtcgcaaggaagacctggcgttccattttgccatcttctacaaaaagcacattgagtgggatgaggcagctgaagtagaagacatcaatattgtttttaacagccacctgcaag

SEQ ID NO: 913 - DNA, 498 bp, Rattus norvegicus
  Genbank Accession No. AA964455
  misc_feature (1)..(498): n = a or c or g or t
tttttttttttttttttcggcttccattcatatttaatcacgttgaaatcagtctaacatcaagacatacatgtgagcacaaggagcttagccatggatagacgtgtctgtggacaggggcactgcaggaaccatcgcacttaagctcgtgtgagacccaggcagctctcgtcatgttcccttggcttaaggagaggtagatcatcagcaggaaggtanagaggacgctcttcaacagagtagccgaggacagggttctgtctgatacgaacatccgcagggtgctagcaggagcacacctgtcatacagcctgcccaaaacggccactagcatcttctcccaaaacatctcagggactggcaaggggcaagcgtgacagacactggatagatgtttctagaaagcagttcatttcacagaacctgcttaacgggacaggacgcccttctaacggacctctgcacacactagaacactagagcactgtccgcctcatc

SEQ ID NO: 914 - DNA, 276 bp, Rattus norvegicus
  Genbank Accession No. AA964500
tttttttttttttttttgcatttaaacaacgtggtcgggacatttattggcattatgaaaagatttctttaaatggtataaataatcatgaactcaatctctccatctgttctatttcacgatgataaagcaaatacgggaataagtaacattcctgcttctacaccacagtttaacgcacaataagctaacattccccaaaggattatcaactgcgtcacactgtctctcaacagacagtcaattgtcagtccaaattctaagaaaatttcccgg

SEQ ID NO: 915 - DNA, 423 bp, Rattus norvegicus
  Genbank Accession No. AA964526
tttttttttttttttttagggaaagggtgcctttattcggagggaaggatcagcacccacccccatcctccaatacacaggctggaacccgggaagaaggcagctggtagagaagcaagggaggcaaaggtgaggaccgcctccaatagctatctccccttttgcctgcggatcctggaagacctgcggccgaggggcgcctcctccacatgcgagtggaccctatgaagatgccaagggctcacttagatggtggcaggattctgctgactctcagcctcagaatttaaggatgctcactttggatcagggagctaactccaggggtatgaagatccaaggcaaaaaactaagctctgggactaggacatacgacgggaccgcccgctgtggagctggtctcccccactggaatctgtcatg

SEQ ID NO: 916 - DNA, 530 bp, Rattus norvegicus
  Genbank Accession No. AA964533
tttttttttttttttttgaggagtctacagctttactgtaggatatatatacacacatatgtacatatgtatatatttctgaaaggcctctcctctgttggccatgtcaactctcaggtcacagtcagaaacatgacttctgagtcacttcttcacctctccaaggtcttcaatgctgtcatcatctacctctggccacttttcctgaatgacatcgatgatgtcatctgtgaagtctccctgaatgatgatctcatcctcccctgttactgaggcaccgcaggagaatttttgagcaaaaaatctttgtgcttctttgagatcaatttcaaaagttgcaaggccacacactctcgtcacgtatttcttctttgctctggggattttggctatcgtgaccttctgtggtactgtcttcttcttctgttttatttgacctcttccacctctttttgttttttcttctcctcctcttcccctactggtccttggccttcactaattccagtttcttgtttgggtgaattttc

SEQ ID NO: 917 - DNA, 473 bp, Rattus norvegicus
  Genbank Accession No. AA964545
tttttttttttttttttccagctttcatctttttatttacttttttatgtttatatttttatgttcattggtgtttctgtgtctgtgtcagatcctctgaaatggagctatagaccgttgtgagctgctttgtaggtactagaaattgaacccaggtcctctggaagaacagccagccattgctcttaaccaccaagccatctctccaggcccaaattctggtttttgatcatggctgtattactgactccttccaagctaatctcttgtccataaacaggcctaatgctatctgtctgtggaagtgctctgaggtaagtgaaggctggttcccctcttccctccctggacaggtatctttcccgttttcctatagctcctgtagttacccacccaagtctctcagtgctggccagttttctctccagccagcaccttcacataccagccagagctcctgcagaaagaatcct

SEQ ID NO: 918 - DNA, 354 bp, Rattus norvegicus
  Genbank Accession No. AA964589
ttttttgttttttttttactgccaatgtcacgcattcacggttcaatttacatttattgagcattacacagatgatcaatcgaattcatgacgaagctaaggcacttatctgcggttccatagattattttaggttgggaaccctggagctctggctgccccttgctgtgcatataatttgaatatctattagaaatgctttcagctacaagtaagagactgctcaaaataaacaaatgtagacaatcatgtattttcaccaaacaagatatctggaggtggtcagatccccagatgatgggctatcccagcaataattctgtcaaggatccagcttccgttcttccaatctgg

SEQ ID NO: 919 - DNA, 467 bp, Rattus norvegicus
  Genbank Accession No. AA964629
tttttttttttttttttcaacgatattttttatttacatcacaatacaccacacatcaacacacaacagtggtttatccttcttgacatttgctttacttcgtttgactgaaggtctttcaaaatacatttccaagccttgaggtaaatactagagggaaacaggcccacagcagagctgttacccctgcttcagatacaaggagggcaccggacactgggcctccggagtgctgctggtcaagacaagaactgaaatacatacgtcttgctttctgtggaacttacaatgactcctgttatgaagtcagtttcaagaagtactgaatggcttggttatgtgaagactgtttaaagcaaatgtctccctgtatcaacagtttatccagaggcaaaggctcactggactgttcaagactttcctttgcattctcccccgatgccactgcaggaaggctctcccgttct

SEQ ID NO: 920 - DNA, 439 bp, Rattus norvegicus
  Genbank Accession No. AA964653
tttttttttttttttttcatctattacaacaccaccactttatttgattgcgtgggagggctgatgggggagtaggatgtactgagtgactgtgatcactcatctactggagaaaatactatgtaacaaaagtaaattaggggcactactcctctgtcacagatgatttcctgggcttcagaacaaggtccttaatggataaagacagttcctgaagctccttccgagtagtattggtgacgtcatgttgttccttgtctaagtcatcgcttgacggatcctctccctgtccactcttcttattttgactgactaactgtttcacaaccaatccttgatattttaccaagagagtatgttgatcctctgggattttgttgtgaagaaaggcgatgatctgtgggacacatcttccaggtgcatggagcatgctgtgggt

SEQ ID NO: 921 - DNA, 539 bp, Rattus norvegicus
  Genbank Accession No. AA964687
  misc_feature (1)..(539): n = a or c or g or t
tttttttttttttttttcaggtttaaaatgtgttcaattgagacagttcccaaaaggatgccacagatgtggacaggatgccacagacgtatgggagagaggagtactgcaactcagtaggagggtgagacatagtgcactgtgaggagggaaaagcacaggacttaagcaaacacaggaagtaggtggggcaatcagaggaaggattaatactgaccagtttccagttcttaggaatcctggcatctgtttttcccaccaggaggctactaaatttagaactgtttgggtgggcagggctcgttactgatgaacaaataaactcactggaccgttctagtacttgcgaagattaatcacaataggtgtgcttgagatacattaactttcanacaaattctgcaatacaccaggtactgacatagccttaatcacgtctgggacaagtgagaatgacctggtccctgaaacagtctcacaaaaacattcttaccagggacacctccagggtggcctacgacggctggggaaaatggagg

SEQ ID NO: 922 - DNA, 446 bp, Rattus norvegicus
  Genbank Accession No. AA964742
tttttttttttttttttcataaacatcatcgtttatcctgttttcttaaaaatccaatgggagagtggctataaataaacaatggttctgtacagtcttccgtgggacaccagggggcaacacggatggagtccgaggggctaagagcaagacaaggtgtggacagtctactgatagcccagaggtggtgataggcactctggtccgcttcgtttcccatggcatgctggcagctagagcgtgaggagtcctctgcccagccgcaccagtcctttctccaatggccggcccagggggcaagagggccaaggcagggggcttcgctggggctcaagcagcacacacatgtggtggctgcagctttgacagagctctccttgtcactgacacgggacaaacctcaggggatgttgggggttccatggtgttgaacagcccagcatcac

SEQ ID NO: 923 - DNA, 437 bp, Rattus norvegicus
  Genbank Accession No. AA964752
  misc_feature (1)..(437): n = a or c or g or t
tttttttttttttttttagttttgtaaacagctaattttattccttgataccaattggttgttcatgatacatacttttctgcaagaaggcaatgaatgaaataaaggcatagaggggaaattggggaaaaaccacaatgtagtaggatgtcacttaattaaactcgtacttgattggctagttgttttagttacaatttcaagtcttatagatacagaattctactttttttccagaacaaacatatatgtccttaaagacagtgggggagacaacagatttttaactgctgagcttcttacttctaaggagaacagtcaacattgttacttcttgtccttcacagtctggaattcatgtgggtcattagcttctccaatttgattgctanggctatgtttcctttaatcttcaactttcctgacataaatgccat

SEQ ID NO: 924 - DNA, 465 bp, Rattus norvegicus
  Genbank Accession No. AA964770
tttttttttttttttttagtcctaagttttaattgttaaaaagtatttttggagccaaggatgctctttaaaggagttattttttccaaagaaccaagacaaagaagccaggttaatgacataattctatatgacgtatgtactggagttgtgccttttctacaacactggattaaataaacttgtccaaagtatcattttatcacagcctgggatgcctaataatttcctgttttccctctcctgtccatgaggacatgaaccagcttctttctcctgcctcttctctgtaaccaaccacagctccacccagagcactaatcagaacaccaagtgccctcgggattaagttcccctcactgaaagtacaacagttctctgcataaggcactagagcacgtggactagacactctgtccagagagacactgccaggttctccttctcttcatctgtgccaagttt

SEQ ID NO: 925 - DNA, 397 bp, Rattus norvegicus
  Genbank Accession No. AA964868
tttttttttttttttttgaattaacctatgaggttcattgcacagccgttgggaaagtaacaggaagttggcaacaagttctagccattagtcattccagacactagcagatggtcacagggacagaagaggtggtgtatgctggagtctcccatgcttgaggcaatgactaagcacagtaaaaagctgtttcatgatgctgaagaggcagggtctagtgtcactttgtggttttgttgtccactcctggccctctggtgtccacaatcatcttcaagggccctgttccagcctcttctggaaagtcaacgactgttgagcacacgactgttgagcacacgtggcagagatcaactgacagtcctgctatggcctcctgagcagccagtctgttctg

SEQ ID NO: 926 - DNA, 443 bp, Rattus norvegicus
  Genbank Accession No. AA964871
  misc_feature (1)..(443): n = a or c or g or t
tttttttttttttttttacgatttgggacatttattattcaattgcttctgaagagttattgccgcagttaggaaaggacttggagacgatggggacattagaggagacaaaacagatttcaaagaggcaagtaccattttccaagtataaaactggtaatattaaaaggaacacgtcagtatatccacatgactagctacctctaatacagaaacaagacagtacaatgtttgcagaagttactgtggcacctactaagccacatgatatcatgatactagacaccctacccaccctgtcaccggctaggtatggcatgcacacataaacacacaatgaaagtcttaagttgcactaaggttcctaatcatgaattaaaatggctgcagcaggtcnctctgaaaaacaccagcaccccatgccagcctcgtgccgaattctt

SEQ ID NO: 927 - DNA, 446 bp, Rattus norvegicus
  Genbank Accession No. AA964875
cggccgcaaaggaagagaacagaagaggagagaaaacgcagaattgagcaggatctgttagaaaagaggaaaatgcagcgtgaattagcaaaaagagctgagcagattgaggacataaacaatacgggaaccgagtccgcatcagaggaaggagatgactcactccttataacagtggtccctgccaaatcatacagagcagctgcaaacaggaaggatcctgaggacctggacagagaacacaggaatggaagggttagtcaggaagaagaaaagacaagacatgaagaagagtgcagagctctcaaagaagcaaaatgcctttcattggtcatggatgatgaaacagaggccaaaaaagaatcacgttttcctggaaaattgaaatcaacttttgaagaactggaacgacaaagacaagaaaaccgcaagaagcaagcagaaga

SEQ ID NO: 928 - DNA, 361 bp, Rattus norvegicus
  Genbank Accession No. AA964944
tttttttttttttttttcttcttatctttgtcttctgccccagtagcagacacaggcttatactcaattcctgtcagtgacttgtactgtgccttcagctgaagaagttcttgtacggctgaatccacttgatccttagaggccttttcagctttaagtttccgaactacttctccttgacaagccactctgtcaaacagcagtttggcttccggtgtctctgatccaacaggcttggcattgctgacaggacttgaatgtgagttctgagatgctgggagttggccgggtacatactccttcgcagttttttctttatactcagctttcagggacaataagcattctacagcttcattta

SEQ ID NO: 929 - DNA, 289 bp, Rattus norvegicus
  Genbank Accession No. AA964962
tttttttttttttttttccgttttgtcacctgatatttaatgatgtcaacagacagcagggcggttttcacaaaagtgtttgtgacatacttagtgcttcagactttctgagcaacttggcactaataaatctggcacactcattgccagcaatggatgtgtcaccgggaaaccaggtttgtgggtcagcatggcttagtggatgaggatgtacatgccttcgacgttgattatcactggccatgactacttgacggattgttgttgcaatcccagtgagaatacacag

SEQ ID NO: 930 - DNA, 547 bp, Rattus norvegicus
  Genbank Accession No. AA964988
tttttttttttttttctaagagcgctgaacacacctttattcaagtagaaatacaaaagcacgttcctaacccaaatgcatacatgtgatttttacagattctgctacttagggatgaatcaaatcctctgcctcagtcaccagaagtgactattggtcgctataaagtaagagtatacatgtttgacagggacagaaaaacatgcatttttcatttgcttttacatttagatcaatttgatatatgttaattttcttgccctgatgagacactatgcttgctgatggcaaagaagtaaaatacagtggtaggactatccctatcctaggttagccacaaggtttacagagtgagcagcatattttatatattggttgaggatccctagtgaacattatgacatctgaactatgaaagcctcaactgcttgattgacaactagaattttaaataacacttttcttattcacaagatgttattttaagatgaaaacaaatgctttgacatcatgtaaagaatcatgaactctatgtagtatatagggc

SEQ ID NO: 931 - DNA, 408 bp, Rattus norvegicus
  Genbank Accession No. AA964990
tttttttttttttttttaagccagtatcttttaatcttacagatctacccatctggagctctcaaaaggttcaaaaagtttacccttcctagacctttcctacacacggggagaccaagtcgctgcagaaagcctgatgtggcccctgtccctccctgaatctgcaagtggcctgggacaacccagagaagttccataaacattgggtaccacatgtgtcattgcagttctgtggtcctgtctgggcttcagggcactggcaggcaggcaccaacaggcaggcaccggcaggcaagcaaacaggtagatatatccactggtattagggtgtgtggggcgcccgatgcccaccagcagccttggcattgcattggagttcagacagctaatgcaggaacggactccatt

SEQ ID NO: 932 - DNA, 375 bp, Rattus norvegicus
  Genbank Accession No. AA965113
tttttttttttttttttaaaataaaccaaaaggaatttatttacaaaatgtcttatttcaacaacagttacagccaagaaacaaggtatcaagcaataatgaacgaagagactccactaatcgtgtttaagctattatgcccagagtagcttctcttgctagctagaaagatgtccctctgagtcctccacttgcacaatggcatcatttaaccaatgggggctgtgtgagcagcacagacatgtgtgggttcagctgagtcacaggtttcttgactttttctcctcccttgtttagttttttacttttctccttctctgttgactccttcctctttttctcctccactatcagctcctttctcagcttcctctt

SEQ ID NO: 933 - DNA, 450 bp, Rattus norvegicus
  Genbank Accession No. AA965154
tttttttttttttactgctcggacgcggagcgagaagctgagagagtcggagacgctatccgcttccatccgtcgtgcagaccctgccggagccgctgccgctatggatgatcgggaggatctggtgtaccaggcgaagctggcagagcaggccgagcgatacgacgaaatggtggaatcaatgaagaaagtagcaggaatggacgtggagctgacagttgaagaacgaaaccttttatctgttgcatataaaaatgtgattggagccagaagaacatcctggagaataatcagcagcattgaacagaaggaagaaaacaagggaggagaggacaaattaaagatgattccggagtaccggcaaatggttgaaactgagctcaagttaatctgttgtgacattctggatgtactggacaagcacctcattccagcagctaacactggcga

SEQ ID NO: 934 - DNA, 525 bp, Rattus norvegicus
  Genbank Accession No. AA965186
tttttttttttttttttaacccaaccaattctttattgtaaagatgagtgctacaaaggaggcctagtgtgtagggagtggggggtcaccttctttcaagggactccacaaggtccactagagatgacatatagccaaggaataagcctgagccagggcagcagtggttctgaactctattggaagttggggttctgaatcaagcccactgacccaggtccatgaggaagtgttcaatgtcatcgtagagactattggtgctagacaagcacaggccaagactgctgctgtccagagaggacacaccctcacgctgcacgccttccagatgtgtcttgcacagccatggctccagcttcaccaggatcaggccacctccctcgggccacagcccaggccttgaagatctgtgcatcagcttcatccagatccctacggctgaaatgcttccagggcacacggaagactgtgtgagcctcattcagccactgcagcccctcgtaccggccactactgacctcaccc

SEQ ID NO: 935 - DNA, 352 bp, Rattus norvegicus
  Genbank Accession No. AA965213
cggccgcaaaggttttttttatttatttaaaaagttaaaaagctacatatcattatttaacaattattttcccagacatttctgtcctttaagtatgtgcataaataaaatttaaatcatcaatatcaatcttaatacatcaaaataatatatttacagattttaaaatttaggtttgtttatactcaaataatttaatgtaaaattcagaaccaaaattactacgtaatgatgacctaccggagactcagtctacctacggcactaagcaggacccatgtctggattcacagacattcttccaacaacattcccaaatggaacaggcctgtcctgtctatgcctcgtgccg

SEQ ID NO: 936 - DNA, 392 bp, Rattus norvegicus
  Genbank Accession No. AA965251
tttttttttttttttttaaaactaattcacagccactggtttattattgatcacgggggcatttcacatcaacactaaaattctttattgcaagttttacaataatcaagtaaattcagtccaaaaacacaataaccacgatgggggtaggggagcatctacctatagactgcctctctgaactgaaagttcatttttatttatttatttattttttggctcctcaaactgaacagctcccagaggctctccagatgcatttagctttgtttgctgtcctcccccctcctaccacccccccacaagaatacaaaagaacttcatagctttgttctccttaaaatgactcccccccctcactaacctcccctggtgcattttcaatgcaaaag

SEQ ID NO: 937 - DNA, 342 bp, Rattus norvegicus
  Genbank Accession No. AA965264
  misc_feature (1)..(342): n = a or c or g or t
tttttttttttttttttggccttcagttttttattctgtgtgcacaaagactagcatgattggtatcacagggtagacagttggtttcattgggtagacagtcgaatcatccattcaggtcgcttagtccaacttaatgaagcctatgtccttcgcgtactgacggaagcactgtcggcacatgttcagcccgtatttacggatcagaccgtggcggttagagcagacgcggcaagagcgagaaccctggccgaacttccgcgggtgactccagtagagctgctggtgacccatcttgccttcagacgcccaaggaggaaaaaaaaanaaaaaagaaaaaac

SEQ ID NO: 938 - DNA, 408 bp, Rattus norvegicus
  Genbank Accession No. AA996422
tttttttttttttttttggacagcaaagcccacactatatttggcccagatataaattagatcacattcaggtagtgataaattacagacaaagataggaccagtagacaggacacactccacaagaggacagtctcacttaaatacagaggacatgctacactgaccataatttacacacagttctacagattgaaataaaaaggaaaaactacatcacaacgaatttcctttgaacattgaaaatggtgtaaacatgatcatccacactgagatcacaaatggctatctgatgcacttgtatgcagttttggcagaagcaggtgagcgggtggcacaatggtcctatgaagctgccaggcaggtagacaccctggtccacaccaccccagtgtcacacttctgaag

SEQ ID NO: 939 - DNA, 383 bp, Rattus norvegicus
  Genbank Accession No. AA996462
tttttttttttttttttaattttttaaaactttattttatttatgtatttttgagacagggtgtcacctttttgagacagtgatccccctgcctcagtctcatgttctaggattacaggtcagtaccaccacatccagcttcacaagaagagtctttgtagcaagttattcccatccgatggccctgttttctttccagattaaaaccccacaggagccaaggacatctgaaccacagcctcataggtccttcagcaccatggctgccaactgaaactcgctatgtagccgaggctggccttgattgaagagtgatgctcttgttttattcagtctcaggagtgctggattacaggcttgaaggactcattgttatttgtagt

SEQ ID NO: 940 - DNA, 482 bp, Rattus norvegicus
  Genbank Accession No. AA996463
tttttatttttttttttatggaactgaaatctaaactcttttttttccaaatatgaattctgcacattttctgtgacattacaattagtgttctatatgaaacaaacaaacaaacaaaaaaccaaaaaaggaacagaaaagtgggctaatgagtaaaatggaaggattttattgtgataccgtataagaaaccgtatttatatctgctaaccacctaggaaacacgagtcagtactactgattcacatacttattttgaattgaaggaagatggttttgactatattgtccaatataatttgcaatgattagacttagcatgttctcttaaacttctgtaccgaaccacaaataagtaggtatagtttgttcactagacctagatctgaaaaaccttacaaactttccattcatctcccctcttcgctgttactctgcctccctccatcaccatgctgaattcctctcatcttccacatcat

SEQ ID NO: 941 - DNA, 419 bp, Rattus norvegicus
  Genbank Accession No. AA996484
cggccgcgatcggccggaccggaacgtctggcgaagtcgttggacctgtcgctccatggcggggcctgaggagaacgccgagcgaggcaggtgaagcagcacaataccggtaaggcactgctcgggatgacgccacagttcactgcttctcgggacagctggcttccatccgcctactggcccagaccaaacccttgtgtggaccaaaccccagcgctccgccgctaacgacaaagtgcgtacccattggctgggccgctgcacaagaccacgaggccacgcccccataccactaaccgagccttccgattgctgctccggggcgggggtgtgtaggtgcagtttttggcacgcaaagacgcggaagaattgttctggcttcagaaaagagcccagcgtcctctaggaagaggaactga

SEQ ID NO: 942 - DNA, 467 bp, Rattus norvegicus
  Genbank Accession No. AA996488
tttttttttttttttttgctttgatcaatgtttattgtctttatgaaaaaatcttcatagaaaatggctttagctttcagcagcccgttcctgagctctgacccgctgaacccaaagcaccaaaacagagtattctgtagcagtctgagcaaatggaatgagagcaattatgcacccggagggaatgcgcacctgatgtctgcaccgtgaaatccaaatagcagaacaagtttcaagtatgaagaagcgtggtgaaagcagtgcctgtggatggatggacagcctacagcagcctggaatgtttgtctgttttttaacctgggactacagccaacaatgaatgctccgcatgatgactgggtttaaagatcaggatgtacagaaatatgcttgagggcatttctgactgacatcatgggtacgttctgtgcccagcatctggttttatctcttgttgactatgggta

SEQ ID NO: 943 - DNA, 533 bp, Rattus norvegicus
  Genbank Accession No. AA996523
tttttttttttttttttagatgaaatgctttatttactttaaaacattacaaccaaatgcactttgtttgtccgacataggaaaataatcatgagtgacagtgatataaacatttgcgttttgacgtcacagacaaggcacaaaaacgacggggcaggtgactctcgtgaagtaagcaactttatccttcttgtcttctttatccccctctagatctggatccccagttttacctaaaaaaaaataagaatgtatctcaaaatgtagtgaggacgacagcccctgccctcaactgtggaattccgagcctggctgcatttgtagcttggcttagaaattcctctttgagaagaatgcagagagtgtctaacatctttattaataaacatggcaagagagaagctatgggtgtctcccaaccttctagatagaaggagtcagaccacatttactcctgtccactcagccccacagaaaactcaaacatggctttttagctcaactgccacaactttatcccctcgtgccgaatt

SEQ ID NO: 944 - DNA, 383 bp, Rattus norvegicus
  Genbank Accession No. AA996623
tttttttttttttttttgcttgggaaaatggattattctaataaaactttatttttttcaaacacagccacagaggcagaacctcatgttttaacacacacagacttatggattttttaatataaaacaaagtttacgaaaaaatttttccactttttgtttctgtaatcccatgagcacagggactttggcagcaggtgggaatgaagggcagcgggagctgccaccgggcacaccgggcacaggaggagagcatcagcctgggagtggcttcactcacacacgcagcacagatgcagacatcacagagcatcagccacaagcccaggaggtgtgctccactctgggtgagcccaccatgggaacccaaatgatgagactgg

SEQ ID NO: 945 - DNA, 470 bp, Rattus norvegicus
  Genbank Accession No. AA996717
  misc_feature (1)..(470): n = a or c or g or t
tttttttttttttttttaacactgaaagttcactttattagcttatgaagattggtttctgatgtatcttccaaccttctctgatactgtctttctgaagcttttctacggtagacatcatagaaggtctcctggcccacgcgcactttaatcatgatccactccatcgttcctcccaggacaaaaaagaagggcaggaatctgtagatgccgaatcgctgcttcccaggcactcgctgaagagctcgcctcagctgggccctgaacatgaccgatgcctcaaagtggggtacgggcggaaccaggtagactggtgttcctagaggcagtacaaacgtccctgcgcgtcncgcgaagtcccgtggaccgagtagcaagactggattgcagcgccacagtccggccgcaagagtggggtggcgaaagccgacagacccagagcttggtcgactccgcctcgtgccgaattc

SEQ ID NO: 946 - DNA, 203 bp, Rattus norvegicus
  Genbank Accession No. AA996782
tttttttttttttttttgcagttaaaatcagtgtttatttgaatgtacaaaagttcccagtagtaaaatgtatattacaaatcataggcagaaaagaaaaagtggaacacgtttggcatgcatcttataaaagaaaggatctgtagaagctgagcaatgtgtgcagtgcaggcggctcccagtagaagtgccactccggtaac

SEQ ID NO: 947 - DNA, 212 bp, Rattus norvegicus
  Genbank Accession No. AA996814
tttttttttttttttttgcaagagctggactctggtccctttattgagacaggagccagtgggtccatcaaaacaaaaataaatttctctcccaaagcctgccagcaggctgacacacccagcatgtcctggctggagcccttggctgccccccaagagcacaggtctggctcctttggagtcaagggacactaactgtccacctcgtgccg

SEQ ID NO: 948 - DNA, 489 bp, Rattus norvegicus
  Genbank Accession No. AA996899
  misc_feature (1)..(489): n = a or c or g or t
tttttttttttttttttaacaatggaagacactttattattatttttttaaagtctctcaacatttcaactctgtagaaatcaaatgcaaaatatgtgcatttttaaattagcatatactcaactatctggatcacagcactctcctatagtgagacacacctcggagggaagaggccttgccagtctgtacacagtatttcctggtggaaagcacactggacttcctgaggcaacctgtcccccatcttaagagagtccctgcattgctggagtaactggaatggaaaaccagagctctcaggaaagggccaggcattgccagttctgaggtgtggaacatcaaagagctgcccaggaaggccagtctcagtaataaaattgcccaaattcagctgtatatacacctatctacatgtggtctatcagttagagattaananaagagtcatataagatttggaaaaccttaaaatcgctcctgtaagtt

SEQ ID NO: 949 - DNA, 261 bp, Rattus norvegicus
  Genbank Accession No. AA996933
tttttttttttttttttcagtacatcagaaggacaacctttatttaaggctactattaaattgagagagtcttgtatattttgaattttgtgcaggagaaaggaaagccattcttctagaaggcactaattggtttaaatatggaaaactgcagagtccagtccaggaggctccctggttcttgggttgtacgtcttactcttcctgtggcttgggtcttgtccgagaacggcatcaggtacaggtgctcccctcgtgccg

SEQ ID NO: 950 - DNA, 419 bp, Rattus norvegicus
  Genbank Accession No. AA996944
tttttttttttttttttgagcaactggcgggttttatatatttatttccaagaaatgacatcttgttttcataaaaaggtaaaccagactctcaaaatgcaggccaccttccatgcagccatagggcgcacccaagtgtccaaggcgatgtcaacagggtgcatgaggtatcaaaaacaatcaacaaatgaagaaacacagaactcaactcatttaacacctagtgaggcagtcactccgagtgggtgtcccagcagcactgtagagggtgatgtcagcagcagggccagcagacagaaggccagtgacacagacttcctaagtctctgcagcacacggcttccgatgatgtccagagcagccaaagggaatcctctagaacgcgccaagctgccatcttcctagtctctcacatgtcc

SEQ ID NO: 951 - DNA, 471 bp, Rattus norvegicus
  Genbank Accession No. AA996959
tttttttttttttttttactttctttcttgatgtatgctctgagtttttctccttcttctttcaatgtagggttcgcattcacaatatagtcttctagcttatggaagtctctgttctctaacccagaattctgcatgacagagactaccctagggttctttggtagctcagctgcaacctgaaagagcttgccctccaactcatcaaatggctgagtgttttctatgatagtgtccaggtcattaatgagtttccaatggttattctctatgaaagaacaaaacctgccgtccttcctcagagtgtctctgatgttctctcccttggagccatagacacagactttgttcccctctttgtgaagttccccacacttcagaatctttttcctcttactcccaactgcatgaatgttaaatcagacataattggtagatgcttggtcctggggttcaaagaattgtttagtt

SEQ ID NO: 952 - DNA, 464 bp, Rattus norvegicus
  Genbank Accession No. AA996974
tttttttttttttttatatttagtgtacttttattgctcagcttattgaccagaggcataccctgtgttccaaagatcaagtcctcaagcgtgccaacagtactgactccagtctctgtcacatcccaaacacccatccagacaagtcagggactgcagctgctccctgccattttcaagaagagacaaactgaaattcctaacttcttaaggatcttcctacaaatgattttattataaatatttctcttggaataaacaaaggctgtattcagcactatcttccaacttgttctaaagcagaagagaaaacatggaatccagaaccatttagaaatcaagataaacagcagacacctgagtgccatgctaagtgtctttctagtaaaataaaacaaacaacccagaaagttaaacaggaacacccagtcccactagcctgctggatgaaaataatgagtttg

SEQ ID NO: 953 - DNA, 369 bp, Rattus norvegicus
  Genbank Accession No. AA996993
tttttctttttttttttgcaggtttaactgattttaattgaacatgttggacacatggtgttgcacatgccattaatcttaacaattggaacacagatcctaaacagctacacactaagcatttataaacattcacaaacaaaaacagtttgcaactttttgaggaattgtagacacaagcaactaataacagccatgtggtcagctggaacttgagattagcactttggacctttcacttcaagcccgtcagcttccatcttcttcctcgtctcgaagatcgcacttattttcttccactgtcgatcaagctctgccttagcagtgggttcattgaagcgcctggttttccgtccccgtggtcagcaa

SEQ ID NO: 954 - DNA, 140 bp, Rattus norvegicus
  Genbank Accession No. AA996997
tttttttttttttttttcaagtttggtattaactttattcgattttctgtaaaactttaagtacataaaggtttatttccacaggcctcaggtaatgggcaaaaatcacaggacaatctctcttcctcttttcccacaaa

SEQ ID NO: 955 - DNA, 158 bp, Rattus norvegicus
  Genbank Accession No. AA997009
tgtttttttttttttttaaattgaaaaatgcattattgacaatccttgggaccatgggtcccaagaaaggacctgtaacgaaacacgcgtgtggtacccttaggtcagcccttcttttgcttgagcttttccaagtacacgtgcaaggacctctggat

SEQ ID NO: 956 - DNA, 235 bp, Rattus norvegicus
  Genbank Accession No. AA997030
ttttttttttttttgttggaataagccactttattgaatggtctctttcatgcctccccaaccccaacttctcgtcaggtcagaatggctttgggttgaagtcaccaatggtctctccttcctgtctctctctgtccacggcaccctgagattcagtggtctctgtggcatctgggagtgggcaggtaaccgtgagatcctggcatggtgcaaggtgtgccggcagctgacataa

SEQ ID NO: 957 - DNA, 318 bp, Rattus norvegicus
  Genbank Accession No. AA997096
tttttttttttttttttagcaaaaatgtttaatctctccttaatgtgtgtttatttacaagtactaaatctgaagaaccgtaaaataggaaatagcggtatatttacacatctgatggctgagcgtattggctctgccgcttccagagaagcaatggccgaggcctgatctacttagaccatccaaatgaccagttttttttgggtgggtgggggttgggggaagcaggtaagagggagtgttctgcggcattaaaggacagctaatcatgggtttcaccttataaatatctttctctctctaaatatatctactcta

SEQ ID NO: 958 - DNA, 431 bp, Rattus norvegicus
  Genbank Accession No. AA997167
tttttttttttttttttgcaacaggatccggtttattctccttggcaaggtggtcctgagaggcttgaaagaacagtttagagaaacagatgcagagacaaatagccaagcactagacagagcttggagagttgtgtggaaggatttggggaaggattaagtgaccaaaagaagatagggaatcacaggaagaccaacagaatttactaccctggaaccttgatggctcccagagactgaaaaacaagcaaatctgtgaggatgaactggatctacgccccatctcatatatggaacagatgtccagctttgtcttcatgtggcttcctgaatttaatgcctgcctgtggatcccattcgcctaactgggctgtcatgtctggcctcagtgagactatgtgtagagtcctataaagaatgtgtcagtgtag

SEQ ID NO: 959 - DNA, 403 bp, Rattus norvegicus
  Genbank Accession No. AA997189
tttttttttttttttttaaatgctggcaatgtagagccagaggcatagctaccccaagagttagttaaacagacactgccgtgctgattgcctctagccattctggaagaagtctcttggtgagaggcagagtgtcagagtctgtgttacttctggggactgacgaggacgaggctccggggtcgtgcgtggtggtcttggtagacaccggtctgtgccggtcctcacccactgcccgcatttcctcagctccttgcagggcattctcagaactcagggcagctgcaaatcaggctggtggggaagcattacaaaagtccaattgagtcaccacattttatttcttagtatgtttaacattttatatcagattaaaatttatagtgaaccctcgtgccgaatt

SEQ ID NO: 960 - DNA, 396 bp, Rattus norvegicus
  Genbank Accession No. AA997237
  misc_feature (1)..(396): n = a or c or g or t
tttttttttttttttttaatggggcaacatttttatttctgtacattgacatacaaattttccccaaaggtacaacagatgcgacaccatgcagacacgcagctgtgaatgacagttcagagctcaacataaacttgtgctgtgaacaggtaccgcccccgtcgacacatacagtcacgcggctcttaagaggaaaagcacacatggttgggttgcagaaaggacagaggtanggaagcgttcctcactagacacaacacaccatattgtttttccaaaacacacacgatacattagagtgaggtggtgtccttcagaacagggaggagttgaagtgtgggcctccctcaacccatgtgccacccaagggctgggtgtgtgatggtcacgagattc

SEQ ID NO: 961 - DNA, 497 bp, Rattus norvegicus
  Genbank Accession No. AA997342
tttttttttttttttttgataaaaagctgtttactgtctgacaaagtcaagctcacaaagaaatttccttgagtttaataaagatgctaaaaatgttactttttaagtagttaacttttttttttttacaaagttctgtacataaaataaatatacagaagcaaaccccatcaactgtgtacatcagtaatcctcactggtgggctcaccatttataaggaagacatcattcaacgcatcctgtcacagagaccaccctgtctgtcatcaaggacttctgccccaaagggccatcactgggcctcctcgatgaagtctgagaaacagcaagaagcctccaacctactgactagcaagtggccacaaaaccaatagctgtctcgtctagagtgtggcctagtggcaatgtctatgaccaaagcccttaaaatatgaggtgttcagaacagaaatcagccctacctctccttggccagtcactgtgaaagtgtgcgtaa

SEQ ID NO: 962 - DNA, 489 bp, Rattus norvegicus
  Genbank Accession No. AA997349
tttttttttttttttttcatatccagtccacagcaccttccattttattgttttatttacaatcaggggtgggagtcagtcagggccatccaaatgtggagtagttcctggatcaatctccaccatgaaggccgcctcttcttttcttgccccttggatttctcagggcagcctcacttgctgctcctgagccctttgaagggcagatggatcctggggaacagggtggtacgagggctggggccccctcagtttgtgtaaacctgagttccaatcacacgcatgatttccttctgtatcttggggtcctgagtattaatgttggcatcgcccacttgcccatcctcatatacaaagaagaaccttgtgcagacatggtcagacacagggcacacccaaatgtttccatgcttctggaggtccttagatgtaatcacttcacagagtgctatacagtttagattccgactctgcaggaaccttgactga

SEQ ID NO: 963 - DNA, 456 bp, Rattus norvegicus
  Genbank Accession No. AA997362
tttttttttttttttttgggaaaggctttcttttactcatgattttacagctgtacttgtggccccaccacaccatgattatttagtcctaagacccccctaccccactgcacccccatcatctttccacagccagtgcttcctggtgctctcgcagggggaaggcaattcggaagatgtcgcggtagtgttccacgaagtgaacctccaggccctctgtgatgaagggagccaagtctgagaagtccttcctgttctcagcaggcaaaatgatgcaggtcactcccgcacgcttagccgcaatggtcttctccttgatgccacccacaggcaacactttaccagtgagggagacttccccagtcatggccaggttctgcaacactggctgccccagagctagggacagcaatgcagtgacaatggtgcaacctgcactagggccatccttggggg

SEQ ID NO: 964 - DNA, 478 bp, Rattus norvegicus
  Genbank Accession No. AA997374
tttttttttttttttttattttaagtggttttaatgaaaaagctattgtattcccagaagtacaaacagcatcatgatcttacatgcagactcaacaacctgcatggtgtaaggaggcttccccaggcatcccatcatccctccagccccacagtccatgattcttcctttagaagacaaagacacacatgctgaatggaaaagctctaatacaaataatctgccataaataaaattcacacttctgaatgaatcaaatacacaattaaaaatattcttttctttcttgctgtaatttaaaggtccaactctgaaaaatacagattttttaaactaaatctgtttctttcaaaagatggaagacagaactcacagccatgttgggtttcttcagccaaggctgacttctataccccaagatctacaacatgatcttctttttcggtatttttaagatgttgcccacagtttatgtgaa

SEQ ID NO: 965 - DNA, 369 bp, Rattus norvegicus
  Genbank Accession No. AA997445
tttttttttttttttttacttgaaaatacagttcttttatttggtggagtggttgtgacatggtctctccatgtagccctgactgtcctagaacttgctatgtagagcaggctggcaataactcaagagattttccagcccctgcttctcttatactgggattaaaggtgtgcatcaacatgcccagccaaaaatgtagttctttacctaatttcctatgccaggtgttttcactaggcacaccatcaggtttggtattggctggaacgcccccatcccacactctcgtcctttcctcttacccagcatactccatatactccatgtgacttggctatcctcaaaagtggatcccagcccctcgtgccg

SEQ ID NO: 966 - DNA, 551 bp, Rattus norvegicus
  Genbank Accession No. AA997486
tttttttttttttttttcagttttcaaagtaaaatctattaaaaaatggtaatatacatgtgtgagaaatacaagaagtggtcactgtggttagtcacagacgcaagagatctaaggatccgaggcttgtgaacacagtaattaagagtaaagtaatatgcgagttccaattgtgtgcacaactttgagaagccggtcaagtactactagaaaacatagtatagttggtaactctaaaatttatattattccttttcctttaatatttttaggtacataccaatgagaaaagcaatttatctgtatgtaagatcaacagaatttttgtgttctagactataaaaagttaatatttaataaaatgcaacatcaacttataaaaaagaagaacaaagcaacacattatataattattttatggtctcccagctgatctgagaccacagaaggcatttaagaaagactgtcaggtaaacaacaaagaccaacccatgggatgtatactgtttacgaatttcacttgcagggaaacgagtagcctggcttaattt

SEQ ID NO: 967 - DNA, 397 bp, Rattus norvegicus
  Genbank Accession No. AA997494
tttttttttttttttttgagcacaaacattttaatggtctaaaatgagattttcttttaagagattatctacagttcaaagctcactttgttttgtgtcccacccatgacccttttagaagacataaaattatgaaggatatcaccagaagctctgtaaacatttcatctaaggaccaagagaagttcaaggtgtttcacaaggaaaccaaagagacaactgatatgaaggagctgaccgaggtcagagaaatcttgttgcaaaccagtccaaatcctactgcattaaaaagtcctctctgacttgctgggtgtgggtggtgcccatgctctcccacaccagaaggatcagttctggcaagatgctcagctgcgccttgatatactgttagtaactt

SEQ ID NO: 968 - DNA, 431 bp, Rattus norvegicus
  Genbank Accession No. AA997499
tttttttttttttttttagtggctcttaaaagagcctttggtgttaaccctgctgaaaagtttacttagcgctggtgtatttggtgacggccttggtgccctcggacaccgcgtgcttggccagctccccaggaagcaacaggcgcacggccgtctggatctcccgggacgtgatggtcgagcgcttgttgtagtgcgccaggcgcgacgcctcgcccgcgatgcgctcaaagatgtcgttcacgaacgagttcatgatgcccatggccttggaagagatgcccgtgtccgggtgtacttgcttcagcaccttgtacacgtacaccgagtagctctccttacggctgcgcttgcgcttcttgccgtccttcttctgcgccttggtcacggccttcttggagcccttcttcggtgcgggggcggacttggca

SEQ ID NO: 969 - DNA, 491 bp, Rattus norvegicus
  Genbank Accession No. AA997521
cggccgcagcagcagcagcagagacagcagcagcaacaacagcctgagcaagccacagcagcgccctggctcctgagccccccgtgggctgaaggcattgcaggtagcccatggtccctgaagaagtgtgcagatgggattaccgtccacatggagatatggaacaggaccagggattggcaccgtgaccatggtcagctgggggcgcttcatctgcctggtcttggtcaccatggcaaccttgtccctggcccggccctccttcagtttagttgaagataccactttagaaccagaagatgccatctcatctggagatgacgaggacgacacagatagctccgaagactttgtcagtgagaacaggagcaaccagagagcaccgtactggaccaacaccgaaaagatggagaagcggctccatgctgtccctgccgccaacactgtgaagttccgctgtccagccggggggaatccaacacccacaatga

SEQ ID NO: 970 - DNA, 340 bp, Rattus norvegicus
  Genbank Accession No. AA997555
tttttttttttttttttaacaggaagaaagtatttaatatgaaacaaaaatgcaaaacaaagtagtaccaaagtcacagaacacaatccctttggttcagtgatcgcaccaatatttcatgttcccactggctacagacctcttaccctaaagtgaagtcagactgccccaaaccaccacacaccttactgctcagcgatattgtttgtaacttatatggggtaagaacaggggaaacagcttggtttgaaaaggggggggggggactacacgtgcggaacaagtcactgggagagagctcgccactgggtcaccattacaaccctatacatgctacatt

SEQ ID NO: 971 - DNA, 470 bp, Rattus norvegicus
  Genbank Accession No. AA997577
tttttttttttttttttacagaagtaaaaacatttatttttttttccatctttagaactctggtcccacaaggtcagcagtcttgacccttcataaaagaaaccttttaactgaagggaaggttaagtctataaagaaactaggaagttcactgaagagacagtaatttcttataaaccactactcctggtggccacttctggctgacaaactctctctgtcacagtctctgaaggaaaggaaggaagcatctacaggtatgttcctccagaagccatccgggaaagacaagtgccagctacaccatgaacctgtgagcccagagcagaaccagaggacaggcagcctggcccagtctgtaatgcttcaacttcccacaacactgtgcagttggcttccagagcctgcctcacctgaggttgaaagtcataaaaccaggtatgcaggctgccctcccactgctgcctcca

SEQ ID NO: 972 - DNA, 302 bp, Rattus norvegicus
  Genbank Accession No. AA997589
tttttttttttttttttagtgtattaaaatttattagaataatctagaatccagctacaagaacatgttctcataacaggtactgatagaaaaacttaatgaggcatacaccatggggcctccctgctaggaccacattatcttgtcaatacttaggctgtggcaattttcaggaggggccaggtagttctaaagcatttataggggctataggttagtgtgggtctaggtaaatacactggctgccatttcaactaaatttatgctaaaatatgcatagaccacagaaagccctcgtgccg

SEQ ID NO: 973 - DNA, 460 bp, Rattus norvegicus
  Genbank Accession No. AA997596
tttttttttttttttttgtcaggtatgcatggttttatttaaaatgtctccaataagattttccacttggaatgaacattttttttttacctctttctgcatgttgtcataaacattatctcctcatttcatggagtttcttagaaagttctagatgatgtaacagaagagtaaaatgaaagtgtggggagattaaataacagggaggtcacagcacagcgagggtgctcttgcctcaagtcagggacacacaagtgactagtgggtgaagtaacagaccgggtcatgcaagtccccttgtgtcacctggtgtcctttggcagttctggcgtctcctgtcattagcacagaagacaaagtgagtctgacagcatcatcggcaaaggggaaattgtcttctggtggctgagaggagacagacacagaagcgtggttgctggagcgttctctaatgtctgaa

SEQ ID NO: 974 - DNA, 460 bp, Rattus norvegicus
  Genbank Accession No. AA997699
tttttttttttttttttcatggttttgtagtagttgttttattcagtactttgtaaactgagactaatacactgacattcaaggaaagcacttctttacactgtcacatcttggcataggttatgccaagtaccagaacattcctttttacctgtcataagtagtgggtaacagtggggatagatccttccaccttaggaacgtcatggtcatgtcacaatacacctggtttagatggagcaccaaaattccagaggacatcctacccacgttctcaatctcctttccccatgaggtcctgacggacttttccaccaatcaaatccgagatgctctaaacctcaatacttctattcagttgggtgcaatggggtcgacatggaagatccctcatctcaatttacaactttaggactaaacaacgttgagtagggtaggtgaatgacatccgaaatcaagc

SEQ ID NO: 975 - DNA, 425 bp, Rattus norvegicus
  Genbank Accession No. AA997746
tttttttttttttttttaaattgaaaaataccttattgataatccttgggaccatgggtccctagaaggcacgtgtaactaaacacccgtgtggcacccttaggtcagcccttcttttgcttgagcttttccaagtacacgtgcagggacttctggatggagtctctggagatgaaactggtgaagttctggatgtcagcctctcgctgcttgatcaggttgtccgccgtggccttccgcatcatgctcttcgtcagctgccgagaatggtctgaagaaaatggggttacttatgaaacccacctgtggagtatttggggccatttcccactctttgccacatgttcttcaagtactgagatatggactctcctagagagttcagaaaaccagaatgaaagcatttgggcagctaacgtgggcta

SEQ ID NO: 976 - DNA, 422 bp, Rattus norvegicus
  Genbank Accession No. AA997763
tttttttttttttttatccttgctcaactccgtttattttcccacagtgcttcacgttcaccttcatagctaccaacaaatcaaatgtacaagagtatgttacacactatacaagggcgtctcagggcgaccaggaccccggtgaggaggtgtgcgttcatttctaaagtgcatgcttcccccacccgggcgccggcgcggcctctccgcccgcccacgaggaggtcaggaggtgagagactggatgttcctgagcatctcatcgaaggcctgtggcgatggcgcgtcggcgttctggaaggtggcctggactcggctgtacagactgaaggacttcagttccagccagagaaacccaaagcggtcctcatcgaacaggacgaagacgccgggggtacgctcggggctcgtaaaaacatggc

SEQ ID NO: 977 - DNA, 502 bp, Rattus norvegicus
  Genbank Accession No. AA997779
tttttttttttttttttgaggtttcatatcatttattgtaaagcacaaaacaggcattgaaaagtgaaagtatacattgaaaaagtacatttatatcacaaagcatcgaccacataatagttgcaaatacatttgctggaatgtgtacatctacactaaagactgaaacaaaccaattttcatttctacacagaaatattaacctcctatcagtagtgatagatattttgtacattttcaaaataaaaaaaagaggggggaaaaaaacactactttaaaccaaaaacaaaattaagatcttcatcaagtcgtctgcatccatatatttaacaaaggttttttcccccacacaatgaagcaaatactgtattgtccacttcttattattggccctgaggtgctggcggatgctgcggcattccctggggactggtctgggcatagtatgctgcttgctgtctatagtattcagcccaggctgcactgtaatctggctgaacac

SEQ ID NO: 978 - DNA, 366 bp, Rattus norvegicus
  Genbank Accession No. AA997806
tttttttttttttttttcccatacctattactttaattaattttcatgaacaatcctatataggtattatccctatttttttttctgaaccagggttaggaaagccagattgctcgcgatctaatatgttacaatacaaatgagccaagttgaggggtatgctacacaataaggaagtatttatttgctttcccctccctcctactttccatcccgagtttgtcaagataactcagatcttgatttttctctaacttgtaaaaatatgtcatcttgagtttgggctgcttcagaattcttggtctttgtgccagcttggttgcaggtgtagttcctatgcgcttcctgctcttgctgttgactgca

SEQ ID NO: 979 - DNA, 488 bp, Rattus norvegicus
  Genbank Accession No. AA997819
ttttttttttttttttgaggccacaaaagttttatttacaaaatatatacaactatacatctgggccggtcaccatgggaattggctagaggagacgaggtgctgtgctatacccactccacaaggaagagaggcccaccagtgcctggtaggcctggctcggggccagctgtcggtgttcagatgccccgtacctatctgggtgggtgacaagtggcgcagaccttcatgtcttgatgtccagcaggggcattcgcttctgctggtagccgctctgccagccatgaactaccttaaggtctcccacatcagacagcagctcctgttcagcttcgtggagctcttctgccgggtcatagctatacatggtaagcaggtgatggcgaagccggtccacccgctttttcttctgcacatacattaccacggccaccaccactccgaccagggtgatgaggaagaaaggccccaacacgtaacccaccatg

SEQ ID NO: 980 - DNA, 436 bp, Rattus norvegicus
  Genbank Accession No. AA997841
tttttttttttttttttaatagactgtctttttaatgagtatcttatgtacacacacacaccatacaacaagcttggttccattataattccatcaggcgctcaggtatgttcaatgagctgagatagagttgaggaaatgacagagtagttgaggaaatgactgggatcgtgaatgaggacatcgaagaaaatggggaggtctctgaggaaggtttcatcagacgagttccggtcattcttctggtacatggtcacgaatatagggatctgatctgttatcacatacacgtctttcactttggagatgggaatgtatgcccggccgtgtcttcgaaagacaatcacttccatgacctgagggccaactgtcaagttgactgtgtttatagaaactcgtgctgaacactgacccagcttttgaaaatactgaccaa

SEQ ID NO: 981 - DNA, 448 bp, Rattus norvegicus
  Genbank Accession No. AA997882
tttttttttttttttttagaatggaagcttgagtttttattcatggcttgccagtctccctcctgtccaggagggtgaggtgagaggggtgggttttagtctaggacggtgcagactgcagctgccctttgtagacgtactccagcgctgtggcaatggtgcgcatgtccagttcgatgctccgagcccagttctccacatccccgatttccttaagtgcctggttgaagttttccaccatgccaatccactggccggtctgcttggcaaactgggcagcctggacctgcagggtcttcacctcatggtccagctttctctggttcatgtaggcctgggccacacccacgttgaggtgatccaccaacgcttcggtcaggcaggtggctgcagtgatagcctctcgcctcctcttctcctgcagctccttccgttcgttctgctttgc

SEQ ID NO: 982 - DNA, 540 bp, Rattus norvegicus
  Genbank Accession No. AA997883
tttttttttttttttttacaaaaatacagatttattgtgtttcaacattcttgcaactgtacagagaccaagacacacaaacgtagtcttcgtgttaaattatgaacaaattgggaaagcctcagggagtctaagctgctacggtgagaggcactccgcctcaaccccaccacagtctacagtcgctggttaatgctatggcagcaacagagaagaaagcaacgtaaggttctgatggctcagttctgtactcccagcacttgggaagctgaggcaggaggactgctacaagtctggaagtagcataggccacaccgtgagttctaaactgggataggagacagaataagaccctgactcaaagactaaaattaaaaaaacaaaaacaaaacagccatggtcttgatgtccagaggccacgggtgtgcacatgacctgagaagtcatcaacccaaagacaaacgatccaggatgcttggtcttccatggtgggaaggtgttgtcctaagcccacgagtacatcctgcaacaacaaaacct

SEQ ID NO: 983 - DNA, 159 bp, Rattus norvegicus
  Genbank Accession No. AA997890
cggccgcaatgttttttctttattgtttttttttatagatgaatgactttacttcattttatggtacacaagggatcaaaatctgcaacagagggaggacatggcaacacattgcatggtgcctcaagcaagaaactgagagctcacatcctcaatggt

SEQ ID NO: 984 - DNA, 390 bp, Rattus norvegicus
  Genbank Accession No. AA997905
tttttttttttttttttcaaattataacaattttattatttaacataatcccaatgtatatacattatcctcccaaataagaaaaaatttaattccagagtttaaaatgtggtttccaaaatgaatccttattgtaaattttgaagaaaaaaaaaaaaaacccctgaaaactaattctaacgttaaattttgatctttgactaaaatacacaccttataccaatcagctctctcatacaaaaatgcatattataaataaaactttcaaaagtgatcttggatgttttattgcacatcaaagagaagatctgccagtctgaatggctctcagcctctttttatcatgcagtttcaaaagctactgactctgggtggatacactgaggacat

SEQ ID NO: 985 - DNA, 390 bp, Rattus norvegicus
  Genbank Accession No. AA997985
cggccgccgcgggccggagagaagggaagggaagggcgcggggacgcggggcgcatcttggcggggacgccgggcgcatctcggcggggccgggcaagcgataggagcggcgcccggggtccccggagtcccctcggtcccccacctccgcgggacggcggcggcgcggtgacacggtcctgggctcgcgggcgacggggagggcatcccgaaggggtctggactgcggcttgacaggtgtcgggcgggtggggctcctgctcccgagcgaagtgacaggtgcaggctctactccagcgacgcccaggcgcggagccggcgggtcctggagagccccggtcagacgcaaaaacaattgaaataaatattaaaaaaaaaaaaaaaaaatct

SEQ ID NO: 986 - DNA, 146 bp, Rattus norvegicus
  Genbank Accession No. AA998124
tttttttttttttttttgaaagttccatcacacatgggtgtcttttaatgggaaaacaaaaaatcagagaaaatacctggccaggctggcgtgagacaaatgggaacgcttcggaacccaaggaggagagggagggaaggaaggag

SEQ ID NO: 987 - DNA, 326 bp, Rattus norvegicus
  Genbank Accession No. AA998128
tttttttttttttttttaaataccagatgtatttattacaaaagaaaccctgaaatgcagtagaatcgtagaagaaaatagaaaattaaaaaaacaatctctttacaagtccatcaccaggagagagtggaaaagggagggaggcggagcaaaagagccaggaggaaaatgctcatcataatgagtgggataggaaagagactcgtacagttagttaaccattacagagactccgtccagaggcgtttgggataaagtcttggtgcgcaatcacagacctccattctgactggccgggaagtcagctctactacagctgtctcatg

SEQ ID NO: 988 - DNA, 208 bp, Rattus norvegicus
  Genbank Accession No. AA998132
tttttttttttttttttcgtgaccatgattttttatttaacttgggagcatccccttgctgcgtaaatacttacaatcaatcacacgttcccacacggcacaagtctcagcctgggagccaggctgccccctgtgcctgtgtagaggaggcaaggccagcacatgggggcccttttaggacaccactggaccccaggtgtcccagcca

SEQ ID NO: 989 - DNA, 548 bp, Rattus norvegicus
  Genbank Accession No. AA998151
tttttttttttttttttgcatttcaatagaactagctttatttattattcaaacaaaaggaatggcctataagcaagtgcagatacggactgaagggggtgggcgtggcctgaagcttacaaaggcgccgccgtctcgcgacggaaacagcagactagaaggaacggaatagtgatgtctcgtctgctggaggagtctgaagatgcaaagttaactggaaaaaagaatttttttttttctttagaaaaggtgccgtgccgagtggtcggcgggagagagagagagagacgctaaagtggcttctgagagccaggctctgcggcttgagaactggcatcaactcacgggcttctcattttccccattttctataattttcctcttcttttcatctgtctttttcttgaagatgttatttcggtaaaactgaagctctttgatgctttcgctaatgtcatccagtgccctgtgagaagcagccttcttcggtgcaaattcataatcttccggataccagcgtctgcacagctctttaacagtgctcacat

SEQ ID NO: 990 - DNA, 504 bp, Rattus norvegicus
  Genbank Accession No. AA998172
tttttttttttttttttcccgtggaaaaacatttttttactgatagaatttaagaattaaaccaataagaaaaccaaccaaacaaacaagcaaataaacaagcatgtctagggattacctcagcggcagagcacttgcttagtatgtgctaagccccgggtttgattccagtactgtaaaatatatctatttatatataatatatataaaacgaaaacaagcatatacaccttaagataatataaaacttgaaataacatcaggcattatggaatgggaaacaattttgacaccacccccacctcctacaatacaaaggaaaacaacaggttgggggtatgatgacaagcagaactctggatgattaacattacacagaccctacatcacagaacaccacagagtgagttatacattagtaagatcgtcctgacggcagtgcaagtcctagatcaaaaatgagttaaaagtttgcggtgtaaataacccacctgtgaagagatg

SEQ ID NO: 991 - DNA, 283 bp, Rattus norvegicus
  Genbank Accession No. AA998234
tttttttttttttttttaataaaaatatttttattatgccacaatgctttccaaagttatgtatcatctacagtcactgaaattgataaactaccagctccaaataaagaagcaaatcaaggagctatggacccgaaatcgaacttcaggaaggttatctaattaatgagctcctttggatttcctaattagtagaaccctgtgatcaaagcagggagcccagtctccaccaatctcctttcaggaagcatataagaagactgggctccctgcctcgtgccgc

SEQ ID NO: 992 - DNA, 469 bp, Rattus norvegicus
  Genbank Accession No. AA998266
  misc_feature (1)..(469): n = a or c or g or t
ttttttttttttttttaaatgttgatcctcaagttggatttatgtccaagatttgtgcaaacagctgcctagtaacagcagctaccttaatacagacctctggcaccatagacataactgtgggggctgaggtcatcttcagtctggggccctttagcagacctggctggtgtggccttcattccagatcatggtggctctcaggaggccgacacaggtgcagtggagagcatgacagcatcaggccatcccgttgttctcttctgctctagagacaaagctctcttccctaactcctcacagaggggtaatgagcagggggtgcagggcaggtcctgctactgagcttgaagcaaaaacagcacatgcacacgaactgggtgtggtctctggagagcctggaaccaagtctttgaggttctgagaggaaggggtcttgttgcaccccactcttangatggaagccagt

SEQ ID NO: 993 - DNA, 494 bp, Rattus norvegicus
  Genbank Accession No. AA998268
tttttttttttttttttactgaaaaagccattactttttattagaaacaataatgcttctcaagatgttggcaacaaggcatagtatagcacacatttcatacagtgtatttctccctttaattacattccagaagtgggtgggacacctccttggccatgagaagctgacgtatttgatggactatgtaagctggtctccttgtacacaaaccaagcatttcctccccaaagtatcatattcagaaagccaaagatcacggatacattcagggaccccatactagtcacagagacaaagtaacatgacacttctgacttacaaggatcaagttcttcaacaattctgtgtccagtagctaccttaatatctgtaagagctttagcccaggccgaggaactcaccaaccacaaaaaagtagcaacaagagtaacaataaagtcgatcatgggcagtttgcgactatcccggtagaggttggtgtaaccaacata

SEQ ID NO: 994 - DNA, 124 bp, Rattus norvegicus
  Genbank Accession No. AA998345
ttttttttttttttttgcaagttaagaagatttattgacagactagtcttgcagtccaaaaccgggctgaccgaggctcaagaagtttgccatggaaaaacccgttttggattcaatccccaaa

SEQ ID NO: 995 - DNA, 442 bp, Rattus norvegicus
  Genbank Accession No. AA998352
ttttttttttcttttttgttggccaccaagatgatgggcacattggggcagaagtgctttacctcgggcacccacttctcggggatgttctcgagagagtccgggctgtctaccgagaagcacataaggatgacgtcggtgtccgggtaggagagcggccgtaaacgatcgtagtcctcctggcccgccgtgtcccacagcgccagctccacctgcttgccgtccacctcgatgtccgccacatagttctcgaacacggtgggcacgtacacttcggggaactcgtccttactgaacacgatcagcaggcacaggggcatacgatgcacggagtgtcgccgcgctgctgccgggtagtgttctcggctgtcccggagtcgcgctgctttgtgcgagtcgatggctgattttgccgacccggcctaacttctttcccggggcg

SEQ ID NO: 996 - DNA, 246 bp, Rattus norvegicus
  Genbank Accession No. AA998422
tttttttttttttttttaaaaattgacaagtttatttatgtcacagcatctactacagccagttcccctcctagatcactctttctccttcctagtttttcaagacagggtttatttgtttaatagttctggccaccctggaacttgctttgtacaccaggctgggcttcaactatagggagggaccactatcacgccccccaactcattttttcctttttttcggagctggggactgaacccagt

SEQ ID NO: 997 - DNA, 352 bp, Rattus norvegicus
  Genbank Accession No. AA998471
tttttttttttttttttggggttttaaaggtttttttgtttgtttttaaacagtctggtccctgataggggcctcctacccctctgcagcctgctacagttctgaacgtctctcaatcttgagcagttccacctcaaacaccagggttgctccacctggagggagaaatgtcatcagactgggacctgggactctgggagagtgatgggctgagggtgttaagggttttacctggtatctttgggggtgggaggatgagccccctactgtaatggtgtgtggggtgggagatgagccccctactgtaatggtgtgtggggtgggagatgagtcccctactgaaatggtgtgt

SEQ ID NO: 998 - DNA, 557 bp, Rattus norvegicus
  Genbank Accession No. AA998660
tttttttttttttttttccgaataaagtttattaaataatatgtacagcgaagtagtaattcaacatgtctatcaaatcaatccacggcagtaaggaaaaacaataaatgaacagaaaaacctgtgtctgcgtagtacacgcgcttggtgtgcaatttaaatgcaatactctaataggttacatagatcggttttgtttttttctctcaataatgtcttcttttttggtagtaacctattccagcaatgtgacttaatactactgcagataaataggactgcaaacgtaaaactgcaaatatgatatgatagctgtcttctcttccccagagaacgagtgaatatgttaacaatttcccaggactatttttgtgctaaaggtccgcaagtgaattattcgaaattccttcatttaaataaaagtgttgggggggggaaacccttcgtgacttcattttactccctttctgctcaacttttaaaaattatttcttctatacaaggtaagtacatgggctccacaaagttaaacatacattacatatttacagtcccac

SEQ ID NO: 999 - DNA, 370 bp, Rattus norvegicus
  Genbank Accession No. AA998666
tttttttttttttttttgttttttggaaggagttcccgaacctccgctgcttggtggtgtgtccctttctttcctgctgtgtgcctcccgagttgcaccttttctccttcgaaggggattttagttttttaattttactttttaatttttttttttttgaaggagttcccgaacctccgctgcccgttgagtcccgttcttccacgccacgtgcctcccgagtgcaacgcttccttttttttctcgccctcgagaagggtaaattttttttttttttgtgtgtgtggcaatgttagcgacttcttcccgtgctctctctcgctcttctcgctcgtattcccgcccgtcacgcttaacgcacgttcgtgtg

SEQ ID NO: 1000 - DNA, 453 bp, Rattus norvegicus
  Genbank Accession No. AA998683
tttttttttttttttttggtgagcagtagtttccaacttttatttgagaaaaacagaaagtacatgtatcaaaagagcattcagattgacagagagggagggctggtgacggctactggggatgggtagcaagctgaaggcttctacttggctccagactgttccgactctgggcctccaatttgggcacgggcctcgaaagtgaccggaatggtgatctccgctgattgtgtgactgctttgggcagcggagcctccaccgtgagtgtgccctcaggggacagggaagaggacaccaaggtggggtccacacctggagggagcctagaggagcagaaacaaaggacaagggttacacatccctcctgaccccgccctccgcccagggtccgctcccccaccccccagctctccatgcaaggaaccagaactcacgtgtatttcccctcgtgc

SEQ ID NO: 1001 - DNA, 230 bp, Rattus norvegicus
  Genbank Accession No. AA998690
tttttttttttttttttggtgggaggcaatcctttaatggggtggggcacaagatagcaaaacttccatccaagagccacaggaactgaagccaacgtgaagcggcaagcttttcggtaacaatagttgaaatggcacaggtgaagggttgggcaaacaattcaaccctggtgagctctgccaagccccactgacagcatctggtacaaactaactcaggcgtggaaaac

SEQ ID NO: 1002 - DNA, 389 bp, Rattus norvegicus
  Genbank Accession No. AA998752
  misc_feature (1)..(389): n = a or c or g or t
tttttttttttttttctcgtctcaaaatatttaattttgtttgaaaaggatacattcccaccttccctccctaccacatcactccggcccaccagcagtgacacacgcacaggcacacacacacataaggccaatgggctgctgtctgcttccgcctctacagctgggacaaaggggtttcctcctggcctccttcccccagcaaaggtangganaggggttgctggaatgcggctcccagggagggtgcagagccccaaacactctaccaatcacatgcacttagaaaaataaaaccaagtggtgttccggcatccaacaccaaacgacagcaatctctacctggaaatcatctttgcctttttctagaaaaatttattgcaccctcg

SEQ ID NO: 1003 - DNA, 431 bp, Rattus norvegicus
  Genbank Accession No. AA998857
  misc_feature (1)..(431): n = a or c or g or t
tttttttttttttttttaagctcaaagtagtgtgctttttattcttcaacaaaaccaaggaaactgattaaacttagaagctagtgcaacaatttagtgttgctgaaatcaataaaataaaagtaatgagagcagaggaaagggtgttaactgttcctgatgacatgccaagctattttagagactgcggccaaagcttctgcgcaagtgggtttgatgaatctctcaggcagcaagaacccgtatctgcctgtatcccgaagttcaatcgtaaacgaatatttgatgcccaaatcatagatccaatcatcagaacctccaggagctagatataaactttctgagccactgccatgtgtgtacctggtgtttttattaatactttcaatggcacgaactgcttcgctggccactanagacagttcctcatg

SEQ ID NO: 1004 - DNA, 470 bp, Rattus norvegicus
  Genbank Accession No. AA998959
  misc_feature (1)..(470): n = a or c or g or t
tttttttttttttttttaaggactggcgcttttattctctcctcggtcagctctgcagagcattccgacaggcacagagggaaaatggttgcattttttaaagctcaatctgcccaaaatatgtattatttgaaatcatgccacggcccttagagcacaggcaagcactggaaatgcgaactggaacacagcatggcgaggcttgcagaaggctggggtgactgtgaggtttctgacggaaagctgggacgcatggtcagtggctctcaatttcctgcttgatctcggagatgtacgggtggtccttgccatgagctatttccatgatggcgatggccttcttcagggccttctccccggcagctttgttctccaggcccatgtacagtcttcccaacttcagccacatggaggccacgttgagggagtacacggggtantgcttactgtaaggtttgatgatcttctgg

SEQ ID NO: 1005 - DNA, 135 bp, Rattus norvegicus
  Genbank Accession No. AA999006
tttttttttttttttatcagtgatatataaatttttattatgaacatagagcaaatttacaaataactcccaattggctttagccgggcaaaatgaagtaacccaacattgcgtgggtgaagcaaaatatacaca

SEQ ID NO: 1006 - DNA, 407 bp, Rattus norvegicus
  Genbank Accession No. AA999060
  misc_feature (1)..(407): n = a or c or g or t
tttttttttttttttttgattctaagctcatgttttatttcactttgttctgtggataaacacaccaggcttaaagaggaaggaagctggttgacaagttgagctaccctttacattatagaacaatagtaaatatgtgtcctttaacttcagtaggacaagggcatagctcagtgcaacgcaggtgcaggagtccctggcttcaattctaagcatcaaaagaagaacacatcaggtgatggcagcacagcctttaatctcagcattctgaaggcagaggctggaggatctctgtgagttcaaggccagcctggtctgcagaattatattggtctgttttactttattctaaaattttgggccagcaagattgactcagtaggtanaggagcttgctgccaagcctg

SEQ ID NO: 1007 - DNA, 342 bp, Rattus norvegicus
  Genbank Accession No. AA999064
tttttttttttttttttgggaagggtcacttcttttattatcccaaaaatgcgaagtattgaaggcacttgcaagaacatggagagaggaggaaagcaggaagcaggatcccacctggtcgttacccagcctggagaaaaagaaaagctatagagccaggtcggaagtcagcccggtgtccactacagaaggcgaatcccattctacagacaatgaggaagttaagagcacgggggcaagggacggggaccagcagtcacgagttagtggttctttaaggaacacatttggcagtgaggacaccgttcagggcccctgctggaaaaggtctcggtacatctc

SEQ ID NO: 1008 - DNA, 408 bp, Rattus norvegicus
  Genbank Accession No. AA999079
tttttttttttttttttccattgctgaaagtgatcgctttattggttagaaaaaggagatgcttttgtgggaccaggacgaaatgcaaaggccagagagagaagaggccacaggaacgacaccagaatgcatggtccagcagaagcaacctctctccattcctcaggctgctggtggctgaagctcagaatttgggtgtggtgcagcccatcttcccacagccatttcggcagcatttcatgttgccagaacactggctgtccatctggcactggtcctcacagaggccaagcttggggaagtccacgctggggcaggtgccctgcttttctccgttacctccttctttggtcacaacgggtggcttcgtggacacttgacctctcgatagaggagatgtgcgggcaa

SEQ ID NO: 1009 - DNA, 407 bp, Rattus norvegicus
  Genbank Accession No. AA999096
tttttttttttttttttatggctgggagcatttattgttattttggttccccccttgaagttccctgtagtgtaagggctttggtcccatctcaacaaacacatctgccagcacaggtgagaggagaggatgttgggaacgctccaggacctctagactgtctcccagctcccttcacccctggcatctcaaggtccttttggctctgaagatcctcgggccacaccagggtacagaagcagtgggcctggagggtaggcagcatctgggcacagggcagtctcacacccagtactggccattcctgagggcaggattgggtgtccggcaaaactgtaatagttctgggtcaggctggcctccgggtgggggcccctggccaggtacagttgtgagtggaatggctt

SEQ ID NO: 1010 - DNA, 335 bp, Rattus norvegicus
  Genbank Accession No. AA999138
tttttttttttttttttagactgacatcttttatttcatacactgtgtaacctggtacataaaaagtaccagattatagtcatgataaatattttcatttccatttggtctaccaaaccaaatcacttagctattaaaataaaaaggtggggactgagccaacagttatgtgcaaacagtaagttttctcttccagccctcaaagcagcagctgctgtgggaatgagatgcagacctgatggtgacatgccttttcaaagaagctgagcgtccactctccagtatgaagatgacgtagacgcctatgctgactatgagcacgcgagcacacgagt

SEQ ID NO: 1011 - DNA, 200 bp, Rattus norvegicus
  Genbank Accession No. AA999169
tttttttttttttttataaagaaccatatttattttcatttacagcatcaagtatcataaataaacctaaacatcgcttgctgtgtgtgtaaaatacagggttccgtatggcactgtaaatgaattctctagggtcacagacatgccacgagatggagaggagactgtctaaagaggctgagagcaggggtggggtgcgg

SEQ ID NO: 1012 - DNA, 403 bp, Rattus norvegicus
  Genbank Accession No. AA999171
tttttttttttttttttagatgtgcaaagacaattttattcaaccaatgaccaaaaagacagcaaaaaccgtttagcttggtggagtacagactgaagagagtactcatgaaaatgttcctacttctactggtgtttagttttgttcagccatagccaccaacaaagctaatcctgaagagagcaaccaagccttaagattaacacggccaatgcagaagctgcattaaggaacacgactgtttccttcccactctgatgaaggatgcccactccagtctgatatatcattgtatctaaagttgactttgaaccatgccatacgtaagacagtggaagacttgcagccatagaggataggggacatgtatctccaggacagaagtatccccacatcatgaagg

SEQ ID NO: 1013 - DNA, 404 bp, Rattus norvegicus
  Genbank Accession No. AA999172
tttttttttttttttttcttcaacaacacatttattactcccactcagtggttcccgggggctttgacgttaggtcatacataattctagaaattccaggaatcttctttatctcagtgaccatctttagcaccacctctacaggaatttcattgccaggtgttgcaggtactccagtcatgaagtcactagtaataaaggttcgaataaccacagacctctggcatgaaggctgcttctgaagtggatctcgatcgaaatgtaatggggtcaaaatcactggcatctggctgattttcccagcatacccagactcccggagaatgttatgggcctcaaaatcagcttggcgtaaagtactgagcacccctgttgtcaaaaatgttgcctcgtgccgaattctt

SEQ ID NO: 1014 - DNA, 2730 bp, Rattus norvegicus
  Genbank Accession No. AB000280
accgggtccttagggaaccagccatggagggcgagcgggcgccgctgttaggttcgcggcgtgcggcggcagcagctggggtgtttgcggggcgtcgtgcggcgtgcggggcggtactgttggccgaactgctggagcgcgcggccttctacggcgtcacggccaacctagtgttattcttgaatggcgcgccgttcaactgggagggcgcgcaggccagccaggcactgctgctcttcatgggcctcacctacctgggatccccgttcgggggatggctcgctgacgcgcgactcggccgggcgcgcgccatcctgctcagcctggcgctctacctgctgggcatgctggccttcccgctgctggccgcgccccgctcgcgctcttttctctgcggggatccgcacccggagctggtgcgcaactgctcggctcccttccctaacggaacggcggtctgtcccgatgctgccgcgcgccgctgtgctcccgccaccttcgcgggtctagtgctcgtgggactcggtgtggccacggtcaaggccaacatcacaccctttggagcggatcaggtcaaagatcgaggtccagaggccactcggagatttttcaattggttttactggagcattaatttgggagcaatcctgtcattaggaggtattgcctatattcagcagaatgtgagctttctcacaggctacctgattcctacagtctgcgtggccattgctttcctggtcttcctctgtggccagagtgtcttcatcaccaagcctcctgatggcagtgccttcactgacatgttcaggattctgacctacagctgctgctcccagagaggagggcagcggagaagtggtgaaggccttggagtctttcagcaatcttctaaacacagtctgtttgattcatgtaagatgtcgcgtggagggccgttcacagaggacaaagtggaagacgtgaaagccctggtcaagattgtgcccgtgttcttggctctgattccttactggacagtgtatttccaaatgcagaccacatatgttttacagagtcttcatttgaagattccagaaatctcaagtatcaccaccacccatcacacgctgcctgcagcttggctcaccatgtttgatgcggtgctcatcctcctgctcatcccactgaaggacaagctagtggacccggtgctgaggagacacggcctgctcccatcctccctgaagaggattgccgtggggatgttcttcgtcacatgctctgcctttgctgcaggaatcctggagagtaaaaggctggacctggtgaaggagaagaccatcaaccagaccattggtggtgtggtctaccatgctgctgacctgcccatctggtggcagatcccacagtatgtgctcattggcatcagtgagatatttgcaagtatagcaggtctggagtttgcgtactcggctgcccccaagtccatgcagagtgccatcatgggactcttcttcttcttctctggcattgggtccttcgtgggctcaggactgctggccctggtgtctctcaaggccatcgggtggatgagcagtcatacagactttgggaacatcaacagctgccacctgcattactacttcttcctgctggccgccatccagggagctacgctgctgctcttcctcattgtgtctgtgaagtacgaccgccagcgagccaggacagatggggggacagccagcacgaggacctgatgcagccagccagcatgctcacaggttctgcagactataaggcctcagggcttgctaactaccagggcactgccagcaagcaggttgaggctagatggttggtgtcccaacttctgaacttgcatgttgtctggactggcttctccctccctgtgcccagatgatggtggtgagtgccttactgtggcccgtctcatgtgcactgggcctaccaggagatgagaatgtggcttctctcactgaaggtctctgcccgttctgagccagccatgctttctcttttagaatcctgagcagcccctgtcctgctgctgggcatccttattccttacaaacactgttactttcatagcatctcctgtaagattagcaagcatttccatcaagcggtaggaggattctcttcagagatcaaagtgtggttgatggcgagagagccccatgagctgtttctgctccattgatggtctcttgtcacagatcttgctgatgccaaggcctttgtgggtcagtagtgtagactcatctgctcaaaaagtagttttgttggctaaggtgaagaagtgtttcttattacactaggctggcctcactaggctgacctcaaacttggtgctgcctcctgtctgcttctcaagtgctaagatctcagatgtccatcaccatggtcagcaggacttaggtcatgaactactgatctgctttaagcacatgcatcagtggtgagtgaggacaccatgttctcactgagaccagacagcagctggcaggagattggcatttacacctggcagatcttttctgagaacttgactttgtgtagcagtaagattggaggcaggtggtgagtggggaaaacacgggagctgttgggctggtcgcccacctttgtattgttactgacatatctggggttctgagtgtgtcaactaaaccattttatgtgttgctgtgtcttgtataatttgataaaagcttctcagacatg

SEQ ID NO: 1015 - DNA, 2138 bp, Rattus norvegicus
  Genbank Accession No. AB000929
cctggaggtatcttccaacatggctaggtggcagagagtctactggttgcgttctctcttcttcgcccttgtgacttcagtaaattcattaagccttcctcagtcagagaatcctgccttcccaggcactctcatttgtgataaagatgaagtgagagtagaattttcaagcagatttgacatggaaaagtggaatccttccttggtggatacctttggtaatgaaatttcgaactgcacttatgctctggacttggaaaagtttatcctgaaattcccttacgagacctgtactataaaagtgattggtggataccaggtgaacatcagagtgcaggacaccaatgctgatgtaagctataaagatgacgtgcatcactttttctgcccagctattcaagcagagattcatgaggtctcagaaattgttgtctgcatggaggatctcatatctttttctttcccacaacttttctctaggcttgctgatgaaaatcagaatgtatctgagatgggatggattattaagattggcaatggtacaagagtccacactctgcccctgaaggatgctatagtacaaggatttaatctcctgattgacagccagaaaataaccctccatgtgccagccaatgctaccggagtagctcactatgtgcaagagagcagctatctctatactgtacagctgaagctcttgttctcaagtcctgggcagaagatcaccttctcttcacaagctatctgtgcaccagatctttctgtggcttgtaatgtgacacacatgagtcttactataccagaatttcctgggaagctaaaatctgtgggctttggacaaaggaacatccctgaggatcaatggcatgccaatggaattgacaaagaagcaacaaatggcttgagactgcatttcagaaaatctctcttgaagacaaaaccctctgaaaagtgtccattctaccagttctacttctcttcactcgagctgacctttaacttccaaggggacatgctatccacagtgattgatcccgagtgccactgtgagtcaccggtctccatagatgaactgtgtacacgggatgggtttatggactttgaggtctacagccaccaaacaaaacctgcactaaacctggagagcctcctggtgggaaactcctcctgccagcctattttcaaggttcagtctctggggcttgcaagatttcacatacctctgaatggatgtggaacacgacagaaatttgaaggtgataaagtcatctatgagaatgaaatccatgctctctgggaaaatccaccgtcaaacattattttcagaaacagtgagttcaggatgaccgtgagatgccattacatcagagacagtatgctactaagggcccatatcaaaagccattcttctccagtggcctctgtaaagccaggtccactagcgttggtcctacaaacctacccagacatatcctaccaacggccttataggaagaatgagtaccctctagtgaggtacctccgccagcccatctacatggaagtgacagtcttgaatagaaatgatcccaacatcaagctggttttagatgactgctgggcaacaacttttgaggacccagcctctgtcccccagtggcagatcattatggatggctgtgaatatgaactggacaattaccgcactactttccacgcagccaactcctctgcagcccattctggtcactaccagaggtttgatgtgaagacttttgcctttgtgtcagagtctcgggggctctccagcctgatctacttccactgcagtgccttgatctgtaaccaagcctcccctctgtgctctgtgacttgccctgcaccactgaggaacaaacgagaggccagcaaagaaggcacaatgacggttagcctcccaggacctattatcttgttgtcagatgactcttcatccaaaggtgtaatgaaccctgacagctatgagattaccaaagatattgcttctaaaacattgggtgctgtggctgcactagtgggctcagcagtcatcataggtttcatctgttacctgcataagaaaagaattgtaaggttcaattcctgattggacttttgcaaataaaagaggctgcagt

SEQ ID NO: 1016 - DNA, 1050 bp, Rattus norvegicus
  Genbank Accession No. AB002558
atggctggcaagaaagtctgcatcgtaggctccggcaactggggctcagccattgccaagatcgtgggtagtaatgccagccaactggcacactttgatccacgggtgaccatgtgggtgtttgaggaagacatcgggggcagaaagttaactgagatcatcaacacgcaacacgagaatgtgaaatacctgccggggcacaagctgccccctaatgtggtggctgtcccagatgtcgtccaggctgcaacaggtgctgacatcctggtttttgtggtaccccatcagttcattggcaagatctgtgaccagctcaagggccacttgaaagccaatactattggcatatctcttattaaggggatagacgagggccccaatggactgaaactcatctctgaagtgattggggagagccttggcatccctatgagcgtgctgatgggggccaacattgccagtgaggtggctgaagagaagttctgtgagacgaccattggctgcaaggaccctgctcagggacagctcctgaaggacctgatgcaaacacccaacttccgcatcaccgtggtacaagaggtggacacagtggagatctgtggggccttgaagaatatagtggctgttggggctggcttctgtgacgggcttggcttcggtgacaacaccaaggcggcagtgatccggctggggctcatggagatgatcgcctctgccaagctcttctgcagtggctctgtgtcctccgccaccttcctggagagctgtggggtcgctgacctcatcacgacctgctacggggggcggaaccgcaaggtggcagaggcctttgctcgcaccggaaagtccattgagcagctggagaaagagatgctgaacgggcagaagctacaggggccccagacagcccgggagctgcacagcatcctccaacacaagggcctcgtggacaagtttcccttgttcaccgcggtgtacaaagtgtgctatgagggccagccagtgggtgagatcatccgctgtctgcagaaccacccggaacacatgtga

SEQ ID NO: 1017 - DNA, 1463 bp, Rattus norvegicus
  Genbank Accession No. AB005547
  misc_feature (1)..(1463): n = a or c or g or t
cgaaagcaatcctttaaaagcgcagagtcagcggaccagtctgagttctggagttaagtgagcacatctccttcagctggtgcagctcctggagctctgactcccaccttccggagcagatatgtctggggagcagacgccgatgtgtagtatggacctacgtgagatcaaggggaaggagaccaacatggctgacagttaccatggcatgtcctggtatgagcagtacatacaaccgtgtgtggtggaacttttgggctccgctctcttcatcttcattgggtgtctatcggtcatcgagaacagtccaaatactgggctcctgcagcctgccctggctcatgggctggccttggggctcatcattgctaccttggggaacatcagcggtggacacttcaaccctgctgtgtcgctcgcagtcacactggttggaggcctcaagaccatgctgctaattccctactgggtctcccagctgtttgggggaatgatcggagctgccctggctaaggtggtgagtccagaggaaaggttctggaatgcgtctggggcagcctttgccatagtccaggagcaggagcaggtggcagaagccctgggggtagagatcgttatgacgatgctcttggtattggctgtgtgtatgggtgccgtcaatgagaagacaatgggtcccctagccccattctccattggtttctctgtcattgtggatatcctggcaggtggtgggatctctggagcctgcatgaaccccgctcgcgcctttggacctgccgtgatggctggctactgggacttccattggatctactggctggggcccctcctggctggcctctttgtgggactgctcattaggctcttcattggagatgagaaaacccgcctgattctaaagtcgaggtgaagaactgctggcagcatccccactgcctggagtcctcagctgtttgtcctgagttgaggacaggacaattccattattttctgcaggacctgagctcagaggagccactctgacagcagcagaccttggcctggcttcccaggcaggcaggcagctgctgctgtcctgagcatgctcctggaacctggaactcctttgtgcccatggactgggcttggggcccagcctaaagacatgtagagaccacatagaaaaggaggacaggtctctgttcttgagaaagggcagggcatgggagagccgagcaggtggagcatgcagttgctaatgcacactgttcatttttccagccctctttcttttttactgtgttgggtttggaacccagtccatgcgtactaggtgagcactttgctacggagcctcctgttctccccaccctctttcctcttggttacactgttacagaagggctttcaggagcccaaagatntccttgcctccccagctgccaatctgactttgtaataaatggcttagtgttcctgcc

SEQ ID NO: 1018 - DNA, 944 bp, Rattus norvegicus
  Genbank Accession No. AB006450
caagatggaggagtacgcgagagagccgtgcccctggagaattgtggatgactgtggcggtgcctttaccatgggtaccataggtggtggcatcttccaggccttcaaaggttttcgaaattctccagtgggagtaaaccacagactccgagggagtttaacagctattaaaaccagggccccacaattgggaggtagctttgcagtttggggaggcctgttttccacgattgactgtggtatggttcagataagaggcaaagaagacccctggaactccatcactagcggtgccttaacaggagccatcctggcagcaagaaatggaccggtagccatggttgggtcagctgcgatgggcggcattctcctagctttaattgaaggagctggtatcctgttgaccaggtttgcctctgcacagtttcctaatggccctcagtttgctgaagaccactcccagttgccttcaagccagttgccgtcctcaccatttggagactaccgacagtatcagtaggacttggtccccgggattcctggacctgggtggactgcagtttggtagggtttcagaagatcaagttacagtctgttgaaagccttaggtgggacaccggcggccaagcaggccatcaagagacatttagcacatttttctatttaaaagagactcagagtgtggaaaagataccgagtttatttattcatgcttggattgcgtctgtgatcaaaataaatgtctaataccatttaaagaatgtatatgaacttagaagataaaggaccaaaggccacataacagtgaaattcgactgtccttccttcgggacttttttgcctggtgtttatgtacagttgttcagacaataaaaggcttttgggacttgacctttccaaaaaaaaaaaaaaaaaaaaaaaaaaaagcggccgctgaattctag

SEQ ID NO: 1019 - DNA, 1531 bp, Rattus norvegicus
  Genbank Accession No. AB006852
ctctgggcgaagcgcggatataagtagctggtggctctgccaccccaccctgcccggatcgcgacggttttcagggttctggaatcagcagggttcctctgaggccttggcgagtggctgatctgctccgtttttgcaaaaggcgcctgtgtctggcagagccggtgtgagaagaagagagaatccttccccgccgccgggataatcaagagttttggccggacctttgagtacacatcgggatagtgagaagcccggcgaaaagcacagactatggcgctgaaacggattaataaggaacttagtgatttggcccgtgaccctccagcacaatgttctgcaggtccagttggagatgacatgtttcattggcaagccacaattatgggacctaatgacagcccatatcaaggtggtgtattctttttgacaattcattttcctacagactaccccttcaaaccacctaaggttgcatttacaacaagaatttatcatccaaatattaacagtaatggcagcatttgtcttgatattctaagatcacagtggtctcctgctttaactatttctaaagttcttttatccatttgttcactgctatgtgatccaaacccagatgaccccctagtgccagagattgcacggatctataaaacagacagagacaagtacaacagaatatctcgggaatggactcagaagtatgccatgtgatgctaccttaaagtcagaataacctgcattatagctggaataaactttaaattactgttccttttttgattttcttatccggctgctcccctatcagacctcatcttttttaattttattttttgtttccctccctccattcattcacatgctcatctgagaagacctaagttcttccagctttggacaataactgcttttagaaactgtaaagtagttacaagagaacagttgcccaagattcagaaatttttttaaaactggagcatgtgtattatgtggccaatgtcttcactctaacttggttatgagactaaaccaatcctcactgctctaacatgctgaagaagccatctgagggggagggggatggatgctgagctgtcacatcaaaggaaacagcattattccagcagcatccattcttgtctaaaccttccactgttagagatttgaggttacatgatatactttatgctcataactgatgtggctggagaattggtattgaattatagcatcagcagaacagaaaatgtgatgtattttatgcatgtcaataaaggaatgacctgttcttgttctacagagaatggaaattggaagtcaaacaccctttgtattccaaaatagggtctcaaaacattttgtaattttcatttaaattgttaggcttggagctattagttaatctatcttccaatactgtttaatatagcactgaataaatgatgcgagttgtcaatggatgagtgatcaactaatagctctcctagtaattgatttatttttcttcaataaagttgcataaacc

SEQ ID NO: 1020 - DNA, 1574 bp, Rattus norvegicus
  Genbank Accession No. AB008423
atggggctgctgattggagatgacctctgggctgtggtcatattcacagccatcttcttgcttctggtggacctggtgcaccggcacaaattctggactgcccactaccctcccggccctgtgccactccctgggctgggaaacctgctgcaggtggactttgagaacatgccatatagcttatacaagcttcgaagccgctatggtgacgtgttcagcctacagatagcctggaagcctgtagttgtgatcaacgggctgaaggccgtgcgggaactgctggtgacctatggagaggacactgctgaccgccccctactgcccatctataatcacctgggctatgggaacaaatcaaaaggtgtggtccttgcaccttacggacctgagtggcgagagcagagacgattctctgtgtccaccctgcgtgacttcggcgtgggcaagaaatcgctggagcagtgggtgacagaggaggccggccacctctgtgacaccttcgccaaggaggctgaacatcccttcaatcccagcatcctcctgagtaaggctgtgagcaacgtgattgcctcccttgtttatgctcgtcgatttgagtatgaggaccctttcttcaacaggatgctcaaaacattgaaggagagctttggagaggacaccggcttcatggcagaggtgctgaacgcaatcccaattctccttcagattcctgggctgcctggcaaagtcttccccaagctcaattcatttatagccttagtggataagatgttaattgagcacaagaaaagctgggatcctgcccagccgccccgagacatgactgatgccttcctagcagagatgcaaaaggccaaggggaatcctgagagcagcttcaatgatgaaaatctgcgcttggtggtgattgacctgttcatggcggggatggtgaccacctcaaccacactgtcctgggcccttctgctcatgatcctgcatccagatgtgcagcgccgagtccacgaggagattgatgaggtcatagggcaggtgcgtcgtccagagatggcagaccaggcacgaatgccgttcaccaatgctgtcatccatgaggtgcagcgctttgcagacatcgtcccgacaaatataccacatatgacatcccgagacattaaattccaaggcttcctcatccccaaggggacaaccctcatccccaacctgtcctccgtgctgaaggatgagaccgtctgggagaagcccctccgcttccatccagaacacttcctggatgcccagggcaactttgtgaagcatgaggccttcatgccattctcagcaggccgcagagcatgcctgggggagcccctggcccgcatggagctcttcctcttcttcacctgcctcctgcagcgcttcagcttctcggtgctggccggccggccccggcccagcacccatggcgtctacgcattgccagttactccacagccttaccaactctgtgcagtggctcgctagcaggggcaggggctccattcttctccccggtttggtctgattgatgtccaataaacaacttctgtatcttc

SEQ ID NO: 1021 - DNA, 1628 bp, Rattus norvegicus
  Genbank Accession No. AB008424
ctgtattgagtgttggccagtggtctttggtagcctgggcagcagcggggcagacatggagctgctggctgggactggcctgtggcccatggccatattcacagtcatcttcatattactggtggacctgatgcaccggcgccagcgctggacttctcgctaccctccaggccctgtgccgtggcctgtgctgggcaacctgctgcaggtggacctctgtaacatgccatacagcatgtacaagcttcaaaaccgctatggtgacgtgttcagcctacagatgggttggaagccagtggtggtgatcaatggactgaaggcagtgcaggaactgctggtgacctgtggagaggacactgctgaccgccctgaaatgcccatctttcaacatataggctatgggcacaaagctaaaggtgtggtgcttgcaccttacgggcctgagtggcgagagcagaggcgattctctgtgtccaccctgcgcaacttcggtgtgggcaagaaatccctggagcagtgggtgacagacgaggccagccacctctgtgatgccctcaccgctgaggcagggcggcccctcgatccttacaccctcctgaacaaggctgtgtgcaatgtaattgcatctctcatttatgcccgccgcttcgactatggagaccctgatttcatcaaggtgctaaaaatattgaaagaaagcatgggagagcaaactggcttgtttcctgaggttttgaacatgttcccagttctcctgcgcatcccagggttagctgacaaagtcttccctgggcaaaagacatttctcaccatggtggataacctggtgactgagcacaagaagacttgggaccctgaccagccacctcgagacctgactgatgcctttctggctgagatagagaaggccaaggggaaccctgagagtagtttcaatgatgcaaatctacgtctggtggtcaatgacctgtttggtgctgggatggtgactacttctatcactctaacctgggccctgctgctcatgatcctgcatccggatgtgcagtgccgagtacaacaggaaatcgatgaggtcatagggcaggtgcggcatccagagatggcagaccaggcccacatgccgttcaccaatgctgtcatccatgaggtgcagcgctttgcagacattgtcccaatgaatttgccacacaagacttctcgtgacattgaagtgcagggcttccttatccctaaggggacaaccctcatccccaacctgtcctcagtgctgaaggatgagactgtctgggagaagcccctccgattccaccctgaacacttcctggatgcccagggcaactttgtgaagcatgaggccttcatgccattctcagcaggccgcagagcatgcctgggggagcccctggcccgcatggagctcttcctcttcttcacctgcctcctgcaacgcttcagcttctccgtgcccactggacagccccggcccagcgactatggtgtctttgcctttctccttagcccttccccctaccagctctgtgcattcaaacgttagaaggaaagaaattctagtccagcctctaccttagtgtcatacacagattaaaacagttctgtggctgcca

SEQ ID NO: 1022 - DNA, 351 bp, Rattus norvegicus
  Genbank Accession No. AB010119
gagatggaagacttccaggcctccgaggagactgcatttgttgtggatgaagtgagcaacattgtaaaggaggctatagaaagtgccatcggcggtaacgcctaccagcacagcaaagtcaaccagtggaccactaatgttgtagaacagactttgagccaactcaccaaactggggaaaccatttaaatacattgtgacctgtgtgatcatgcagaagaatggtgctgggttacacaccgcaagttcctgcttctgggacagctccacggacgggagctgcacagtccgatgggagaacaagaccatgtactgcatcgtcagtgccttcggactgtccatctgaccgcct

SEQ ID NO: 1023 - DNA, 1572 bp, Rattus norvegicus
  Genbank Accession No. AB010428
cgagatggaggcgactctgagcctggagcccgccggccgcagctgctgggatgagccgctgagcatcaccgtgcgcggcctggtccccgagcagcccgtcacgctgcgcgcggccctgcgcgacgagaagggcgcgctcttccgagcccgcgcgctctaccgcgccgatgcccacggagagctggacctggcgcgcgcgcccgctctggggggcagcttcacggggctcgagcccatggggctgatctgggccatggagcccgaacggcctttctggcgcttggtcaagcgcgacgtgcagacgcccttcgtggtggagctggaggtgctggacggacacgagcccgacggcgggcggctgctggcgcgggcggtgcacgagcgtcacttcatggctcccggggtgcggcgggtgcccgtgcgcgagggcagggtgcgcgccacgctcttcctgcccccagaacctgggccctttcctggaatcatagacctttttggagttggaggcggccttctggagtaccgggcgagtctgctggctgggaagggttttgccgtcatggctctggcttattacaactacgacgacctccccaagaccatggaaaccatgcgcattgagtactttgaagaagccgtgaactacctgcgtggccaccctgaggtaaaaggaccaggaattgggctgcttgggatttccaaagggggtgaacttggccttgctatggcctccttcctgaagggcatcacggctgctgttgtcatcaatggctccgtggctgctgttgggaacaccatatgctacaaggatgagactataccccctgtgactatcctgagaaaccaggtcaaaatgaccaaggatggcctcaaggatgttgtagatgctttgcaaagccctctggtagaacagaagagcttcatccctgtggaaaggtctgacacgaccttcctgttcctcgttggtcaggatgaccacaactggaagagcgagttctatgccaatgagatctccaaacgcttgcaggcccacgggaaagagaagccccagatcatctgctacccagaagcagggcactatatcgagcctccttacttcccactgtgcagcgctggcatgcacctcctggtgggtgctaacatcacctttggaggggagcctaagcctcactctgtggcccagttggatgcatggcagcaactccagactttcttccacaaacagttgggtggtaagagtcatggggtgtcccctaaaatataacctgttatgtgatggttttggcaggaaaagtacaaatactttgtaggaatatcagttcagattacttcatctgaacatataaccgcttttggtttacatttttaaaaattaattttagtatcaaaatagtgctgattcaaaggctggaaatatagttcagttgtagagtccttgactgactcatgcaagttcctgggttcaatctccgtgctgtaagggaaaagagcacattttatggaaactgtagctattcaagaaatagtgcctagaatttaaaggaaccatgagtaaacactcttatgtaactt

SEQ ID NO: 1024 - DNA, 1575 bp, Rattus norvegicus
  Genbank Accession No. AB010743
atcgcttgcttcttgggcagccaccgccgccgtcggacctagccgtctgcactcctgtgttctcctgtgtattctcctgcggtccggacacaatagtatgatctttaagtgtttcgtctcccagacattttctatgggaaatcaaggggatcaggccatgatagccactggcagctttgaagaacgggacacctttagagaagcttgatcttggaggcctcagcgtgagacctcaaagcaccctcccgactccggcagagttcctctgtctcgtcttgacgattgaaggtccccactgcttcagtttttctccatcttctgggaggtagcaggaagtcagaatcatggttggtttcaaggccaccgatgtgccccccacagccaccgtgaagttcctgggggctgggacagcagcctgtattgcagatctcatcactttccctctagacaccgccaaagtccggctgcagatccaaggagagagtcaagggctagcgcgcaccgccgccagcgcccagtaccgcggcgtgctgggcaccatcctaaccatggtgcgcactgagggtccgcgcagcctctacaatgggctggtcgccggcctacagcgccagatgagctttgcctccgtccgcattggcctctacgactctgtaaagcagttctacaccaagggctcagagcatgcaggcattgggagccgcctcctggcaggtagcaccacaggtgccctggctgtggctgtggcccaacctacagatgtggtaaaggtccgcttccaggcccaggcccgggctggcggtggtcggagataccagagcactgtcgaagcctacaagaccattgcacgagaggaagggatccggggcctctggaaagggacctctcccaatgttgcccgaaatgccattgtcaactgtactgagctggtgacctatgacctcatcaaagatactctcctgaaagccaacctcatgacagacgacctcccttgccacttcacttctgccttcggggcgggcttctgcaccaccgtcattgcctcccccgttgatgtggtcaagacgagatatatgaactctgccttgggccagtaccacagcgccggccactgtgccctgaccatgctccggaaggaggggccccgaaccttctacaaggggttcatgccttccttcctccgcttgggatcctggaacgtagtaatgtttgtcacctatgagcagctcaaaagggccctgatggctgcctatgaatcccgggaggcacccttttgagcctctccagctgatgacctggaccctgctccccattcctgccctgtcttttccttcatcctctgcccagccccaacctcttcccatttcccacactccaactcccttcccagctcatctccctatacctcctcagcaaggaggccttaccctagcacatctcactatgcctcctcagcgaggaggcctgaccccggaccctgcaccctcagtcctgctaacagttaagcccaaatcttttgtcctcattcccagcccagcttagccagccttcgcccataaagcaagctccaatgtaaaa

SEQ ID NO: 1025 - DNA, 555 bp, Rattus norvegicus
  Genbank Accession No. AB010963
atgactgttgcctcctgtggccatggggaagaagctggtgatggcccagaagcgcggagagactcgagccctctgcctgggggtggcgatggtcgtgtgtgccgccatcacttactacatcctgggtaccactgtgctgcccctctaccagaaaagtgtgtggacccaggaatccacctgtcacttggttgaaaccaacatcaaggaccaggaagagctggagggcaggaaggtgccccagtacccatgcctttgggtcaatgtatcagctgtgggcagatgggccatgctgtatcacacagaagacactcgggatcaaaaccaacagtgctcctatatccccaggaacctggacaactaccagacagccttggttgatgtgaagaagctcagaagtagaccaatctcttctgcacagcagcatggagtcaccaggaacggcaggggtcccgggcaggcataattctcttcctcttgtcctccatttaatttgttcaacctctttggacaatcatttcttgctcaagaatgtttaacagctctctccggttgact

SEQ ID NO: 1026 - DNA, 616 bp, Rattus norvegicus
  Genbank Accession No. AB012234
ggtccatcacctcccctccttccaccagcaccaccaagcgccccaagtccatcgacgacagtgagatggagagtccagtcgatgatgtattctatcctgggacaggccgctccccagcagctggcagcagccagtctagcggatggcccaacgacgtggatgcaggccctgcttctctaaagaagtcaggaaagctggacttctgcagcgccctctcctctcagggcagctccccacgcatggctttcacccaccacccgctgcctgtgcttgctggagtcagaccagggagcccccgggccacagcatcagcactgcacttcccttccacctccatcattcagcagtcgagcccgtacttcacacacccaaccatccgctaccaccaccaccatgggcaggactcgctgaaggagttcgtacagtttgtgtgctctgacggctcgggtcaggccaccgggcagcattcacaacgacaggcgcctcctctgccaaccggtttgtcagcatcggatcccgggacagcaactttctgaacatcccacagcagtctcagtcctggttcctctgattaagatcaacaaagaaacaacaaaattttaaaaaaaaaaaaaaa

SEQ ID NO: 1027 - DNA, 2743 bp, Rattus norvegicus
  Genbank Accession No. AB012759
cgcgcctgtaacgttcgcccgtgcacgcccggcccgccagctgtccgcctgctcgcacgccgccgtccgccgcagtccgcgcccagccttgcccgctctccccctccttcggcccacgcccggctccggccatgctgtccttccagtaccctgacgtgtaccgcgacgagacctcagtacaggattatcatggacataaaatttgcgacccttatgcttggcttgaagacccagacagtgaacagacaaaggctttcgtggaggcacagaacaagatcacagtgccgtttcttgagcagtgtccaatcagaggtctatacaaggagaggatgactgagctgtatgactaccccaagtacagctgccacttcaagaaaggaaagcggtatttttatttttacaatacaggtttgcagaaccagcgagtattatatgtacaggactccttagagggggaagccagagtgttcctggatcccaacactctgtcggatgacggcacggtggcactccgaggttatgccttcagcgaagatggtgaatacttcgcctatggtctgagcgccagcggctcagactgggtgaccatcaagttcatgaaggtcgacggtgccaaagagcttcccgacgtgctggagagagtcaagttcacctgtatggcctggacgcacgatggcaaaggaatgttctacaactcatacccacagcaggacggcaagagcgacggcacagagacgtccaccaatctccaccagaagctctgttatcacgtcttggggacggatcagtcagaagacgttctgtgtgccgagttccccgatgagcctaaatggatgggaggagccgagttatccgatgacggtcgctatgtcttgttatcgatctgggagggatgtgatccagtgaatcggctgtggtactgtgacctccagcagggatccaatggtatcaacgggatcctgaagtgggtaaaactgatagacaactttgaaggggagtacgattacataaccaacgagggtacggtgttcaccttcaagaccaaccgcaactcccccaattaccggctgatcaacatcgacttcacggaccccgacgagtccaagtggaaagttctcgttccggagcacgagaaagatgtcttagagtgggtggcttgcgtcaggtccaacttcctggtcttgtgctacctccgcaacgtgaagaacattctgcagcttcacgacctgacaactggtgctctcctcaagaccttcccgctggacgtgggcagcgtggtggggtacagtgggcgcaagaaggactctgagatcttctaccagttcacatccttcttatctccaggtgtcatttaccactgtgatcttaccagagaggaactggaaccccgggttttccgagaggtgacggtgaagggaatcgatgcgtctgattaccagactatccaggttttctaccctagcaaggatggcacaaagattcccatgtttattgtgcataaaaagggcataaagttggatggctcgcatcccgctttcctgtatggctatggtggcttcaacatctccatcacacccaactacagtgtgtccaggctcatttttgtgagacatatgggcggcgtcctcgcggtagctaacatcagaggcggtggtgaatacggagaaacatggcataaaggtgggatcttggccaacaagcagaactgctttgatgacttccagtgtgctgctgagtacctcatcaaggaaggctacacaacttccaagaggctcacgatcaatggaggctccaatggcggcctcttagtggctgcttgcgcaaatcagcgcccggacctcttcggctgtgtgatcgcccaggttggagtgatggacatgttgaagttccacaaatttactattggccatgcctggaccactgattacgggtgctccgacagcaaacaacacttcgaatggcttctcaagtactcgccgctgcacaacgtgaagcttccggaggcggatgacatccagtacccgtccatgctcctcctcacggctgaccacgacgaccgcgtggtcccgctgcactcgctcaagttcatcgccacgcttcagtacatcgtgggccgcagccggaagcagagcaaccccctgctcatccacgtggacaccaaggccggccacgggccgggaaaacccaccgccaaggtgatagaagaagtctcggatatgtttgcgttcatagcgcggtgcctgaacatcgagtggatccagtaagtggggattcccggcccctcccaccagacacagaaaacctcaagggctttttcacaccatcctgaccaagaaaccaccggcgaacgctgcctggagtgagcaccgtgccgctgctcacagacagcaagccgccgagcaggactgccaccgggattttagcttttctatctcctttctagcaagcccttgatgttttggttttgttttgttttgttttccccactctctccaggcacatatattgaaagggggggaaagggagggtatgtttatataagaaactaaatggcagtgaacgtattgtgaatatcagagccctgaactcgtaaagggatctaagttaagggtcatagttgggcatactcatctataatagcataatgaagtcacgtctctaaccatagcatataaccttaaataagtgggagacctcaaggcagagtccgctgcattactaataaatgctactgaagagtggg

SEQ ID NO: 1028 - DNA, 1166 bp, Rattus norvegicus
  Genbank Accession No. AB013454
gactcattgtgggtgcccatcatgatgtcctacagcgagagattggggggaccggctgtctccccacttccagtccgtgggagacacatggtgcatggggcagcctttgcttatgtccccagcccacaagtcctgcacaggattcctgggacaaccacctatgccatctccagtctgagcccggtagccctcacagagcacagctgtccctatggggaggtcctggaatgtcatgacccgctccctgccaagctggcccaggaagaggagcaaaagccagagcccaggctgtcccagaagcttgcccaggttggcacaaagctcctgaaggtgccgttgatgctaggcttcctttacctctttgtctgctccctggacgtgctcagctctgccttccaactggccggagggaaagtggctggggacatcttcaaggacaatgccatcctgtccaacccagtggcagggctggtggtgggaatcctggtgacagttctggtgcagagctccagcacctcgacatccatcattgtcagcatggttccctctggcttgttggaggttttttttttttttttactttatccgcatttatttatgctgaatttattcccgtgccatgagcttttgtttcttcaatttcttctgggatatctttttcttctgtgcaacctcctcttctggctttggaacaatctgttccttctcagtgaggatcatctcgatgtggcagggggagctcatgtatgggttaatccggccgtgagctctgtaggttcgtctgcgcatcttaggagccttgttcacctggatgtgttcaatgaccagagagtctacatccaaacccttaagttcagcattactctctgcatttttaagcatgtgcagcaaaaattcagcactcttttttggccaccgtccctgtgtccagccccactgtttggcctgggcgcacctaccgactccaccattataccgccggaatggcacacactgcttctttaaagtgacatccttcagatacttggtggctttgcggatatgcatacccttgatggcctgggcagtttcccgggtgttcttaaagtgaacacgaaggtttgagcctcttgacttgcatgatttcgtggggttttctgggtcaagggagtagcgaaccaggatcc

SEQ ID NO: 1029 - DNA, 1940 bp, Rattus norvegicus
  Genbank Accession No. AB015433
cacaaccaccaaatatatccacacgttgacgtgatttcttgcccttactcacactaagcccgcgtgtcgatccatctctatggatcccgaacctactgaacactccaccggcggcggctcggttccccgccagccgcccagcgcgcagacggggcttgatgtccaggttgtcagcgcagctggcgactcaggtaccatgagccaggacaccgaagtggacatgaaagatgtggagctgaacgagctggaaccggagaagcagcctatgaatgcagcggacggggcggcagccggggagaagaacggtctggtgaagattaaggtggccgaagacgaggcggaagccggggtcaagttcacaggcttatccaaggaggagctattgaaggtagctggcagcccgggctgggtgcgcacccgctgggcgctgctgctgctcttctggctcggttggctgggtatgctggcgggcgccgtggttatcatcgttcgggcgccacgctgccgtgagctgccggtacagagatggtggcacaagggcgccctctaccgcatcggcgaccttcaggccttcgtaggcccggaagcgagaggcatagctggtctgaagaaccatctggagtacttgagcaccctgaaggtgaagggcctagttttgggcccaattcacaagaaccagaaggatgaagtcaatgaaaccgacttgaaacagattgatcccgatttaggctcccaggaagattttaaagaccttctacaaagtgccaagaaaaagagcattcacatcattttggacctcactcccaactataagggccagaatgcatggttcctccctcctcaggctgacattgtagccaccaaaatgaaggaggctctgagttcttggttgcaggacggtgtggatgggttccaagttcgggatgtgggaaagctggcgaatgcatccttgtacttggctgagtggcagaatatcaccaagaacttcagtgaggacaggcttttgattgcagggaccgcgtcctctgacctgcaacaaattgtcaacatacttgaatccaccagcgatctgctgctgaccagctcatacctgtcacagcccgttttcactggggagcatgcagaactcctagtgattaagtatttgaatgccactggcagccgctggtgcagctggagtgtgtcgcaggcaggactcctgacatcctttataccggctcagtttctccgactctaccagctgctgctcttcactctgccaggaactcctgttttcagctatggggatgagcttggccttcaggcagttgcccttcctggacagcctatggaggctccattcatgctgtggaatgagtctagcaactcccaaacctcaagtcctgtaagcctcaacatgacagtgaagggccaaaatgaagaccccggctccctcctcacccagttccggcgactgagtgacctccgtggtaaggagcgctctctgttacacggtgactttgatgcactgtcttcctcatctggcctcttctcctacgtccgccactgggaccagaatgagcgttacctggtggtgctcaacttccaggatgtgggcctgtcagccagggtaggagcctccaacctccctgctggcataagcctgccagccagtgctaaccttttgcttagtactgacagcacccggctaagccgtgaggagggcacctccctgagcctggaaaacctgagcctgaatccttatgagggcttgttgttacagttcccttttgtggcctgatccctctacacagaacctgccacccttctttcctctctcaggcctttggaattctggtctttctctccttattttgtttttgtttttaaacttttgcagattacatatgaattcttacactgggtgtttttgtcttcaaaataaaaaaaatcacccctgc

SEQ ID NO: 1030 - DNA, 1903 bp, Rattus norvegicus
  Genbank Accession No. AB017544
gtcaggcctgaggaagatggcgtcctcggagcaggcagagcagccgaaccagcccagctcttctccaggaagtgaaaatgtggtgcctcgagagcctctgattgccacagcagtgaagttcctacagaactctcgggtccggcagagcccacttgcgaccaggagagcatttcttaagaagaaagggctgacagatgaagagattgacctggctttccagcagtcgggcactgcttccgacgagccttcacccgtgggcccagctaccccggtggttcctgtccagccccctcacctcatttcacagccatacagccccggaggttcccgatggcgagattacggtgccttggccatcatcctggcaggaattgcatttggcttccaccagctctacaagaagtacctgctgcccctcatcctgggaggccgagaggaccggaagcagctggagaggatggcggcgagtctctcggaactgagtggcagtgtggcccagacagtgactcaggtacagacaacactggcctctgtccaggagctactgagacagcagcagcagaaggtccaggagctagcccatgagctggccgctgccaaggctaccacatcaaccaactggatcctggagtcccagaatatcaatgagctcaagtcagaaatcaactctctgaaaggacttcttctgaatcggagacagttccctccctccccgtcagccccgaagatcccctcctggcagatcccagtgaagtctccgtcaccctccagccccgcggccgtgaaccaccacagcagcagtgacatctcccctgtcagcaatgagtctccgtcctcctctccagggaaggacggccacagccctgagggctccacagccacataccgcctgctggggcctcaggaagagggggaaggggtgatggacgtcaagggccaggtgaggatggaggtgcaaggggaggaggagaagagggaggacgaggagggcgaggaggatgaggatgatgacgtgagccacgtggatgaagaggacgtcctcggggtacagagggaggacagacggggcggcgatgggcagatcaatgagcaggtagagaagctgcggcggccagagggcgccagcaatgagagtgagcgagactagggctggcgcttggttgcccgccttcccagtgccccagggcctcagaggcgggtgggcaagagttgtggctctgcttccatgaggggggccggaaacccaggtaggggtggggccgtccttccgtgcagtgtgggctgcgtttcttttcaccagcctcccagacaggttcccagccccagccacgggcccaggccgagaactcgggagctctgcactccagccccctccttgacgggtgtcttgtctaggtgtgtcctctgagtaccttgaccacctgacaccatgcatggccagagctcatgtcatttcctgcctctgtcacctcagtgcaggggaactatggcccccctcggtcttgctgtctcccccactgtgccctggcctggcttgtggcttcttctttgcctgttccaatagccagggtgccagccccgctcttcatctctggggctgccagccttcccacagccaggtcctggctgacagatgccgcccttgggcgcctgtccccagcccacctgcccgttgttttttataccacacgagacgtcctcgcttgctgtgtcgtggtttagctactcagtggtgaggcgtgcttctccctcctgcggtggaggaggcagcagggccttcctgaccaacagccatgtctgtccttcccactgagaaacacatgttcatttacgtgatcatgtatagatttcagactataagataagactgtacataatgtaataaatacgagttgccatattt

SEQ ID NO: 1031 - DNA, 470 bp, Rattus norvegicus
  Genbank Accession No. AB017711
tttctctgctctgcgacccggaccggccagtaaggagaaggtatcatgtcagacaacgaagacaatttcgatggcgatgactttgatgacgtggaggaggacgaagggcttgacgacttggaaaatgctgaggaggagggtcaggaaaatgttgagattctcccatctggtgaacgaccgcaggccaaccagaagcgtatcaccactccatacatgaccaagtacgagcgagcccgagtgctgggcacccgggctctccagattgcgatgtgtgccccagtaatggtggagctggagggggagacagaccctttgctcatcgccatgaaggaactcaaggcccggaagatccccatcatcattcgccgttacctgccagatggaagctatgaggattggggcgtggatgagctcatcatcagcgactgagcagagctgtcaggctgtgccaggcaccatctctatgccca

SEQ ID NO: 1032 - DNA, 2335 bp, Rattus norvegicus
  Genbank Accession No. AB018546
cggcacgaggccggcaccagctgtcggcacgaggttggactctttcctcccggtcctgcggccctctttctccggcgcgccgcccctcggttgctcagaccgctgtgatcggaggttgccggtgctccagcgcttggcgtcccggcccagtggccgtaggcggcgtaggcaccgcgagccgagcctcccggtggccggggaacggcaagcgagcgagtccgagaggttcttggggcaggtggcgccgcgaagatggtcgccaagcagaggatccgtatggccaacgagaagcacagcaagaacataactcagcgcggcaacgtcgctaagacctcgagaaatgcccccgaagaaaaggcgtcggtaggaccctggttattggccctcttcatttttgtcgtttgtggatctgcaattttccagattattcaaagtatcaggatgggcatgtgaagtgactgaccttgagatgtttccattctcctgtgaattttaacttgaactcattcctgatgttcgatgccctggttaaaaacaattcagtaaatcaccctgcctcagaatgactttttcatatcaaccttcatgtgtcattccaaggtttcttcaagagtcattccaggtttgctagtccatgccacagtgccttgcaaaagcaccacatgaataaagcaataaaatttgattattaagttccagtagtagaccatacttattcagtacagaatgagttttatgtggttattaaaacttatgactaattagattaaatctgtgtagacagggtatagattttgttaaccctaatgtgtaaatgcaattagctaatttaaattttggaaacttaaggttttatatagctaggcactttactactcttggattgaaaaagcacactccattatagggacatgtaactatcctataatcaggtgcttataaatggacaactacacggcctagttttaccacaatcattgtcacctaaatttttttaaaaactcctagggcatatgtaagtggagatgctcactgctgcatctgtttctaatgataatgtttctgttacacagccttgagtttcgcatgagtaagtatagtcacctagggatcccatttgagactgggttgagcattttggtaacttgaatccaaagtgactgcagtttcactaaaaagctatcatggtgagatgaaattaggggatggattgctgaaggtcatacagatcagaattaacatatcaaggggtttaccggtggaggaaaaaagttaagggggaaaagtctaccaagagggaaatgccttgaaaaaataggggggaaacctgtgtgccatatgatatcttagcatgtgaattgcacttttaataccaaaaaggcacatcaactaaaaagttatgattgaaatgcccttagggttctaggtatgtcaacctaaactagcatttggagttaaatgaatttactgataaggatcagtctagtcttcctctgtatgacttagtaggttgtgattggtcagatttccttttttaactaacggtaagggtgagagtgatgaggcagggtttgaggttttctggtactattgaaaactgcaagtcctgactatgcacttagccagaacttggtgtagaccaccaagcaatatctgtgtatggaattggaagaaacctgcttatgtttgctttgttatttgcctcaggagatctctttttgaaataagctgttttccaaaggaacagaagggaaacttgctacctgttctgagagcagtgtaaacctcacaggactttggaccccctcagatgtagaggagaatgaaggaaaggaatagttagggatgcacaggaatttatctgtctctgatcaggaaagaaagctggctatgggtctgcaggggcatgactgatggttgtctgcctcttttcaccctgtaagtgaatccctgaactggattcactgaagcaagtcttggttaactaattctattttactataactttaaaagtgaaaaatattctctaaatttatagcaggtgccttatttcctttgaatcaaatcattccataccagaatttcccttggtttactattagataattggctttaagatacttttgttttgaaacatacagtgttttaattgatttgttaaattgctgtagccatcaatcatttcacatttgtaaaatacattccctttgtatcatgtaatttgcctattcagtgcattttatattcaggttgggttatgcatatttgggtcaatgaaagttgtgtctgtttgatttatgctttaaaaataaagttccctggatatttaaaaaaa

SEQ ID NO: 1033 - DNA, 2870 bp, Rattus norvegicus
  Genbank Accession No. AB019281
gggacgtcccaaagaccggtctttgaggaaggagtgggacttgacatcggaaggacccagttcggtgtctcaggggagcgaaggttttagggggccagctgggagtctccagtatatagaccactgaaggttgaaggagaaagttcaggagccctggaaaggagaaggaataagacgacaggaggaagagagagagaggggagaatggaagagtctcacttcaattctaacccgtacttctggccttctatccccacggtctcagggcagattgaaaacactatgttcatcaacaagatgaaggatcagctgttgccagagaagggctgtggactggcaccacctcactatcccactttgctgacagtgcctgcctcagtgtccctgtcctctggcatcagcatggacacagagtccaagtcagaacagctgaccccacacagtcaggcatctgttacccagaacatcacagtggtccctgtaccatctacaggactcatgactgcgggagtctcctgttctcagaggtggagaagagaagggagtcaatcaaggggtcctggtttggtaatcacatccccttcaggctctcttgtgaccacagcctcatcagctcagactttccctatctcgactcccatgattgtctcagctcttccccctggctcacaagccctacaggtggtccctgacctctccaagaaggtagcatcaaccctaactgaggaaggaggccgaagtggtggtggaggtggcactgtggctcctcctaaacctcctcggggccgcaagaagaagcggatgctggaatcagggcttcctgagatgaatgacccttacgtccttgcccctggggatgacgatgaccatcagaaagatggcaagacctacaggtgccggatgtgctcactgaccttctactcaaagtcggagatgcagatccactccaagtcacacaccgagaccaagccccacaagtgcccacactgctccaagaccttcgccaacagctcctacctggcccagcacatccgtatccattcaggggccaagccctatagttgtaacttttgtgagaaatccttccgtcagctctcacacctgcagcagcacacccggattcactccaagatgcacacggagaccatcaagccccacaagtgcccgcactgctccaagaccttcgccaacacctcctacctggcccagcacctccgtatccactcgggggccaagccctacaactgttcctactgccagaaggccttccgccagctctcccacctccagcagcacacacgaatccacactggcgatagaccatacaaatgtgcacacccgggctgcgagaaggctttcacacaactctccaacctgcagtctcacagacggcagcacaacaaagataaacccttcaagtgccacaactgtcaccgagcatacacagacgcagcctcactagaggctcatttatctacacacacagtgaagcacgccaaggtttatacctgcacaatctgtagtcgggcatatacatcagaaacatatcttatgaaacatatgcgcaaacacaaccctcctgatctccaacaacaagtgcaagcggcggcagcggcagcggcagtggcccaggctcaggcccaggctcaggctcaggcccaggcccaggctcaggcccaggcccaggctcaggctcaggcccaggcccaagcttcacaggcatcacagcagcagcaacagcagcagccaccacctccacaaccaccacacttccagtctcctggggcagctccccagggagggggtggtggggacagcaaccagaaccctccaccccagtgttcctttgacctgaccccctataagccggcagagcatcataaagacatctgcctcactgtcaccaccagcaccatccaggtggaacactggcccagctcttagagatccgtactgccatccattggaaaggggagaagtcctggtccctcctttgtcaactcttcttggtgggaaagttctcttcttccttgacaagtcctgtctccagctccttgggtctcaggcatggcttttcttcgcaagataaccatccttaatctcagctgctcctgattggccaaggaatcctgagctgatagtgttatccaacagcccccatccaagcagagcttttaaaactggggcttggtgcttgagagaaggatccgctgtaacctcacatcttgtccagtgtgtgggcgattacctttctctccatcctcaaagttggggctgatagaagactagtggctggccctcccagataacagagaaggaagctctaaatgtcgccagccttccgttctatgcttacctgtaaaagaacagattttgcacgtggcctgatccctgtgagccattttcttccccttacatggtctcacttcatattgggtggtgactataccttttttatttgtaaggggggcaatagctgatacatggtcaccaaggtgccagagattccccaggtgaccaacggtggcttaagagtgtgagttaccatttttccttacaacctccttccttctctgccaaccaagggcctatatactcagtctcactaccccagtccaaggagctctgggagctgtgtaagctgtgttctctgcgatgccatctgggctttgcagagaagggagaattcagggcacacacaggactggacttagcctccctaggtgccacggtcagatgccggacatggatttatatataaatatatatatataaatatatatatatacctgctcatcacggccatctttgttgtaaccatttctgtgtttataaatgcattatctctgaaaaaaaaaaaaaaaaaaaaa

SEQ ID NO: 1034 - DNA, 3067 bp, Rattus norvegicus
  Genbank Accession No. AB023400
cggcaggcagtgctatcagaggaggtgcaggacttcatttcccagcaggcttcaggcggcgggcgccgcggtgccttgtgtgggatgtaagcgcggaggtgggctcgggggaccgaagccaggactctccttgggacttgcgggaggctgctttaggttcgccttttggacaggctccagagggctaggtagagattgcagggaccgggaggagtggcctttgagggtccccaagaggtctttgggacgcagcctcatcggggctgggggtcccgggattgtagggaactagaaggcccttggttgaaaggtctcagaaaccgagccgccgcccgtgtgcgcaggacgaagcggctggcgaagcagaattgtggcggagggtagagccgtagccgagcctgggagggggctctctcgccgagcccgaccctcccttcctcggcttgcccgcaggccaccgcccgccgccatggggctgaaggccgcccagaagacgctgttccctctgcgctctatcgacgacgtggtgcgcctgttcgctgcggagctgggccgagaggagcctgacctggtgctcctctccttggttctgggcttcgtagagcatttcctggctgtcaaccgtgtcatccccaccaacgtgccggagctcaccttccagcccagcccggcacccgaccctcctggtggcctcacctacttcccagtggccgacctatccatcattgctgccctctatgcccgattcaccgctcagatccgcggtgctgtggacctctccctctatcctcgagaggggggcgtttccagtcgcgaactggtaaaaaaggtctcggatgtcatatggaacagcctcagccgctcctacttcaaggaccgggcccacatccagtctctcttcagcttcatcacaggcactaaactggacagttcgggcgtggcctttgcagtggtaggggcctgccaggctctaggtctcagagatgtccatctggccctgtccgaggatcatgcctgggtggtgttcgggtccaatggggaacagacggctgaggtgacctggcatggcaaaggcaacgaggaccgcagaggccagacagtcaacgctggtgtggctgagcggagctggctgtacctgaaaggatcgtacatgcgctgtgaccgcaagatggaggtggcgttcatggtgtgtgccatcaacccttccattgatcttcacactgactctttggaactgttgcaactacagcagaagctgctctggctgctgtatgacctaggacatctggaaaggtaccccatggcgctagggaacttggcagacctggaggagctggaacccacccctggtcggccagacccgctcaccctctatcacaaggggattgcctcagctaagacctactaccaggatgaacacatctacccctacatgtacctggctggataccattgtcgcaaccgcaatgtgcgtgaagccctgcaggcctgggccgacactgccactgttatccaagactacaactactgtcgggaggatgaagagatctacaaggaattctttgaagtggccaatgacgtcatccccaacctgctgaaggaggcagccagcctgctagaagcaggcgaggagcggccaggagagcaagcccagggcacccaaggccaaggttctgccctccaggacccagagtgctttgcccacctgctgcgattctatgatggcatctgcaaatgggaggagggtagccccacaccagtactgcacgtgggctgggcaactttccttgtgcagtccctaggacgctttgagggacaggtgcggcagaaggtgcacatagttagccgggaagccgaggcagcagaggcggaagaaccatggggggacgaagcccgagaaggtcgtcggcgcggtccccgccgagagtccaagcctgaggagccaccaccacccaagaagcctgcgttggacaagggcccaggctcagggcaaagtgcagggtcgggacctcctaggaaaacgtcagggactgtctcaggtactgcccgtggcacagaagtcagcagtgctgctcaggctccagcacctgcagcatcgccacccccagagggcccagtgctcactttccagagtgagaaaatgaaaggaatgaaggagctactggtggccaccaagatcaactctagtgccatcaagctgcaactcacggcacagtcccaagtgcagatgaagaaacagaaggtgtccacacccagcgactacacactctctttcctaaagcggcagcgcaagggcctctgaactcttcgggattctgtgacaaggcccccggcctgcccacactcccatcaggcttcactctagtcctctaactcaagtctagactctgcctacagtcctaggtggcccagaactgcccagcagtgactgggagccttcatttagccccttttcgggccccagagccctggctcggttcttagaatttaggtttcatctcccaccagccagccaattggaacattgtaggtccatgcaaccggtctttacaggtccaaccccgtcccccgaaattcagtggaccatgacgggttccctagtcgagcctgaacagtccggcattcctcccacttgggggactagattgaccttagcccacaagcacagttgctacctggaaacccaggaaccaaggaccattcagtccctaggggtagatttccgcactttatagttgcatcctttggcaatccaagtcccctaccccaaagaaattaacatattgttgcctgaatctggaaatcttcctcatctccctagccccggagtccagggcatgaaggtcggactcttatctgtgaatactgagcctcgcccccttcctgaccaaactggccggagaacagagcaggacctcttccagccctctgggaacctccttgaggtcccaggaggaaatctgcacggggtgggggagggccagtcttttcctgttttgtacatagatttatttttcagttccaaggaagataaatacattttgttaagaaaaaaaaaaaaaaaaaa

SEQ ID NO: 1035 - DNA, 1272 bp, Rattus norvegicus
  Genbank Accession No. AB037424
cgctgctgtacgctgcgcgtggcgctctgggccttcggtcgcgcgtcctctcgccatgtcccggtctccggcaccccgcgccgtctctggcgcccctctccggcccggtacggtgctgggcaccatggagatggggcgccgcatggatgcgagtgctagcgctgcgaccgtacgcgccttcctggagcgcggcctcaacgagctggacacggccttcatgtattgcgacggccagtccgaaagcatcctgggcagcctggggctcgggctgggcagcggcgactgcacagtgaaaattgccaccaaggccaacccttgggacgggaagtcgctgaagcctgacagtgtccggtcccaattagagacgtcattgaagcggctgcagtgtccccgggtggacctcttctacttacacgctcctgaccacggcactcctatcgtggagaccctgcaggcctgccaacagctgcatcaggagggcaagtttgtggagcttggcttgtccaactatgcctcctgggaggtagccgagatctataccctctgtaaaagcaacggctggatcctgccaactgtgtaccagggcatgtacaacgccaccacccggcaggtggagactgagctcctcccctgcctcagatacttcggactgaggttctatgcctacaaccctttggctggaggcctgctgactggcaaatacagatatgaagacaaggatgggaaacagcccgagggccgcttctttgggaatagctggtctgagacctacaggaaccgcttctggaaggaacaccactttgaggccattgccctggtagaaaaggccctgaagaccacctatggcaccagtgcccccagcatgacctcggctgccctgcgctggatgtaccatcactcacagctccagggcacccgaggggacgcagtcatcttgggcatgtccagcctggagcagctggagcagaacttggcggccactgaggaaggtcccctggagcccgctgtcgtggaggcctttaaccaagcctggaacgtggtcgcccacgagtgtcccaactacttcagatagactgtcgtgactcaagacgccagggcttttctgccaactcttagagtcacaccctggccactccttgcccagtgctgacctagtgtggtcttttctgctggtctccatccactccctgctcttttcccgtctgaataaagcaggcgtccgacctagctgcagcccggactgaaaaaaaaaaaaaaaaaaaaaaaaaaaaa

SEQ ID NO: 1036 - DNA, 1711 bp, Rattus norvegicus
  Genbank Accession No. AB038232
ggcacgaggcggcccgctcagaatcaggcatgggtctccatccttgttctcctgtggaccatggggtcccctcctgggtcctggtcttgttgctgacactgggtctgtgcagcctgcaggctacagccgacagcgttctagaccctgactttcgtgagaattactttgagcagtacatggaccatttcaactttgagagtttcagcaacaagacctttggccagcggttcctggtgtcagataagttctggaagatgggcgaggggcccattttcttctacacagggaatgagggggatatctggtccctcgctaacaactctggcttcatagtggaactggcagcccagcaggaggccctgctggtctttgctgagcatcggtattatgggaaatcgcttccattcggtgtgcagtccacacagcggggatacacacagctgctgactgtggagcaggcgctggctgacttcgccgtgctgctccaggccctgcggcacaatcttggggtccaggatgcccccaccatagcctttggagggagttatgggggaatgctgagcgcctacatgaggatgaagtacccccacctggtggctggggcactggcggccagcgctcctgttatagctgtcgcaggccttggcaaccccgaccaattcttccgagatgtcacagcggacttctatggccagagtcccaagtgtgcccaggctgtgcgggatgctttccagcaaatcaaagacttgttcctccagggagcctatgacaccatcagccagaattttgggacctgccaatcactttccagcccaaaggacctgactcagctctttgggtttgcccggaatgcatttactgttctcgccatgatggattacccgtaccctactaactttctagggccccttcctgccaaccctgtcaaggtgggctgtgaacggttgttgagtgagggccagaggatcatgggtctacgggcactggcagggctggtctacaactcctctggcatggaaccctgttttgacatctaccagatgtaccaaagctgtgctgaccccactggctgtggcactggctccaatgccagggcctgggactaccaggcctgtacggagatcaatctgacctttgacagcaacaacgtgacagacatgttccctgaaatccctttctctgatgaactccgccagcaatactgcctggatacatggggcgtgtggcctcggccagactggctgcagaccagcttctggggtggcgaccttaaagcagccagcaacatcattttctccaacggtgacctagacccctgggcagggggtgggatccagcgcaacctgagtacatcaatcattgctgtcaccatccaagggggagcacatcacctagacctcagagcatctaactcagaagaccccccgtctgtcgtggaggtgcgtaagctggaagctaccctcattcgcgagtgggtagcagcagccagactaaagcaaccagcagaggcacagtggcctgggcctaagtagcagccttccagccgagatgcagcaaacccagagaccctgttctatgtgagccgctgtgtgacagctcgccttacgtctgatactatccagactcatggtgctttgtctgagctggacctcagcaaggagctggtgggagatggagagacagaataaacacgtgctatgtcaaaaaaaaa

SEQ ID NO: 1037 - DNA, 1357 bp, Rattus norvegicus
  Genbank Accession No. AF000576
ctggagagctgcacctggagatctgccttaaggacctggaggaggaccatgcctgcatccccatcaagaaatctgaccctgtcgtgtcctaccgggagacagtcagtgaggagtccaacgtgctctgtctttccaagtccccaaacaagcacaacaggctgtacatgaaggccaggcccttccctgatggcctagcagaggacatcgataagggtgaggtatctgcccgccaggagctcaaggcgcgtgcccgttacctggccgaaaagtatgagtgggatgttgctgaagcccgcaagatctggtgctttggacctgatggcactggtcccaacattctcaccgacatcaccaagggtgtgcagtacctgaatgagatcaaggacagtgtggtggctggattccagtgggccactaaggagggtgctctttgtgaggagaacatgcgtggtgtgcgatttgatgtccatgatgtgaccctgcatgctgatgccatccaccgaggaggtggtcagatcatccccacagcgcgccgctgcctctatgccagtgtgctgactgcacagccccgcctcatggagcctatctacctggtggagattcagtgtcctgagcaagtggtgggcggaatctatggtgtcctcaacaggaagcgtggccatgtctttgaggagtcccaggtagctgggacccccatgttcgtggtcaaggcctacctgcctgtcaatgaatcctttggcttcactgccgaccttcgatccaacactggtggccaggccttcccccagtgtgtgtttgaccactggcagatcctgcctggggacccctttgacaacagcagccgccccagccaagttgtagctgagacccgcaagcgcaaaggcctgaaggagggcatcccagcgctggacaacttcctggacaaactgtaggcagcctggtactgccacacgctgcacagtgcccgcccatcagaagacaccttgagactgtccccacagtgcccctctggaggctgctggggccatcctgacatcactcagcactcacttgctaccaattctatttatttcggaattacaaggcagcgtgaatggccctctgcaggctggactggcaggccgtggggtgggcagcacacggtggttagcattttcagagggaaataacgcagatgtccaaaattctaaataaatgcattcagaggtttatggggtccatggccaagtgtaattcccccagagggggaagtgggggagtgcctccaggaaggcaggcaacccttagacctgcaacccagctgtgcgaatcattggagtaataaactcttctgtggttgaaaaaaaaaaaaaaaaaa

SEQ ID NO: 1038 - DNA, 2095 bp, Rattus norvegicus
  Genbank Accession No. AF001898
cacctgtgttccaggagccaaaccagcaatgtcttcccctgcacagcctgcagttcctgccccactggccaacttgaagattcaacacaccaagatcttcataaacaatgaatggcatgattcagtgagtggcaagaaatttcctgtccttaaccctgcaactgaggaggtcatctgccatgtggaagaaggggacaaggcagatgttgacaaagctgtgaaggccgcaagacaggctttccagattggctccccatggcgcaccatggatgcttcagagagaggacgcttgctgaacaagctggctgacttaatggagagagatcgtctgctgctggctacaatagaggccatcaatggtgggaaagtctttgccaatgcgtacttgtcggatttaggaggcagcataaaagcattaaagtactgtgcaggctgggctgacaagatccatggtcaaacaataccgagtgatggagacattttcacttttacgagacgtgaacctattggggtgtgtggccaaatcatcccttggaattttccactgcttatgttcatttggaagataggccctgccctcagctgtgggaacacggtggtcgtcaagccagcagagcaaactcctctcactgctcttcacatggcatctttaataaaagaggcagggtttcctcctggcgtggtgaacattgtccctggttatgggccaactgcgggggcagcgatctcctctcacatggatgtggacaaggtggccttcacgggatcaacccaggttggcaaattaatcaaggaagctgcaggaaaaagcaatctgaagagggtcacgctggagcttgggggaaagagcccttgcattgtgtttgcagatgccgacttggacattgctgtcgagtttgcacaccatggagtcttctaccatcaaggccaatgctgcgtcgcggcatcccggattttcgttgaggagtcagtttatgatgagtttgtgagaaagagtgttgagcgagccaagaaatatgtccttggaaaccctctgacccaaggaataaatcagggccctcagattgacaaggagcaacatgataaaatccttgatctcattgagagtgggaagaaagaaggagccaaactggagtgtggtggaggacgctgggggaacaaaggcttctttgtccagcccacagtcttctccaatgtgaccgatgagatgcgcattgccaaagaggagatatttggaccagtgcaacaaatcatgaagtttaagtccatagatgatgtgatcaagagagcaaacaatactacctatggtctagcagcaggagtcttcacaaaagacctggacagggccatcactgtgtcttctgctctgcaggccggggtagtgtgggttaactgctatatgatcttgtcagcccagtgccccttcggtggattcaagatgtctggaaatggacgagaactgggtgaacatggtctttatgagtacactgagctcaagacagttgcaatgaaaatatctcagaagaactcctaagaagcagagtgaagagaaactctcagctgtggctacacgtctcctatcgtcaccagcaaagtgttgttttactataattttttcttctgttgatttctttaacatgatgaatccatcagtgttactgttactcatagaaaacatgtagcttaatcctacaaaaccactcaccttctaatatgtgactccagtccttatcccagaataaaaggatagatttaggtgcaagctctctgtaactctgtcatgataggtgctttctgtcgtagctccctgtctagagtactcatttggtgaggaggaccagtcgtgatttaagctctgtccctctgtgaccccttgaactgcttctcggcatgcatgataactgcagagtcggctgctctgtttcccaggtgttgtgaaatgttttctagaaagccatgcctgcttatcaaatgaaatgcccagctgtaattagaatgcaaagctaataaagggacccttgcatgattttgttggtctgtaattatttgggaatcaactaggattatggcaataaactctgctggtcaaaaaaaa

SEQ ID NO: 1039 - DNA, 450 bp, Rattus norvegicus
  Genbank Accession No. AF003998
acctgaggcggaaccggaagacccaggtagtggtgccacgtccgtcgctgtgttgcctactcccggagtgggacctcggaaggcgcgatggcagattggactcgagctcagagttctggtgctgtggaggagattgtagacagagagaacaagcggatggctgacagcctggcctctaaggtcaccaggcttaaatcgctggctttggacatcgacagggacacggaagaccagaaccgatacctagatggcatggactcagatttcacaagtgtgactggcctactcacagggagtgtgaagcgcttttccacggtggcacggtctgggcgagacacccggaagcttctgtgtggtatggctgtggtcttaattgtggccttcttcatcctctcctacctcttttcgaggacaaggacgtgagccagtgggagccaagggagccagact

SEQ ID NO: 1040 - DNA, 1590 bp, Rattus norvegicus
  Genbank Accession No. AF004218
acgcgtccgacgttggtggtaccaggctgcccgctgggatgccgtgggctgtgggccggcggtgggcatggatcaccctgtttctgactattgtggcggtgctgatccaggcggtctggctgtggctgggtactcagagcttcgtcttccagagagaagagatagctcagcttgctcgacagtacgcagggctggaccatgagctggccttctctcggctgatcgtggagctgcggaggctgcacccaggccacgtgctgccggatgaggagctgcagtgggtgtttgtgaacgcgggcggctggatgggcgccatgtgtcttttgcacgcctcgctgtctgagtacgtgctgctcttcggcaccgccctgggctcccatggccattcgggacgatactgggctgagatttcagataccatcatctctggcactttccaccagtggagagagggcaccacaaaaagtgaggtctattacccaggagagacggttgtccatggacctggagaggcaacagatgtggagtggggaccaaacacgtggatggtggagtatggccggggtgttattccgtctaccctggcatttgcacttagtgacactattttcagcacccaggacttcctcaccctcttctatacccttcgcgcctatgcccggggcctccggcttgagctcaccacctacctctttggccaagacccctgaccagacaggctgaaggaagacctgcgagtggacaggagcgggcaggaccacatccatttctctactcgctgggactcatgttcactgacagcagcatataccatgcagataattaagttcctgctgtgtgaggaaggacatacatacacatacatccagacacagctcttggggagcaatgagacgcagagatgctaagacttgtatgtactgtaagatcatgcactcacctccatccagagagggtccccgacgtatactccaggggggcgcccagtcatgtttgaacacataccacgagcttgactcacctgactcaggcttttccagagcctcctgctggcattcggggctctgagatagaggattggggtagatgacacagtctgcctcgccctcgctctgatgccgcattccagtagtgatctctggtgaaggaaaagaggagctgcccttcggaggtcccgttcgcctgcagctgtgatgcccttccctccatccctttcctcaccatatgccttatctccattccagtcccctgctatgcaagtgtccctgtggcttgtcctccatgcccccagcgaccagctgggaaagcagaggaatgtagaggaagctgaaggactgaaggaaggaggttctccaccatggagaccctcagggttacaatgggaaagctggctgatgcctggggccagttcccaaagagaggacctggggaagtgagcctggctccgagaagccaccccattccaaaagaagcctttagtgtatgtgtgcacaccttgtcggtctccagacatttctgttgcattctctgtcttcctgtctctctctgttaataaaaacagatcaaacagtaaaaaaaaaaaaaaaaaaa

SEQ ID NO: 1041 - DNA, 4573 bp, Rattus norvegicus
  Genbank Accession No. AF004840
ttcccagcctacttctgtaattgggcgatatgcatccagacctcggacccttatggaaactgctgtatgttcttgtgattctgtgttcttctgtgagctcagacttggcaacttattttatttctgagccactctctgctgtccagaagcttggcagacccgtggtcctacattgttctgctaaacctgttactgcccgaatctcatggttgcataatggaaaacgattggacagaaacacagaacagataaagatccaccgggggactttgaccattctgtctctcaacccttccctttctggttgctaccagtgtgtggccaacaacagtgttggggctgttgtcagtggccctgccacagtgtccgctgacgccctggctgatttcgattcatcaacaatgcatgttattactgcagagaagaaaaacacgggtttcattggctgcagggtacctgagagtaaccccaaagctgaggtgcgctacaagatccggggaaagtggctgatgtattccacagggaactacataatccttccctcaggaaatcttcagattttgaatgtatcctcgaaggataagggatcgtacaagtgtgctgcctataatcctgtcaccagtgaactgaaagttgaacccgctggccggaagctccttgtgagtcgtccttcctcggatggttttcacattcttcaccctgctctttctcaggcattagctgtccttccgcacagccctgttaccttggagtgtgtagtgagtggggtccccgcctcacaagtgtattggctgaaggacgggcaggattgcctgtcaggaagcaactggagaaggctgtactctcacctggccacagctagcatcgacccagcggattccgggaactattcctgtgtggtgggcaacaacagttccggagatgttaaacacgtcacttacacagtcaacgtactggagcacgcttcaatttctaaagggctgcacgatcagaaggtgtccctgggggccaccgtacgttttacctgcgaagttcacgggaacccagcccccaaccgcacctggtttcataacgcacagcccatccgcccctcctcacggcatctgacggaaggaagtgttctgaagatcaccggggtcatcatggaggattctgggttgtatcagtgcatggcagacaatgggattggatttatgcaatctactggaagacttcaaattgaacaagacagtggacagaggcctgtcatagtcaccgccccagcaaacgtagaggtgacggacggagacttcgtgactttgtcttgcaatgccacaggagagcctgtcccggtcattcattggtacggccgccatggattgataaccagccatccatctcaggtccttaggtccaaatctcgaaagtcccacctcttccgacctggggacctggacccggagcctgtctacctcatcatgtcccaagcgggctcgagctctctgtccatccaggcagtgactcgggagcatgctgggaaatacacttgcgaagctgtgaacaaacatggcagcacacagtcagaagcgttcctcacagtcgttccttttgaaacaaacacaaaggcagagccagtcacaccctccgaagcttctcagaacgatgaacgagacccacgagacggttcagagtccggcttgctgaacttgtttccagtgaaggtgcattccggtggagtggaattgccagcagagaaaaatgcctctgtccccgatgctcctaacatactgagccccccacagacccacatgccagacacatacaccctggtgtggaggacggggagggatggcggaatgcccatcaacgcctatttcgtgaagtaccgaaagctggacgacggcagtggtgcggtaggcagctggcacacggttcgcgtcccagggagtgagagcgagctgcatctaaccgaactggagccttcaagcctttatgaagttttgatggtggccagaagtgcagtcggcgaaggacagcctgccatgcttaccttccggaccagcaaagaaaagatggcatcatcaaaaaacacccaggcgtcctttccacctgtgggcatccctaagcggcctgtaacttcggaggcttccaacagcaattttggagttgtgcttacggattcctctaggcatagtggagtcccagaggcaccagatcgacctactatctcgatggcatcggagacctcagtctatgtcacctggattccccgtgcaaatggcggctctcccatcactgccttcaaggtggaatataagcggatgaaaagtagtgactggctggtggctgctgaagacatccctccttccaaactctctgtggaagtccggagtttagagccaggttcgatatacaaatttagggtcattgttatcaaccattacggtgagagttttcggagctcggcgtcccgtccctaccaggtggctggtttcccaaatcgcttttccaatcgccccataactggacctcacatcgcatacacagaggctgtcagcgatactcagatcatgctaaaatggacgtatattccatcaagtaacaataacactcccattcaaggattctatatctattaccggccaacagacagtgacaatgacagtgattacaagagggatgttgtggaaggttcaaagcagtggcacaccattggtcacctgcagccagagacctcctatgacattaagatgcagtgctttaatgaaggaggagagagcgagttcagcaacgtgatgatctgcgagactaaagtgaaacgagttcccggagcatcggagtatcccatgaaagagttgagcactcctcccagttcttcagggaacggagggaacgtggggcctgcaaccagccctgccaggagcagcgacatgctgtacctcatcgtcggctgtgtgcttggggttatggtcctcattcttctggtcttcattgcactgtgtctgtggaagagtcgccaacagagtgccatacagaaatatgatcctccaggatatctctaccaggggtcagagattaatgggcagatggtagagtataccactctctcaggaacagcccggatcaatgggagtgttcacggaggcttcctcagcaaaggcagtctcagcaatggctgctctcacctccaccacaaaggccccaacggagtcaatgggatcctgaatggaaccataaatggggggctttattctgcacacaccagctccctaaccaggacgtgtgtggagttcgaacatcctcaccatctagtgaacggtggagcagtgtacacggctgtccctcagatggacccactggaatgcattaattgtcggaattgccggaacaacaataggtgtttcaccaaaaccaacagtccccttcctgtggtcccagtggtagcctcttatcctcaggatggactggaaatgaagcccctcggtgtcatgaagttcccagtgtgtccagtttccacagttcctgatggtggccagatacctgaggagtgcctcaaggacagcgtggcaccagcacctacccagcgtacatgccgccaggacaacacaagcgacatcaattctgattccacagaagacacagcagagttcaacagaggagacagcagcggtcattcagaagcagaggacaaagttttcagttggagtcctcttattttatcacctgtcttggaggactgcagtgagaagacagcgtggtctcctcctggcccccctctagacgggctgtcagtggtccttcagcaagcccaagagacctgagaggaatgtgagcaggcctcccactgcaagccagtaactgcaccacacaggcctggggacaaactgtgtgaaggacattaattcaaatcagagaaaaccattatttattttttggtagtagtaatgtcatgaatgtatcttaaaatgtgcgcccttttatattatttatgccttatgttttcccttccccatttcttcctccccctatttttttttaatgcagagtttttttaatcgtctggagagcaggggatcattctgtgtcttctggggccttcagttggcaggcttccatcttctggcctgttcagttgtggggagaggattgcccacgccatttcacatttgtcaccagtcgttcctagatggaaaaactgttacctctcccatgtcgtcagacttttgggaacatttaaaaatcaaccatagttgtgatcatatgtttataatagccaacccagctgacacacttttgagtaccttccagaaaaatactaatactgacttattttctctctgtgcctgggtacaagtagcgatcaatcttctaggtatcaaattagccagtgttgttatgaacacagaaacatgtaaagtctgtttggattattgtattatatagaaagggaaccagattcagaaggaaaagtaatgccttcatggttccactgctcctattatcttaatttacaaaatggccaccacgagttctttgcactacttgcagaggtatataataaatacaaaagtaaggcctttaaactgatagtttg

SEQ ID NO: 1042 - DNA, 520 bp, Rattus norvegicus
  Genbank Accession No. AF007107
ttgcagggcccggaagctcactgttccgaaatggccgagcagtcagacaaggatgtgaagtactacactctggaggagattcagaagcacaaagacagcaagagcacctgggtgatcctacatcataaggtgtacgatctgaccaagtttctcgaagagcatcctggtggggaagaagtcctaagagagcaagctgggggtgatgctactgagaactttgaggacgtcgggcactctacggatgcacgagaactgtccaaaacatacatcatcggggagctccatccagatgacagatcaaagatagccaagccttcgcactcagcgctatgagttttcctcttagcacagctttcattgtgtcccataagtttgggaaacccttatcactactgtcgagtctaattccagttggtggaccaactgggtgatcccagccatctcagccctggtggtagctctgatgtatcgcctctacatggcagaagattaacctgtctgtccgaagccaaggaaggaa

SEQ ID NO: 1043 - DNA, 2742 bp, Rattus norvegicus
  Genbank Accession No. AF007583
  misc_feature (1)..(2742): n = a or c or g or t
cagcagccttgccctctgacttgatatttaccagacccggccagcatggctgtcctgaatccaatgactttgggaatttatctccaactcttcttctgctccatcgtgtcgcagccaactttcatcaacagtgtcctcccaatctcagcagcccttcctggcctggatcagaagaaacgaggcaaccacaaagcatgctgcctactgatgcccccgccacccccactcttcccaccgccattcttcagaggcagccgaagcccgcttctctccccagacatgaagaatcttctggaacttgaggcctccccatcaccctgcatgcaaggctctctaggctctcctggcccccctgggccccagggtccacctgggcttcctggcaaggcaggaccaaagggagaaaagggggatcttggccgcccaggaaggaagggtagacctggacccccaggtgttcctggcgagcccgggcccgttggctggccaggccctgaaggacccaggggcgaaaaaggcgacgtgggtatgatgggtctgccagggtcaagaggaccgatgggctctaagggcttccctggatccagaggggaaaagggatccagaggtgaaagaggggacttgggtcccaaaggagaaaagggtttccctggatttcctggaatgctggggcagaaaggtgaaatgggtccaaagggagaatctgggatagcaggacatcggggccccacaggaagaccagggaaacgaggcaagcagggtcagaagggagacagtggaattatgggcccaccaggcaaacctgggccttctggtcaacctggccgtcaaggtcctcccgggcccccaggacccccatctgcaggacaacttgtaatgggactcaaaggggaaagaggatttccagggcccccgggaagatgcctttgcggaccccctgcgaatgtgaataacccctcctatggggaccccatgtatgggcgcggctcccctcgagttcctgcgatttttgtggtcaacaaccaggaggagcttgagaagctgaacactcaaaatgccattgcctttcgaagagaccagcgatctctgtacttcaaagatagccttggctggctccccatccagctaacccctttctacccagtgggtttacaccataaagcagcatggcacctgtgtggggatggggtcctgcagcctggggaggaatgtgacgatggtaacccggatgtgagtgacggctgcattgactgtcatcgggcctactgtggagacggttatcggcaccggggcgtggaggactgtgacggctctgactttggctacctgaagtgcgagacctatctccctggatcatacggagaacttcggtgcacccagtattgctccatcgactccacaccctgccgatacttcacgtgagaggctgcagggacaggtgggctgtggcccatggacccgttggctgtttctctacccttcacatcaagctggccttgccctctcctgggacagtgccctttgaccttcatgtgacaaaacaaggatatattcttgctgctacgacatgcttttgactccgtatgactggaagttttggaccactgaatcctgtcttaattctaagaaccagaatccttctataccccaccctggaaacttccccatcccctccaatctggctaaacagctggctgtaatgcctgatctcttctggaaagatgctggctgaagcgtggatttggcttagcactgttaagcatacaggcatctacaggcctggcgtggttcgttctggtctaccaggtttaggggtgctcgtgaacaggcttctgcacctccaagcacatctgttccgaccccaaagcgagccagctgctgggtctctcaagatttaagaaccacatcataggaggtgagaaattctcttggtgcagctcccagcttcagacctgctgaggggacccttcagctggctggagcctggatcaacttcatgttgatcagtcaggggtacgagagagccacaaggcccaagcttggtcccaggaagagggtgaaggctcagctgagtcactgccatgtgacccctaccagaacagaaaccttcttccttcccgaagttctctgaggcaccatctgaccttgtgcttctctctgcaccttgacctctgtcttgacagtgccctcttgcaacgtgcctgtgtgaaagtctcacccctcatgccctcccatggcccgtgctgctgtttcctcatgctggcttccctggcttgggctccactgccaagtccttggctgcaggacgcgccggtgactctcttccatgcccatcttgcataccccttgttccctcactgtgtgcccaacctcttcctttatcctgggattctttttcctaagccctgcatttctgagaactgccttcccatatttcatgaatggggtttggctctatttggggaaacatcgctttttgtccccctccccaatgcgcgcacctgccttgccccactacccaggctgcctctgggctgtgcaaagctcttcagtgagcccaagccttgggaattcagcaggtggcaccttctcacccagcaagtccgagctgtgaatggtatttcctgagagaaatcagcctgaggnnnncttcaggggcagacagctatctatttactattctgggacttctgggtgggcaaacaagaaataaaggtgattcttggctgtgaaaaaaaaaaa

SEQ ID NO: 1044 - DNA, 1219 bp, Rattus norvegicus
  Genbank Accession No. AF008554
aattgaggaggtcagaaggtttcgcccggtcgccgagagagacaagcgaacatggcctcgccgaggtggctctggtgtgtgtgtgcgaccgcagcggtcacactgctgctcgtttccaaggttccttcggcctctgcccaaagaaagaaggagaaggttttagtggagaaggtcattcagctgatggaatggaccaatcaaagaccagtcataagaatgaatggagacaagttccgtccccttgttaaagcaccaccaagaaattactctgttattgtcatgtttactgctctccaacttcatagacaatgtgtcgtttgcaagcaagctgatgaagaattccagattttggcaaatttttggcgatactccagtgcatttaccaaccgcatattttttgccatggtggattttgatgaaggctctgatgtatttcaaatgctaaacatgaattcagctccaactttcatcaactttcctccaaaaggaaaacccaaaagggctgatacatatgagttgcaggtgcgagggttttcagctgaacagattgcccggtggatcgcagacagaactgacgtcaacattagagtaatcagacctccaaattatgctggacctctaatgttggggttgcttcttgctgttattggtggacttgtgtatctgcgacgaagtaatatggaattcctctttaataaaaccggatgggcttttgcagcattgtgttttgtacttgcaatgacatctggccaaatgtggaaccatataagaggaccaccatatgctcataagaatccccatacaggacatgtgaattatatccacggaagcagccaagcacagtttgtagctgaaacccacattgttcttctcttcaatggtggggttaccttaggtatggtgcttttatgtgaagctgctgcctctgacatggatattgggaagcgaaggatgatgtgtattgctgggattggacttgttgtgttattcttcagttggatgctgtccatctttcgatcaaaataccatggctatccatacagctttctgatgagttaaagaggattccagagaaacattgacaccggtaatggaaactgaaaaataaaacctgttgggggttggagaatgcactcaagttttttcttaccccttgggcaaggaacgacttataacaattaccaagtccggggccttaaagaaaggaacagaggtttgg

SEQ ID NO: 1045 - DNA, 2388 bp, Rattus norvegicus
  Genbank Accession No. AF009330
ttccctcccgcctctccacccgccccacttctcattcacttggctcgcacggcgcagacagccaggcgagcacacaccgccagtctgtgtgcagagcgggagccagaagccgtgggggacacccggtcatgcacgcccccaactgaagcgacacctcaaagccgcagctcctggcagcccaggccattgcaagaagctcaggctagctcataggaacataccccttgagaccctcggatcctcccttccaggccagtcctctctcagactctctgctaagtgcagacaggagcgcacagtggcccctgctcgccgcatcatggagcggatccccagcgcgcaaccacctcctacctgcctgcccaaaacgccagggctggagcacggagacctgtcagggatggattttgcccacatgtaccaagtgtacaagtccaggcggggaataaaacggagcgaggacagcaaggaaacttacaaattgccgcaccggttgattgagaaaaagagacgtgaccggattaacgagtgcattgcccagctgaaggatctcctacccgaacatctcaaacttactactttgggtcacttggagaaagcagtggttctcgagctgacgctgaagcacgtgaaagcattgacaaacctaattgatcagcagcagcagaaaatcatggccctgcagagcggtttacaagctggtgatctgtcgggaaagaatattgaggcaggacaagaaatgttctgctccggtttccagacctgtgcccgggaggtacttcagtacctggccaagcatgaaaacactagggacctgaagtcttcccagcttgtcactcatctccaccgtgtggtctctgaactcctgcagggtagtgcttccaggaaaccattggactcagctcccaaacccgtggacttcaaagagaagcccagcttcctagccaagggatcagaaggccctgggaaaaactgtgtgccagtcatccagaggacttttgctccctcgggcggggagcagagtggtagtgacacggacacagacagtggctacggaggcgaattggagaagggtgacttgcgcagtgagcaaccctacttcaagagcgatcacggacgcaggttcaccgtgggagaacgcgtcagcacaattaagcaagaatctgaagagccccccaccaaaaagagccgaatgcagctctcagatgaggaaggccacttcgtgggcagtgacctgatgggttccccatttcttgggcctcacccacatcagcctcccttttgcctgcccttctatctcatcccaccatcggccactgcctatctgcctatgctggagaaatgctggtatccgacctctgtgccactgttatacccaggcctcaacacctcagcagcagccctctccagcttcatgaacccagacaagatcccaactcccttgctcctgccccagagactcccttctcccttggcacattcgtcccttgactcttcagccttgctccaggccctgaagcagatccctcctttaaacttagaaaccaaagactaaactcttgagggcgaatctcctgctgctttgcttttcctttccccactaattccaagaccacaaaaggtttctgtgagtgcagagagatcggcccaccatgcagacccacagagaagattcagaatgtgtgtgagagtgagtgtgtgagtgcgcgtgcgtgtgcttgtatgtgtgtttatagatgtaggacattaagttccttctgacacagggaagatgtgagaaggatggcctgacatcagatgacaagaggtctatagcacatctctgggcttttccctacccagagaagagccccctttgatacaaatcagttggattttcatatgcttcaaaggcttgatctgtgagtcactccagtttgggacataggtctgtctgtggctttgagaaaaggtactttcaaaagagggctttccagagcacagctcacagccagctgttaggaccccacccttctcctttattgtggaggtgactcacagcagactgacagtggtcagactgagctttctgctaaggtggtgaggtagccaacactggcatgtctcggtagtggtttgggcaaatttccgcaggtctcttcccccaaccctgcctctgatgaataaagacaatgagtacagttccttaattcaggcttttgtgactagcttactacggaaccgaaaatggtcccctttgtacaagccgagctgttatggaatcacggtgaaccagacccaggtctgtggcacctgtttgtttgtttttttttttttttttttttagctctcatttctacggcatgctttccaaggaaccaaaggagggtctcagagatgccccctcgt

SEQ ID NO: 1046 - DNA, 5010 bp, Rattus norvegicus
  Genbank Accession No. AF010597
tgactttccacagtggggtctctctcttctcctggctccgtcaagttcacatctgtagggtccaacttggatggcatggtgtaggctgctggtacctgatgaacctgaatttggaagactgaagaaagttgtactgtagcctcctctgagccaaaagctgaaaagcaagtaaaccgtctcaactgggctaagtttttgaaaagctggcaaagggttgttgagtgcagattctgcaatgtctgactcagtgattcttcgcagcgtgaagaaatttggagaggagaatcatgctttcgaatcagatggatcacataacaatgataagaaatcaaggttacaagataagatgaaggagggagacattcgagttggcttctttgaactgtttcgattttcttcatcaaaagacatctggctgatgcttatgggaggcgtatgcgcattgctacatggaatggcccagccaggcatacttattatttttggtataatgacagatatttttattaaatatgacattgaaaggcaagaactcgagataccaggaaaagcgtgtgtgaataacaccattgtatggatcaacagctccttccaccagaacatgacaaatggaacagtctgtgggttggtggacattgaaagtgaaatgatcaaattctctggcatctacgcaggagtcggcatgaccgtacttatccttggatactttcaaataaggttatgggtcatcactggggctcgtcagataaggagaatgaggaaaatttacttccggagaataatgagaatggaaattgggtggttcgactgcacttctgtgggagagctgaattcaaggtttgctgatgatattgaaaaaatcaatgacgccattgccgaccagttggctcatttcctccagcgcatgtcgacggctatgtgtgggttacttttagggttctacaggggttggaaactaaccttggtgattcttgctgtcagccctctcattggcattggggcagccgtcataggtctgagtatagccaagttcacggagcttgagttgaaggcttatgccaaagcggggtctattgctgatgaagtcctctcatctattcgaacagtggccgcttttggtggtgagaacaaagaggttgaaaggtatgagaaaaatcttgtgtttgcccagcgctggggaatttggaaaggaatggtgatgggcttcttcactgggtacatgtggtgtctcattttcttctgttatgcactggccttctggtatggttccacacttgtcctagatgaagaagagtatacaccagggacactggtccagattttcctctgtgttatattagcagctatgaatattggccatgcatcttcttgcttggaaatcttctccactgggtgttcagcagctaccaatatttttcaaacaatagacaggcaacctgtcattgactgcatgtcaggagacggctacaagctagaccgaatcaagggtgaaattgagttccacaatgtgaccttccattatccttctagaccggacgtgaagattttagataacctcagcatggtcataaagccaggggaaacgacggctctggtgggatccagtggggctgggaagagtacagcattacagctcattcagagattctatgacccctgtgaaggcatggtgactctggacggccatgacattcgctctcttaacatccggtggctgagagatcaaatcgggatcgtggaacaggagcccgttctgttctccaccactatcgcagaaaacatccgttttggcagagaagatgcaacaatggaagacatagtccaagctgccaaggatgctaatgcatacaacttcattatggccctgccgcagcaatttgacacccttgttggagaaggaggaggccagatgagtggtggtcagaagcaaagagtagccattgcccgagccctcatacggaatcccaagatcttgcttctggatatggctacctcagcactggacaatgagagtgaagctagagtacaagaagcattgaataagatccaacatgggcatacaatcatctcagttgcccatcgcctgtcaacagtcagagctgcagatgtgatcattgggtttgagcatggagtagctgtggaaagaggcacccatgaagagctgctagaaagaaaaggtgtctacttcatgcttgtgaccctgcaaagccaaggagataatgctcacaaagaaacgagcataatggggaaagatgcgacggaaggtggcacccttgagaggaccttttccagaggcagctatcgggatagtttaagagcttcgatccggcaacgctccaagtctcagctgtctcttctgacacatgaccctccactggctgttgctgatcacaaatcctcttacaaagacagcaaggacaatgacgtgcttgtggaagaagttgaacctgccccagttaggaggattctaaaatacaacattccagaatggcactacattctggtaggatctttgagtgcagccattaatggggcagtcacacccatctactcccttttattcagccagctccttgggactttttcactcctcgataaagaacaacaaaggtcagagattcacagcatgtgtctgttctttgtcatcctgggctgtgtatccattttcacacaatttctgcagggttacacttttgccaaatccggagagctcctcacaaagaggctgcggaaatttggtttcaaggcaatgttaggacaagatatcggctggttcgatgacctcagaaataatcctggagtactgacgactaggcttgctacagatgcttcccaagttcaaggggctactggctctcaagttggaatgatggtcaattccttcactaacatcattgcggccttgctgattgccttcttctttagctggaagctcagtctgattataacgatcttcttcccctttctggctttatcgggagctgtacagacaaaaatgttgacgggattcgcttctcaagacaagcaagctctggagaaggctggtcagatcaccagtgaagccctcagcaatatccgcacagttgctgggattggagtggagggaagatttattaaagcatttgaggttgagctccagacatcatacaagactgctgtcaggaaggcgaatatctatggactctgctttgccttttcccaggggatagcatttcttgcaaattctgctgcctatagatatggaggttacttaatagcctacgaaggtctgggcttcagccacgttttcagggtggtctcttcagttgtactgagtgcaacagccgttggaagaacattctcttatactccgagctatgccaaagctaaaatatcagctgcacgcttttttcaactgctagatcggaaacctccaattaatgtgtacagtgaagcaggtgaaaaatgggacaacttccaagggaagattgattttattgactgtaaatttacgtatccttctcgacccgatatccaagttctgaatggtctctcagtatctgttaatcctgggcagacgctggcatttgttgggagcagtgggtgtggcaaaagcaccagcattcagctgttggaacggttctatgatcccgatcagggaactgtgatgatagatggtcatgacagcaaaaaagtcaacattcagttcctccgttccaacatcgggattgtctcccaggagccagtgctgtttgactgtagcataatggacaacatcaagtacggggacaacactaaagagatctccgtggagagagccatagctgctgcaaagcaggctcagctgcatgacttcgtcatgtcgctcccagagaaatatgaaactaatgttgggatccagggctctcagctctctcgtggggagaaacaacgcattgctattgctcgggccattgtgcgagatcctaaaatcttactactggatgaagctacgtctgccctagacacagaaagtgaaaagacagtgcagactgctctggacaaagccagagagggtcggacctgcattgtcattgctcatcgtttgtccaccatccagaactcagatatcattgctgtcgtgtcacaaggagtggtgattgaaaaagggacccatgagaaactgatggcccagaagggagcctactacaagctggtcatcactggagcccccatcagttgacctgactggagacttcacacagataatgatgtgctgagtacaggagggctgtgggtttttgtagccatatagagaattattaatgctttacagacagaagtatccactgggatccaaagtaattttgagtgactttcagtaataatttcagtttgaaatgtctatgtagaaaggagagagcccagagtcagcatgagtcaaagttcaaagtccaaggtcaagtagctgcttatctgccggccagtgctgctctgggtagaaactggtcactgtctccatcgaggacgccgcggtgagagcaaggagtcctccttcaggacagagggttatctcttgcatctgggaaagctccctgcgcactgagcctgctctgtaatctgcactcaactgtttgagccagttcaaggccaagagctaaggacccaaggctactggtatttcttaactaagtttagtttgtttactataaggaagcaaatttatttacctttaactcctgtgagtagggtggggagccctttcccattctggcatctcccaggctcagggaggccaaggtgacaaaaggagaagtagaggtcgctggtcaggtgtgttgattgtaccgaaggctcagggtattggtgtcactgtacactacagtggatctgccagtgtgaagcaggggctctctaccaggacttcgacttttcattccctgccaccatgtcacctgatgtcccttactcttaggaaattctatgcatggaatggaaatgcatccgaatcttaagttgttacataaaaaaatctagtaaaacatagtagga

SEQ ID NO: 1047 - DNA, 2261 bp, Rattus norvegicus
  Genbank Accession No. AF012714
tcggtgcttagcccctacttcggcacgaagacacgctacgaagatgtcaacccctggctgctgggcgacccggtggcgccgcgacgggacccggagctgctggcggggacttgcaccccggtgcagctggtcgccctcatccgtcacggcacccgctaccctacgaccaagcagatccgcaagctgaggcagctgcaggggctgctgcagacccgcgagtccgtggatggcgggagccgagtggccgccgctctggaccaatggccgctgtggtacgatgactggatggacgggcagctggtggaaaaggggcggcaggacatgcgacagctggccctgcgtctggccgccctcttccctgacctcttctgccgggagaactacggccgcctgcggctgatcaccagctccaagcaccgctgtgtggacagcagcgccgccttcctccaagggttgtggcaacattaccacccaggattgccacctcccgacgtctcagacatggagtgtgaccctccgagagttaatgataagctaatgaggttcttcgatcactgtgagaagtttttaaccgaagtcgaaagaaacgccacggctctttatcatgtggaagccttcaaaaccgggccagaaatgcagacagttttaaagaaagttgcagccactttgcaagtgccagtgaacaatttaaatgcagacttaattcaggtagcctttttcacctgttcgtttgacctggcaattcaaggtgtccattctccctggtgcgatgtgtttgacgtagatgatgcgaaggttctggaatacttaaatgatctgaaacagtactggaaacgaagttatggctatgccattaacagccggtccagctgcaacctgtttcaggacatttttctacacctggacaaagcagttgagcagaagcaaaggtctcagccggtctcttcttcagtcatcctccagtttggtcatgcggagaccctcctacccctgctctcgctcatgggctacttcaaggacaaggagcccctgacagcatacaattttgaggagcaggtgcatcgcgagttccgaagtggtcacatcgtaccatatgcttcaaacctaatatttgtgctttaccattgtgaagacgcacagacccctcaagaaaaattccagatacaaatgctgctgaatgaaaaggtgttacccttagctcactcgcagaaaactgttgccttgtatgaggatctgaagaaccactaccaggacattcttcagagctgtcaaactagtaaagaatgtaacctacccaaggtgaacatcacgtccgacgagctctgaggactcatcagtgctctgctgagggcgcttgttgccaataggtagccactctaaaggcagcaacaggaggatctctgtgagctcaaggccaacctgttctacatagtgagttccaggccagccaaggctgcgtagagaaataaagtttggtccttttgtcttttcacagaaaatgatagtttcttttagaatctggacatacgggtaagacatgactctccctggagcagctctcttcagaaaaactaattcagcaaaacagctgtccctcccagtgtttgcagagctgaaattttcctaatgacctaagaaaatgctgatgtagaatggtattagaaaataacacttcaaaagtgttggataccaaagcacagtggcagctgggtgagccgcagtgagtgactgagatggggacttgagtgatcatgttgggttctttccttctccttcacgaaggacacaaagaaggaagtctaataacgtatccatccagacaggaaatcaactcgatattaagaaccaggctgaagtaaaactgaaagtgtgggctatttttgttgatgttatttacaaaaagatttaaacactgtcagtaattgcctttaacctccaagtaggtcttgcagaaccacctccatccctcggacctgtttgaggcgcgcagttataatggggcccagcctggtacagagccgacttccttgactgttgcctggttatctttcgttccatcatggctcccctttttatatcttgatattacataaagtttatcttttggtggcttggatttttttttaaataaagacttatctgcctaatttaattgtagagattcgaacctgattcaaagaaattttgagttctttcaaataccataaaaatgtttgctacaataaataaataaaattcttgtggctttactaccaaaaaaa

SEQ ID NO: 1048 - DNA, 589 bp, Rattus norvegicus
  Genbank Accession No. AF012887
gtccattgtcaccatgtccccgctgtgcctgctgttgctggctttagccctggtggctgtccccggtgcccgaggcgcttgtccagtgcccgcagacctgaagaagtcagatgggacgcgcacgtgcgccaggctctatgagaacagtgacccctactatgacaactgctgccaggggcctgaactgtctgtggatccaggcaccgacctgccctacctgccctcggactggtctaactcggcatcttctctggtagtggcccagcgctgcgagctcaccgtgtggtctctccctggtaaacgtggcaagacacgcaagttctctacgggtagctaccctcgactggaagagtaccgcaaaggcatctttggaacctgggccaagtccatctctggcctctactgcaagtgctattgatgtcttgagggtctgtcgtctctgattctgcacagtgctgagccttacccagtctgtccttggggattgctctgaccccaagagccaggaggcaagatggccccattacctgctatcagagcttccctataatacagccctggtgaagctaaaaaaaaaaaaaaaaaaaaa

SEQ ID NO: 1049 - DNA, 669 bp, Rattus norvegicus
  Genbank Accession No. AF016387
ccaagatgaaggacatgcggatggataagtcggagctcgggtgcctgcgcgccattgtgctgttcaatccagatgccaagggtttgtccaacccctcggaggtggagtctcttcgagagaaggtttatgccaccctcgagccctataccaagcagaagtatccggaacagcctggcaggtttgccaagcttctgctgcgcctcccagctctgcgctccattggattgaaatgcctggaacacctcttcttcttcaagctcattggggatacccccattgacaccttcctcatggagatgttggagacccctctgcagatcacctgaaactcctcggcagtagcttcctcacccagagtgacccctgggctggtgtgtgtgtcgccctacccctgcacactgtcctctcccactctgacttcccttcctgtccccaaaatgtgatgcttgtcccgaataactacaacctttctacacatgagacttttctaggtggagttttgtatggttgttaaaggtgacccttctttgctacttaaggggctgagtctggcagttcttggaagagtagccaagcctctgtacatataattatcttggtttaaattattttttcacttgccatggaaagcaaacaaatggaaaagaaaataataaatacgatactggc

SEQ ID NO: 1050 - DNA, 1283 bp, Rattus norvegicus
  Genbank Accession No. AF017437
cggcgcggagatgtggcccttggcggcggcgcgctcctgctgctgcggttcagctcaactcctgcttagtaaagtcaaatctgtagagttcacgtcatgcaatgacactgtggtcatcccttgcaaagtccttaatgtggaggcccaaagcaccgatgaaatgtttgtgaagtggaagttgaacaaatcgtatattttcatctatgatggaaataaaaatagcactactagagaacaaaactttaccagtgcaaaaatctcggtctcagacttgctcaaaggcattgcctctttgacaatggatacccatgaggctgtggtgggaaactacacctgtgaagtgactgagctttccagagaaggcaaaacagttatagagctgaaaaaccgcccagtttcgtggttttctacaaatgaaaagatcctcattgttattttcccaattttggctatactcctgttctggggaaagtttggtatattaacactcaaatacaagtccagccatacgaataagagaatcattctgctgctggttgccgggctggcactcacactcatcgtggttgttggcgccatccttttcatcccgggagagaagcccgtgaagaacgcttctggtcttggcctcattgtaatctccacaggaatattaatactgcttcagtacaatgtgtttatgacagcttttggaatgacctctttcaccattgccatattgatcactcaagtgctgggctatgtccttgctgtggtcgggatgtgtctttgcatcatggcttgtgaaccagtgcacggcccccttttgatttcaggtttgggaatcatagctttagcagaattacttggactagtttatatgaagtttgtcgcttccaaccagcgaactatacaacctcctaggaaagctgtagaggaaccccttaacgcgtttaaagagtcgaaagggatgatgaatgacgaataactgaagggaagtgacggactgtaacttgaaagtcagaagtggaagaattcagttgtctgagcaccatggccttcacaactcacagctggaaggaacacacaacagtgactgactttcatctctgaaaaaagtcattgaaccataaatgaatattacagttaagtttatattaaagcagctgtaatttacgtaataaaaaatatatgatgtgctgtgaaaaaaaaaaaaaaaaaaaaaaaaaaaaaaaaaaaaaaaaaaaaaaaaaaaaaaaaaaaaaaaaaaaaaaaaaaaaaaaaaaaaaaaaaaaaaaaaaaaa

SEQ ID NO: 1051 - DNA, 2225 bp, Rattus norvegicus
  Genbank Accession No. AF020618
ctgcagtacttgtacattgctaaataaagagagggactccaggaggagcagcctgggtctaagaggtaggcagaaggaggttttaggggcctgagcacaagcttgaggagagaaaggttattaaaaagccagacgcttacaggtctcagaagggctagccagaaactgtggctggggttaaggaaagggtttaagagtgtgggcttttggttctgaggatgtagaacgtgaatgttgagagaagaaccaagtggcggagttgggtgtgagcaatgctattaggaatttgaggcagggattcacgcgctgctgtgactattttttaacaatgactcagtgctgtgacctgatactgtttccagagcgacttctaaacaaattccccctttctaggccagacacatggccccaagcccaagaccccagcatgtcctgcactggaaggaagcccactctttctacctcctgtctccactgatgggcttcctcagccgggcctggagccgcctgagggggcccgaggtctcagaggcctggttggcagaaacagtagcaggagcaaaccagatagaggctgatgctctgttgacgcctcccccggtctctgaaaatcacctacctctccgagagactgaaggaaatggaactcctgaatggagtaaagcagcccagaggctctgccttgatgtggaagcccaaagttcccctcctaaaacttggggactttcagatattgatgaacataatgggaagccaggacaagatggccttagagagcaagaagtggagcacacagctggcctgcctacactacagccccttcacctgcaaggggcagataagaaagttggggaggtggtggctagagaagagggtgtgtccgagctggcttaccccacatcacactgggagggtggtccagctgaggatgaagaggatacagaaaccgtgaagaaggctcaccaggcctctgctgcttccatagctccaggatataaacccagcacttctgtgtattgcccaggggaggcagaacatcgagccacggaggaaaaaggaacagacaataaggctgaaccctcaggctcccactccagagtctgggagtaccacactagagagaggcctaagcaggagggagaaactaagccagagcaacacagggcagggcagagtcacccttgtcagaatgcagaggctgaggaaggaggacctgagacttctgtctgttctggcagtgccttcctgaaggcctgggtgtatcgcccaggagaggacacagaggaggaagaagacagtgatttggattcagctgaggaagacacagctcatacctgtaccaccccccatacaagtgccttcctgaaggcctgggtctatcgcccaggagaggacacagaagaggaagatgacggtgattgggattcagctgaggaagacgcgtctcagagctgtaccaccccccatacaagtgccttcctgaaggcctgggtctatcgcccaggagaggacacagaagaggaagacgacagtgagaatgtggccccagttgactcagaaacagttgactcttgccagagtacccagcattgtctaccagtagagaagaccaagggatgtggagaagcagagccccctcccttccagtggccttctatttacctggacagaagccagcaccaccttgggctgcccctaagctgccccttcgactgcagaagcggctcagatctttcaaagcccccgcccggaatcagggccctgagattcctctgaagggtagaaaggtgcacttctctgagaaagttacagtccatttccttgctgtctgggcaggaccagcccaggctgctcgtcgaggcccctgggagcagtttgcacgagatcgaagccgctttgctcgacgcattgccaggcagaggagcagctgggtccttaccttacccctgctttcagggccagagcatggacacgccttagaaacctaccccttcctctgtcgtcctcgtctcttccactgcctgagccttgctcttccactgaggccacacccctcagccaagatgtgaccactccctctccccttcccagtgaaatccctcctcccagcctggacttgggaggaaggcgggctaagcctgagtagttttttgtgtattctatgagtgttagtctcttaatacgaatatgtaacgccttttgcatttgtaaaaaaaaaaaaaaaa

SEQ ID NO: 1052 - DNA, 1278 bp, Rattus norvegicus
  Genbank Accession No. AF020712
atctgtttcccaggagactctggaaaacgcaggggcagagtccccaacagcagctgagggctcgaagagactaggtacctgcttgtggagttttttgtcccggagcaagctgtgtgctcagacttgaccatgtttgggcatggaggctcaacccagatggaactgaagactgcttccctagagaccaactggagaccaaacttcctgctagagctccaaggcctgacttggggtgggggggtgggggccagtggagagaaaccatctgccagcggagacccagggaactaaatgactgttgcctcctgtggccatggggaagaagctggtgatggcccagaagcgcggagagactcgagccctctgcctgggggtggcgatggtcgtgtgtgccgccatcacttactacatcctgggtaccactgtgctgcccctctaccagaaaagtgtgtggacccaggaatccacctgtcacttggttgaaaccaacatcaaggaccaggaagagctggagggcaggaaggtgccccagtacccatgcctttgggtcaatgtatcagctgtgggcagatgggccatgctgtatcacacagaagacactcgggatcaaaaccaacagtgctcctatatccccaggaacctggacaactaccagacagccttggttgatgtgaagaaggtcagagccaatttctacaaacaccataatttctattgcttttctgcacctcaagtcaatgagaccagtgttgtgtaccagcgcctctatgggccccaaatcctcctcttctccttcttctggcccaccttcctgctgactggtggccttcttatcattgccatggtaaagctcaacaggtccctctctgtcttggcagctcagaagtagaccaatctcttctgcacagcagcatggagtcaccaggaacggcaggggtcccgggcaggcataattctcttcctcttgtcctccatttaatttgttcaacctctttggacaatcatttcttgctcaagaatgtttaacagctctctccggttgacttcgaagggcaaaggaactgccagtcacagctctcgatccccggcttcagttggctcacatctgttacctgctatgtcactgtctactcccaagacgatgaatatcgtcacctctgtccctatgtgctctctcttagttcctcagatacccacctttgacatccaggatgctgtccttggccaaattcagcttctttgaattgtcataaaagccatagctctcaaaaaaaaaaa

SEQ ID NO: 1053 - DNA, 3115 bp, Rattus norvegicus
  Genbank Accession No. AF021806
gttgaacagcagccagagcctgaagaagccaactccagggcggaggaaaggaagcagaaggctcagcaccagtctccaacacttggcaagatgggtgactggagcttcctgggggagttcctggaggaggtccacaagcactctacggtcatcggcaaggtctggctcaccgtcctgttcattttccgcatgctggtcctcggcaccgctgctgagtcctcctggggagatgagcaggctgatttccggtgtgataccattcagcctggttgccaaaatgtctgctacgaccaagccttccccatctcccacattcgttactgggtactgcagatcatctttgtgtccacaccatctctggtgtacatgggccacgccatgcacactgtgcgcatgcaggaaaagcagaagctgcgggaggctgagaaagctaaagaggccggtggcaccggcacctatgagtacttggcggagaaagccgagctgtcctgctggaaagaggtgaacgggaagattgtcctccagggcaccctactcaacacctatgtctgcaccattctcatccgcaccgctatggaggtggccttcatggtgggccagtacctcctctatgggatcttcctggacaccctgcatgtctgccgcagaagtccctgtccccaccccgtcaactgttatgtctcgaggcccacagagaagaacgtcttcattgtctttatgatggctgtggctggactgtctctgtttctcagcctggctgaactctaccacctgggctggaagaagatccgacagcgcctggccaagtcacggcagggtgacaagcaccagcttcttggcccctccaccagcctggtccagggcctcactcctcctcctgacttcaaccagtgcctaaagaacagcccagatgagaaattcttcagtgacttcagtaataacatgggctcccggaagaatccagaccctctggccactgaggaagtgccaaaccaggagcagatcccggaggaaggtttcatccacacacagtatggccagaagcccgagcagcccagtggcgcctctgcaggccaccgctttcctcagggctaccacagtgacaagcgccgccttagtaaggccagcagcaaagcaaggtcagatgacctgtcagtgtgaccctcctcttagggaggaccagtcccagaaggaagccaaggagggtgaggcaggacagaagcggtctctctgactgtataccttcctcagcaccttctctcccgggtctggatggtgttgctcattaatcctccaaatttcagttctgagccgtattctcaaagattgggctactcctcaaatccccaaccccacatcctctaccagtattcgcagtgaagactttcaagtgatttagtgatatggtgggagcaggaatgggaaccttggcaaaatctggtctgggtaggacagacatgaagattcgacattagcaacagataaaccctcaccccaaatcttgtcttcttcggtactaggcccatcctttttattttttaaaggaagaatccaaggttgagagtattcatcaaataatctgcattgtattgttcctttgaatctgtcgtttccatgtgccatacctcagagtgctggtgaggtaactgtgggttgcccttggctgcatctccctcctcccagtcttaaaggggtgtccttggtcctcggccagcatcagctttacaagtgccttggtatgtgcctttggaaaacactgcatgttgatgatgctgcagccttactgccaggctagacacccagctcagaagggtgccaagacctctagaagtcactgtgcacataagcattgctggaattgccaccagctgtcatcctgcagtcctttacagttcaacctagtgatagaaaccgtcctggacagctcacccagtgttcctctaaaatcttggttaacaggaatgtccaaagtcaccatcctctcttggaccctggccagattaccagccaccaagttcagtggaatttccccaggatttaatgaaacaaagagagcattgtgcttctcaggttccttggggggtgttgggggggattcttctgtggagatgaaaagagaggagggggaggacactggaaaactattttcccttctgcatatgccttccactgcctcccagcttggactgctgagaggtgtggtgatagatagcaacggaggcccaagatctctctcttagaggcatcaaggggacctggaagccgagatggagctccggttggttttgacacggcccttatttagtgcagatgctcctgtgtttccttgggacccttaggtacatcagggagggactgtagaaaattcctgccttcctcagggtctatcctgggctatctactgagaggatccacagtcggtgtctctccttatgcagatggaaagatgctcagcgtcagatatcaagacttacaaacacaatgctctgtgtgtgtgtgtgtgtgtgcatgtgtgtgtatgagtgtgtgcatactcaaccatctatgtgtgtatatgtgtgtgtgtgcatgctcaaccatctgtgtgtgtgtgtgtgtgtgtgtgtgtgtgtgtgtgtgtgtgtatacccgtgtatgcatgcagatagaatggtaaagaagagccctgaagaactgtaaggaaacatgtagaaaacttgggtttttctgcctccttttctgttgcccgacaggacagctgagcttgcttcctaatcagcctaaaggtcaaacctgggaagtcagtacaggagggtgaaggttcagaggtcaacccctgcccatgtgaccatctctgggtccctctgctggtatttggatggctgaagatacttgggaaaggctgactggctgtcccagccccagtgtatctcattcattcctgacaccgacgctatgattctctgcttttctagttatgggatgtgtgtttgtcttctgaaatggggccttttgagttagaaaatctgagaccagtcttcgatggtgaggtttttcagaagagaaagagaaagtaatatgtgtgactggttttaaataaaatacgtctctacatgttaaaaaaaaaaaaaaaaaa

SEQ ID NO: 1054 - DNA, 353 bp, Rattus norvegicus
  Genbank Accession No. AF023087
tagagcgcgatgaggaaaagggctgagctgagctttggttctccagaatgtaagaagaaaaatttaaaacaaaaatctgaactctcaaaagtctatttttttaactgaaaatgtagatttatccatgttcgggagttggaatgctgtggttacctactgagtaggcggtgactttgtatgctatgaacatgaagttcattattttgtggttttattttacttcgtacttgtgtttgcttaaacaaagtgacttgtttggcttataaacacattgaatgcgctttactgcccatgggatatgtggtgtgtatccttcagaaaaattaaaaggaaaataaagaaactaactggtt

SEQ ID NO: 1055 - DNA, 4076 bp, Rattus norvegicus
  Genbank Accession No. AF025308
gggcttgcagccagcgcctcctcttaagagaagcgtctctccaccgcatccacaggcttgtgttgtgatgtattcgcgaagtggctttcttctgaagactccagggtctgacttctgaagagaagaaggaagaggagggtggaggagcacacagaaaggcctggaggcgtcccctggtgttcaggcagcttctgggtcagaacttggagacaccatgacaaacagcgtctgtcccacagcccaaggttcaggcaaagtcatagccaggcggtgtggtcaggggccgggctggggattccccatctccccagtttcacttctgcttctaacctgtgtcaggtccttctgcccggatactgatgacgcgctagcaattctctcattcctattgggtgccgtgattccggtgaaccaatcagcgttgcccagacactagatgtaaactccacgcagccgcgggactcagccgcgtccgggacctcggataggggcgatggcaccgcgcacgctgctcctgctgctggcggccgccctggccccgacccaggttcgcgcgggtgagtgcggggtcgggagggaaacggcctctgcggggaggcgcgggagcggcacggggaagcggtccccggtcgcacccaagaccccggccccttctccaccgcgtccggagccccggcccctgctccccgcgcgccggcagccgcccgggatcctgggaggaggtcgggatctcaccgcgcgccgcccccaggctcacactcgctgcggtatttccacaccgccgtgtcccggcccggcctcggggagccccggttcattatcgtcggctacgtggacgacacggagttcgtgcgctacgacagcgacgcggagaatccgagatacgagccgcgggttgggtggatggagcgggagggtccggagtattgggagcgggagacactgatggtcaaggaaaacgagcaggtttaccgagtgagcctgaggaccctgctccgctactacaaccagagcgagggcggtgagtgaccccgggtcggaggtcaggacccctccccgtccccacacggccggagacttccgggtccgaagtccaggttcgggaacagaaccgacccggaccggtttccctttcactttggaggagtccgcgggtgggcggaacgggtgggcggggcccggcctgaccgcggggtcccgcaggctctcacaccatccagtggatgtccggctgtgacgtggggtcggacgggagcctcctccgcgggtatgatcagttcgcctacgacggccgcgattacctcgccctgaacgaagacctgaaaacgtggatggcggcggacacggcggcacagatgacccgaaacaagtgggatcaggcaggtgaagcagagagacacaaggcctacctgcagggcacgtgtgtggagtggctccgcagatacctggagctcgggaaggagacgctgctgcgctcaggtgcgggggccgcgggcttctcctcctctgccctcgggctggggctcagtcctggggaagaagaaaccctcagctgggtgatgcccctgtctcagaggggagacagtgtccctgggtctccctgatccctcatcacggtgactgcactgcctctcccacagggcccagccttctccctggagagttctgagtccctctcaggagaaggagggaatttcccccttaacagcaggggctccctgctgtcagccatggcctctcccaggcatgttctctgcccacacccactctctgaggacactgactcctgtcctgctgagtgtgtcagcccttacacctcaggaacagaagtctcctttacctcacaggactccactactctaggctggttcccacagtttctaaaagattccccgggtttctcacagatccctccctgatgtggggttggcatcccttcaataccccatttctctctcttcctacagtggagaatggtaccatgagcccttatggggtaccctggaggaatataaattgtgggatttctttttcttttttctttttttctctctttttcttatcttttacttccttttttctttccttttttttttttttttttttttggaaggcattattttacttccagtcaggttttctctgcaaacacatattaaatcaattattttctattccctcttctgttctgtgaccacccatctcatgctataaaacacccgtaaaggacggccatgttgacccactcgctcatgtggattccctcttagcttctgagtccctcaggaaagtgtgcagttctgtgctgagggaaccagctctccctgcagctcactagggagatgacagttgaagtgtcagacacacacagttcagtgtcatccttgatttaactgtgtcctgtgtagatttcagtttgtcttgttaactgtgtgatttcttaaatcttccacacagatcccccaaaggcacatgtgacccttcaccccagacctgaaggtgatgtcaccctgaggtgctgggccctgggcttctaccctgctggcatattcctgacctggctgttgaatggggaggatctgacccaggacatggagcttgtggagaccaggcctgcaggggatggaaccttccagaagtgggcatctgtggtggtgcctcttgggaaggagcagaattacacatgccttgtggagcatgaggggctgcctgatcctctcaccctgagatggggtaaggagggtgtgggtatagagctggggtcaggaaaagctggagccttttacagaccctgagctggtcaaggctgagagctggtgttcctgacccccaccttcatttcctgtacctgtccttcccagaggctcctccatccactgaccccaacatggaaaccactgtcatttatgttgtcgttggagctgtggtcatcactggagctgtgaccatgattggagctctgctgactgttgtgagggggaggaagagaaacacaggtaggaaagggcagggtcttgtttcccctcagcttcctttagaagagcgctctgatcattaatgggaagcacagccacaccccacattgctgctgtctccaactgggtcctctgtcagttctggaaacttcctcctgtcaagaccttccttgaactctcacagcttttcttctcacaggtgggaaagtaggagtctacacccctgctccaggttagtgttggggcaggagtgtccctgagggtattggagtgaagctggagatgtggggaactcggggaatccatagtagctcctccatagaaatcttctgggggcctcagttgtaccgtgatgtgaatacatacatatacacatatacatatacagaacacaatacgtgtgtgtgtgtgtgtgtgtgtgtgtgtgtgtgtgtgtgtgtgtgtatgttttcttttaccctaggcaaggacagctccgagagctctgatgtgtctctcccagattgtaaaggtaactctgggtctgactggggaggggcaatgtggacatgattgcgtttcagggactcccagaatcccctgtgagtggagggttgttgggctgttgtcttcacagtgatggtttgtgactctcgttctctagcatgaagacagctgcctggagtggactgagtgacagacgatgtgttcaggtctctcctgtgacatccagagtcctcaggtctctttagacaccagtgtctgatgttccctgtgattctatggcttcagtgtgaagaactgtggagcccaggctgccctgcacacctggaccctgtccctgcactgcctgcattcccttccacattcaaccttgctggtccagcctggggttgggggggtggggacatatgcatcctgtcactcagtgctgctttgagctgcaactcctcacttctacactgagaataagaatctgagtgtgaacttgactgttcacatccttgacacaagtgttgattgctttttaaattactggattgaatacttagaggttctttgttttttatttttgttttgttttgttttctttgttttgttttaaaataaatggcaggtgga

SEQ ID NO: 1056 - DNA, 1242 bp, Rattus norvegicus
  Genbank Accession No. AF026529
ggcacgagaagagaacagatcgctttggaaaccggactgcaggattgtgatccagttctgagctggtgataaacactccttgtgacttttggtcaattcagctaccagattccagccaacatgaccctcgcagcctataaggagaagatgaaggaactcccactagtgtctctgttctgctcctgttttctgtctgatcccctgaataaatcatcctacaaatatgaagcagatacggtagacctgaactggtgtgtcatctctgatatggaagtcatcgagctgaataagtgtacctcgggccagtcctttgaagtcatcctgaagccaccttcctttgacggggtgcctgagtttaatgcctccctcccaagacgtcgagacccatcgctagaagagatacagaagaagctagaagcagcagaggagcgaaggaagtaccaggaagctgagctcctaaaacaccttgcagagaaacgagagcatgagcgtgaggtaatccagaaagctatcgaggaaaacaacaacttcatcaagatggcgaaagagaagctggcccagaagatggagtccaataaggaaaaccgggaggcccatctggctgccatgttggagcggctgcaagagaaggagccgcctgctgcgcggtgactcccgggaccgatcggtggcctcgtcccatggacaagcacgcagaggaggtgcggaaaaacaaggagctgaaggaagaggcctccaggtaaagcccagaggccaaggaagtttccaggacagccggacagctcccgcagcaacctggttccagcagcatcggccgctggctgctctcccagcactggggttcggggggaggggggtggccaaaggggcgtttcctctgcttttggtgtttgtacatgtaaaagattgaccagtgaagccatcctatttgtttctggggaacaatgatggggtggagaggggacagagagtgtgtggaaaaggaggtgaagatgacccgaggactttgtacactgtccactgactgcagacttgccaaggcccccgcttttcagcctctgcctggacattcggcctccaggttcctagtggagagaagatgtgacagaagttcagagtgaagggccgagtcctggtggggtggtgtgcagggccagcaggacgagcccgtctggatggagtgaaacctacctgagcgggtgggataaggtctgtgtgcgtctgttcattgtcatcttttct

SEQ ID NO: 1057 - DNA, 3091 bp, Rattus norvegicus
  Genbank Accession No. AF026554
gttcgccacgtgtggagagaagggaaaaactgagccgagagaggggggaaaaaaaccaatgctgatttcggaaagaacgaaggaacttcggtagccctggccgaaccaccgacgcaaggaaggtagcgcttccgcagagcggcagcagttctgactggaggggcgctcgctgggagagacccatcacacctaaggggacagctattgctctgggtgacgactcctaaaaagagaatcggtgcctctacctctccacgtagctctgcttcagaacggggattgcttctccagctccccctggaccatgccactgggtggaagaggaacgctgagaggctgagcgaggaaccagctaggtgacaactcagagcccaggagtaccaagtcactgtaaagcataggcaccgtgaggatgactgtggcgagcactgcggctccctcctatacaacctcagacaccaaccgggttatttccaccttttctgttgtggactatgtggtgtttggcctgttgctggttctctcccttgtcattgggctctatcatgcttgccgaggctggggccgccatactgttggtgagctgctgatggcagaccgaaaaatgggctgccttcctgtggcactgtccttgctggccaccttccagtcagccgtggcgatccttgggggaccagctgagatctaccgatttggaacccagtattggttcctggggtgctcctacttcctggggcttctgatccctgctcacatcttcatccctgtcttctaccgcctgcatcttaccagcgcctatgagtacctagagctccgcttcaataaagcagtccggatctgtgggactgtgaccttcatctttcagatggtggtctacatgggagtggctctctatgcaccgtccctggccctcaatgcagtgactggatttgatctatggctgtcagtcctggccctaggaattgtctgcaacatctacactgcactgggtgggctgaaggctgtcatctggacagatgtgttccaaacgttgatcatgttcctagggcagctggtggttatcattgtaggagcggccaaagtgggcggcttggggcatgtatgggctgtggcttcccagcatggcctcatctctgggattgagctggatcctgacccctttgtacgtcatactttctggactttggcctttggcggcgtcttcatgatgctctccttatatggagtgaatcaggctcaggtgcagcgctacctcagttcccactcagagaaggctgctgtgctctcctgctatgcagtgttcccttgccagcaagtggccctctgcatgagctgcctcattggtctggtcatgtttgcctattataagaaatatagtatgagcccccaacaagagcaagcagcccctgaccagttagtcctctattttgtgatggacctcctgaaagacatgccagggctgcccgggctcttcgttgcttgcctcttcagtggatctctcagcaccatatcctccgcattcaattcactggccactgtcacaatggaagacctgatccagccctggttccctcagttgactgaaacccgggccatcatgctctctcgaagccttgcctttgcctatgggctagtttgcctgggaatggcctatgtttcctctcatctgggatcagtgctccaggcagcactcagcatctttggcatggttggagggccactgctgggactcttctgccttgggatgttctttccgtgtgccaaccctcttggtgccattgtaggcctgttgacgggactcaccatggccttctggattggcattgggagcatagtaagcaggatgagttctgctgcagcatcccctccccttaatggatccagctccttcctgcccagcaatctaactgtcgccactgtgaccaccctgatgccttctaccctgtccaagcccacaggactgcagcagttctattccctgtcctatttatggtacagtgcgcacaactccaccacagtcattgcagtgggcctgattgtcagtctgctcactgggggaatgcggggccggtccctgaaccctggcaccatttaccctgtgttgccaaagctccttgcactcctgcccttatcctgccagaagcggctttgctggagaagccacaaccaggatatccctgtggtcaccaacctgtttccagagaagatggggaacggagcgctgcaggacagcagagacaaagagaggatggctgaagatggccttgtccatcagccatgcagccccacctacattgtccaagagacgtccctgtgacctgtgacggacctctcactgcagagcagtggccagagatactctggagtgcagagctgagtcactgcatgagttccgcagcactggggtggatgacctagctcacagcaaaggaccttgatctttaatgtttcaccgccgtgggagctgtcgcatgcaagggacagacagtttttccttatcccttgccagtcttcttttaggatcaggtttgcaaggtacagaatcacagcacacgtggggaaatatactgaggaaagggtggcttttgattaagtgaccagggttctttggggtgaataggaacatttcttacaactccccttgagcaagtttggcaggattgaccagctccagcatttagcatgaagtcctcagccctctggtgattccctcactctcatgtcaacctgggttatctcaagccagtgtgggcctgtggtcttcaggttctctgtaagactcaagtctcctctcattctacctacctctgtttgtgagagggaggctttggagcgcttgggtctcagcacttagtgcatctacttggtgtatagaccctcgctctcttcaggtggtacatgagagacaggtacatgagagaggtcaccaggacctcttatgcagtgtgctatcctctaaactcctaagctaggccaccctggtgtcattctgtcatctgtgcaattcttatttcctttgggagtttcctcctcatgcattttgttcctagggaataaaaatagccattagacctgaaaaaaaaaaaaaaaa

SEQ ID NO: 1058 - DNA, 2622 bp, Rattus norvegicus
  Genbank Accession No. AF029241
ctggcaggcaccatggtcctgacccagactagctcacactcgctgcggtatttctacaccgccctgtcccggcccggcctcggggagcccaggttcattgtcgttggctacgtggacgacacgcagttcgtgcgctatgacagcgatgtggagaatccgaggatggagccacgggcgcggtggatggagcaggaggagccggcatattgggagcgggagactcggaaagccagggacaccgggaggaacttcaaagtgaatctgaggaccctgctccgctactacaatcagagtgacgacgaatctcacacgctgcagtggatgtacggctgcgacgtggggcccgatgggcacctgctccgcggttattgtcaggaggcttatgacggccgggattatatctccttgaacgaggacctgcgctcctggaccgcgactgacatggcctcacaggcctctaagatcaagtcagaggaagttggtgaggcccatcaccagagggcctacctgcaaggtccttgcgtggagtggctccacacatacctacatctgggaaaggagacgctgctgcgctcagaccccccaaaggcacatgtgacccttcaccccagacctgaaggtgatgtcaccctgaggtgctgggccctgggcttctaccctgctgacatcaccttgacctggcaattgaatggggaggacctgacccaggacatggagcttgtggagaccaggcctgcaggggatggaaccttccagaagtgggcagctgtggtggtgccttctggggaggagctaaagtacacatgccatgtggagcatgagggactgcctgaacctctcgccctgagatgggagccttctccattcaccgactccagcatgccagtgattgttgtccttggagctgtggccatcattggagctgtggccatcattggagctgtggccatcattggagctgttgtgaggaggaggaagagaaacacaggtgaaaaaggcagctatgctcatgttctaggcagcaaggctttccagatctctgactggcctcagaaggcatgaaaagacagttgcctcgtggggctgagcgacaagttctgactaaacatctgagggagctgcttcccctgaggacaatgtgaagaactggcaatcccagaccttcttgcctccctggacacctgacttcacaacagaaaataatctgactctgggctgggtgtttcctattgcttttatctgcactgagtggaaatgcgatttccaacagtgtaacgcagcaccgttgtgtggtggtagtgacattgcacacaggtttgtgagctgggggtgtgatgtgcttttcttactgtaggcagaacaagctagaagtccaccattcctcttatggtcattgttttaaaacaaaacaaatgctggagagatggctcagtgttaagagcactgacttctcttacagaggtcctggttcaaatcccagcaaccacatggtggctcacaaccatatgtaatgagatctgatgctctcttctgatgtgtctgaacacagctatatatgataaataaatctaaaaaatattttttaaatggccagacagatggcatgagtagggcacaccatggtcaactctgctgtctgtgtatctctagacatccagtgctctttagagtccacacaaggtcattaaaaggactggggtggatggtgactggagagatagctcagtggttaagagtgtttgctgcttcatgggtggtggtggtggcacaagcctttaatccaaacactcaggaggcagaggcaggtggatctctgagttcaaggccagcctggcctataaggcaagttccaagatagccaaggatacacagagaaaccctgtttgaaaaaacccaagcctagacctggagagttggctcaatggttaagagcactgactgcttttccagaggtcctgagttcaaggcccagcaaaggcacatggtggctcacaaccatctgtaatgggatctgatgcacttttctggtgtgtctaaagcgacatggtaactcgctgtctgtaactagtaggcaaacagttcatatctcacacagacatgaatgcagatagagcaccaacacatataaaattaaatctttaaaaaatgaaaggtctgggggctggatgaatggtgtttgtctttgaaatgtctgacagtgctgtgactcacagcctgcatagcagctcctattgcctggtgttcaccatctgtcttggttataaaaaggtttcgtaatgtgaaacccttcaaatgagctggtgcccttctcaccagtttgcatcttgacaggattcctgaagggcttatattctgggccttcccattgtggaggattaggttttacacaacgtatcctctctagcattgcaatttccctgagccttaaaatcccttcatcgacgctgagccaagggatatctggcatctgcaactccttttccgtaggccgtcatttgatgaacgcttcagccaaccattcaaacaaactttctgacactttttttaactgtgtggccttccatattaaacccagaatctccactcaaagggcccatgtcaataaactcagcctgatctatt

SEQ ID NO: 1059 - DNA, 2128 bp, Rattus norvegicus
  Genbank Accession No. AF030091
gtcacgggaagatccgtcgcgccgaggacgctggttagtctcgctttgggttccggctgcgtcgggcgtgcgtgtagctcgctagaactatggcgtccgggcctcacccgacatcgaccgctgccgccgcctctgcctcgtccgccgccccgagtgcgggcggctccagctccggcacgacgaccacgacgacgacgacgaccggagggatcctgattggcgaccgcctgtactcggaggtgtcgcttaccatcgaccactcggtgattccggaggagcggctctcgcctaccccgtccatgcaggacggcctcgacctgcccagcgagacggacctgcgcatcttaggctgcgagctcatccaggccgccggcattctcctccggctgccgcaggtggcgatggctacggggcaggtgttgtttcatcgttttttctactccaagtctttcgtcaaacacagtttcgagattgttgccatggcctgtattaatcttgcatcaaaaattgaagaagcaccaagaagaataagagatgtgattaatgtattccaccacctccgccagttaagaggaaaaaggactccaagccccctgatccttgatcagaactacattaacaccaaaaatcaagttatcaaggcagagaggagggtgctaaaggagttgggattttgtgttcatgtcaagcatccccataagatcattgtaatgtatttacaagtcttagaatgtgaacgtaaccaaaccctggttcagactgcctggaattatatgaatgacagtcttcgaaccaatgtttttgttcgctttcaaccagagactatagcatgtgcttgtatctaccttgcagctagagcacttcaaattccattgccaactcggccccattggtttcttctttttggtaccacagaagaggagattcaagaaatctgcatagagacacttagactttataccaggaaaaagcctaactatgaattgctggaaaaggaagtagaaaaaagaaaagtagccttacaggaagccaagttaaaggcaaagggattgaatcttgatggaactccagccctttccactttaggtggtttttctccagcctccaaaccatcatcaccaagagaagtaaaagctgaagagaaatcaccagtttccattaatgtgaagacagtcaaaaaagaacctgaggatagacaacaagcttccaaaagcccttataatggtgtaagaaaagacagcaagagaagcagaaacagcagaagtgccagtagatcaaggtcaagaaccaggtcacgctctagatcacacaccccaagaagacattataataataggcgaagtcgatctggaacatacagctcaagatcaagaagcaggtctcgcagtcacagtgaaagtcctcgaagacatcataatcatggttctcctcaccttaaggccaaacataccagagaagatttaaaaagctcaaatagacatggtcataaaaggaaaaaatctcggtctcgatctcagagcaagactcgggatcactcagatgttaccaagaaacacaggcatgaaagggggcatcacagagacaggcgtgaaagatctcgctcctttgagaggtcccataaaggcaagcaccacggtggaagtcgctcaggacatggcaggcataggcgctgactttcatcctctgacactgcatcggtccctggtgttgcccatatgcagtgtgacgatgtatggactcaatcaaaacatgaaaagcaaactgattagggattgatttattaaaattgtctaggtttctagaaacactgaggacattttcttttgaaaagaactatgttaaggttttttgcacattaaaatgccctagcagtatctaattgaaaaccatggtcaggttcaattgtactttattatagttgtgtattgtttattgctataagaactggagcgtaaattctgtaaaaatgtatcttatttttatacagataaaacttgcagacactgttctatttaagtggttatttgtttaaatgatggtgaatactttcttaacactggtttgtccgcatgtgtaaagatttttacaaggaaataaaatacaaatcttgtttttctaaaaaaaaaaa

SEQ ID NO: 1060 - DNA, 1989 bp, Rattus norvegicus
  Genbank Accession No. AF031642
aaaaagaggaaagacagagccggcctagacagcagacatcaggacacccttctaggccagctctgttttctgccttaatgctcaaggaagactgcaagatcatctgaggtgggctctgtaacagcgtcagctccacaaagtcatcgctgcaaagttcaggagatgggagatctttcctgttttcttactgagtgtttccgggtgtgagtgcatcgcattgacatcttcctacctctgtggacaaacaaggacaaggctcgaatcccctcagtctacttcatcagccggacctgcatgactggctattttgaccacttgaagtcatctaaatagaagttctcaagaccaccaagaccaaggacacttcacatgacagatgagcgaccatcccctgaaggagatgtctgacaacaaccgcagcccccccttgccagagcctctttccagcagatacaagttgtatgagtcagagctaagcagccctacctggccttcaagctcccaggatacacacccagcccttcccctgctggaaatgcctgaagaaaaggatctccgatcatcggatgaagacagccacatagtgaagattgaaaagcccaacgagcggagtaaacggagagaaagcgagttgccccgcagggcttctgcaggccggggagcgttcagcctcttccaagctgtgagctacctcactggtgacatgaaggaatgcaagaactggctgaaagataagcccctggtccttcagttcctagactgggtcctgcggggagcagctcaggtgatgtttgtcaacaacccccttagtgggctcatcatcttcatagggctcctgatccagaatccctggtggacgattgctggggcactggggacagtggtctcaaccttggctgcccttgccttgagccaggacaggtcagccatcgcctctggactccatgggtacaacgggatgctggtgggactcctggtggctgtcttctcagagaagttagactactactggtggcttctgtttcctgtgaccttcgcatccatggcctgcccagttatttctagtgccttgagcaccgtcttcgccaagtgggacctgccagtcttcacactgcccttcaacatcgccttaacactgtacctggcagctacgggccactacaaccttttcttccccacgacgcttgtgaagcctgcgtcttcagcgcccaacatcacctggtcagagattgagatgcctttgctgttacaaaccatccccgttggggtgggccaggtctacggctgtgacaacccctggacaggcggcgtgatcctggtggctctgtttatctcctctcccctcatctgtttgcacgcagccataggatccattgtggggctgctggcagcactgacggtggccactcccttcgagacgatctacacgggcctttggagctacaactgtgtcctctcctgtgtcgccattggaggcatgttctacgtactcacctggcagacacacctgttggcacttgtctgtgccctgttctgtgcgtacacgggagcggccctctccaatatgatggcagtggttggtgtgccaccgggcacctgggccttctgtctctccaccctcaccttccttctcctcacaagcaacaaccctggcatccacaagctcccactcagcaaagtcacctacccagaggccaaccgcatctacttcctgacagcgaaacgcagtgacgagcagaagccccccaatggtgactagttcagcgccaagccaaaatgttctgctttgtctgcatccctatggtctcaactctgggccaagcgacccggccagcactcactttcctcgcctctccttgcacctgtttcaaatcaaacccacctattcctccctaatcccgaggctgattcgttccctctgcccagatctttataacaaccccttgtagcattaaaggaagctggtacgacataaaaaaaaaaaaaaaa

SEQ ID NO: 1061 - DNA, 1435 bp, Rattus norvegicus
  Genbank Accession No. AF034577
gaattccggcacagcgcacttgctctcgctcgaccgcgctcccgccccgcagtcctcaccaaccctacggatcctagccaccgccagcctaggagggcatcaggatgaaggcagcccgtttcgtgatgcgcagcgccagctcgctgggcaacgccggcctggtccccagggaggtcgagctgttctcccgctacagcccgtccccgctgtccatgaagcagctgctggacttcggttcagaaaatgcctgtgagagaacttctttttcttttcttcggcaagaattgcccgtcagacttgccaacatcctgaaggagattgacatcctccctgaacacttagtgaacaccccttccgtccagctggtgaagagctggtacatccagagcctgatggatttagtggagttccacgaaaagagcccagaagaccagaaagttctatcagactttgtagacacgctggtcaaagttcgaaacagacatcataatgtggtccctacgatggcacaagggatcctggagtacaaagacaactgcaccgttgaccccgttaccaatcaaaatcttcagtattttttggaccggttttatatgaaccgcatttctactcggatgctcatgaaccagcacatcctcatattcagtgactcaaagacaggaaacccaagccacattgggagtatcgaccccaactgcgatgtggtagcagtagtcgaagatgcctttgagtgtgcaaagatgctctgcgatcagtattatctaacgtcgccagaattaaagctcacacaagtcaatggaaaatttccaggccaaccaatccacatcgtgtacgttccttcacaccttcaccacatgctctttgaactattcaagaatgccatgagggccacggtcgagcatcaagaaaaccgccctttcctgacaccagtcgaggccaccgtcgtcttgggaaaagaagatcttacaatcaagatttctgaccgaggtggcggtgttcctctgaggattactgaccgcctctttagttacacatactccactgctccaacgcctgtgatggacaattcacggaatgcccctttggctggttttggttacggcttgccgatttcccgtctctacgccaagtattttcaaggagatctgaatctctattccatgtcaggctatgggacagatgccatcatctacttaaaggctttatcatctgagtctatagaaaaactccccgtctttaacaagtcagccttcaaacattatcagatgagttctgaggctgatgactggtgtatcccaagtaaggaaccaaagaatctgtcgaaggagaaactggcagtgtgacggggatctcgcctggcacttttacgggatcaaagtgggtctacggcagtgctgcttcgtgaatgtgtgtggactcttgtttccgcaaaaca

SEQ ID NO: 1062 - DNA, 4422 bp, Rattus norvegicus
  Genbank Accession No. AF034582
gatcctgggagagtccgacgttcgccggctaacgcaggacaggtcactgaggtccgccaggtgtgtccgccgtttgtttcctgcccctcgccaggttcggtgtccgctgccgaggcccgaggcccttcttccgctgtcggcgcgcccccctgtctcgtttcggccccgccgggacaacgcctggagtcgcagcagccgggtgatcgcgcccgtcatcctctaccaacgtttccaggctgccctgctcgggagtgggtgagaatgaagctaaaggagatagaccgcacagcgatgcaggcgtggagccctgcccagaaccaccccatttacctggccacagggacatctgctcagcagttggacgcgacattcagtaccaacgcttcccttgagatattcgagctcgacctttccgacccgtccttggatatgaagtcctgtgctactttctcctcgtctcacaggtaccacaagttgatttggggacctcataaaatggattccaaaggagatgtttctggagttttgattgcaggtggagaaaatggaaacattattctctacgatccttctaaaattatagctggagacaaggaagttgtgattgcccaaaaggacaagcatactgggccagtgagagccttggatgtaaacatcttccagaccaatttggtggcctctggtgctaatgaatctgaaatctacatttgggatctaaacaattttgcaactccaatgacgccaggagctaaaacacagccaccagaagatatcagctgcatagcctggaacagacaggtccagcatatcttagcatcagccagtcccagtggccgggcaacggtctgggatctcaggaaaaacgagcctattatcaaagtcagcaaccacagtaactggatgcactgctctgggctggcatggcaccctgatgtcgctactcagatggtccttgcttctgaggatgatcgattaccagtggtccagatgtgggatcttcgatttgcttcctctcccctccgggttctggaaaatcatgccagggggattttggcaattgcttggagcatggcagatcctgaattgttgttaagctgtggaaaagatgctaagattctctgctctaaccctaacacgggagaggtattatatgaacttcccaccaacacacagtggtgctttgatatccagtggtgtcctcggaatcctgccgtcctgtctgccgcttccttcgatggtcgcatccgtgtctactccatcatgggagggagcatagacggcttaaggcagaaacaagttgacaagctttcgtcgtcttttgggaatcttgatccgtttggcacaggacagccgctccctccattacaaatcccacagcagacttcacagcacagcatcgtgctgcccctgaagaagccgcccaagtggatccggagacctgtgggcgcctccttctcattcggagggaagttggtgactttcgagaacgttacagggcagcctcagcagggagctgagcagccacggcggcagcccgtgttcatcagtcaggtggtgacagaaaaggacttcctcagccgctcagagcagctacagcacgtcgtcgagtctcagggctttatcagttactgccagaaaaagatcgatgcgtcccagactgacttcgagaagaatgtgtggtccttcttgaaggtaaagtttgaggaggattctcgtgggaaataccttgagcttcttggatatagaagagaagatctgggagagaagattgctttggccttgaacagagtggacggatccgatgtggctcttaaggactctgaccgcgtagcgcagagtgatggggaggagagccctgccgaggaagggcagctcctgggagagcgcattaaagaggaaaaacaggagtgtgactttctgccctcggctggcggtgggacctttaacatctccgtcagtggggatattgatggtttaattacccgggctttgctgaccggcaattttgagagcgcagttgacctttgtttacacgataaccgaatggctgatgccatcatattagccatcgcaggtgggcaggagctcttggctcaaacgcagaagaaatactttgcaaaatcccaaagcaagattaccaggcttatcactgcggtggtgatgaagaactggaaggagattgttgaatcctgtgatcttaaaaattggagagaggctttagctgcggtcctcacttatgctaagccagatgagttctccgccctgtgtgatctcttgggagccaggcttgaaagtgaaggagacagcctcctgcggactcaggcctgcctctgctatatctgtgccgggaatgtagagagattagttgcttgttggaccaaagctcaagatggtagcaaccccttgtctctccaggatctgattgagaaagttgtcatcctccgaaaagctgtacagctcacgcaagccctggacacgaacactgtcggggctcttctggccgagaagatgagtcagtatgccaacttgttggcagcccagggcagcattgccgcggccttggcgtttctgcctgacaacaccaaccagccagatatcgtgcagctgcgtgacagactctgcagagctcaaggcaggtctgtgccggggcaggagtcctctaggagctcctacgaggggcagccgctgcccaagggcgggcccgggccgtttgctggtcacccgcaggtgtccagagttcaaagtcagcaatattatccccaggttagaattgcccctactgtcactacctggagtgacagaactcccactgccctccccagccatccacctgcagcctgtccctctgacacacagggagggaatcctccacctccaggtttcataatgcatggcaacgttgttccaaatagccctgccccactgccgacgtctccaggccacatgcacagccagccaccaccttatccgcagccgcagccttaccagccagcccagcagtattccttgggaacaggggggtcagcagtttatcgacctcaacagcctgttgctcctcctgcttctaagcgttaccctaacgccccatacgtatctcctgtcgcttcctactccgggcagcctcatatgtacacagcacagccagcctcctcccctacctccagctctgctcctcttccccctcccccttcctctggagcgtccttccagcatggcggaccaggagctccaccgtcatcttcagcttatgcactgcctcctggaacaacaggtacaccgcctgctgccagtgagctgcctgcgtcccagagaacaggtcctcagaatggttggaatgatcctcccgctttgaacagagtaccgaagaagaagaagctgcctgagaacttcatgcctcctgtccccattacgtcaccaatcatgaaccctgggggagatccccagccacaggggctgcagcaacagccttcagcttcagggccacggtcaagccacgcctccttcccgcagccgcacctagccggcggccagcccttccacgggatccagcagcctcttgctcaaacaggcatgccaccgtctttctcgaagcccaacactgaaggggcccccggcgctcccattgggaacaccatccagcatgtgcaggctctgccaacagaaaaaattaccaagaagcctattccagacgagcacctcattctaaagactacgtttgaggaccttatccagcgctgcctctcctcagctacagacccccaaaccaagaggaagctggacgacgccagcaaacgcctggagtgtctgtacgacaaacttagggaccagacactttctccaacaatcatcagcggtctccacagcattgcgaggagcattgagacgaggaactactctgaagggttgaccgtccacactcacatcgtcagcaccagcaacttcagtgagacctcagccttcatgccagtcctcaaggttgtgctcagccaggccagtaagctgggcgtctgagacagctgccatgacctccgactccgccacttctccaaagaaagccatgctaagactgggaccagcccctcattagcatgtttccatggcacccgccacccaggagctttgacatttctgcaggcaaactcccctagaactgcttgaaccccccctcccaccccgcccgtgctttcctttgttttaatcccctcgcccattatgattttcccattctgcaaatagtgtctttcctggattacacatagtgtggtttcctgagggattctgacaaaatgtggtttttaaaacttgggtgtactttttaggaaaattgcatctggctgtgtataaaacagacctaaaatagatttctttaatgtcttccctaccttcttcacgttcatcagattaaagttgtaatcccatctt

SEQ ID NO: 1063 - DNA, 2015 bp, Rattus norvegicus
  Genbank Accession No. AF036537
agagacccaagctgagcctaactggccgaaagagtctccagacttggtcactgttacctgaggaaaagtagctgtcccatgcactgtggctgtcccggccatgtagggagcagcagctggcaaggagtcaggggaatcaagccttagaaagaggaagagtctgccaagggagctgggagagcagccctgccagggctgctgttggctgagggagaggaggagggccatgccatccagacccaacaagaggtcaaagactacaaaattcctaacgacagaaactaagacttcagaaactccaagctgcatcaagttgaggaagtattcaaaccaaaccactgagcgagcatccttccaaacccatgatgtctaaactctcagccgtagacgttgtagacgtcggggttccagctccatctttgcacacataatccaggaagccgctagctctcgatgtcttctgtcaagttatggctcaatggtgcgtcatcgatctctctcgtgggctctgaagaactggagaacctaggatttgtgggcaaaggcgggttcggagccgtgttccgggcacgccacacagcatggaaccttgatgtagcagtcaagatcgtgaactcgaagaagatatccagggaggtgaaggctatggtgaatcttcgtcatgagaacgtgctgctcctgctgggggtcactgagaacctcgagtgggactacgtgtacgggccggctctggtgacaggattcatggagaacggctccctctcagggctgctgcaaccttcatgccctcggccctggcctctcctctgtcgcctgctagaggaagtggtgctggggatgtgctacctacacagcttgaacccttcgctactgcaccgggacctcaagccctccaatgttctgctggatctagagctccacgccaagttagcagactttggcctgtccacatttcagggagggtcacagtcagggtcagggtcaggatcgagagattctgggggcaccctagcttacttggccccagagctgttggataatgacggaaaggcttctaaagcaagtgatgtttacagttttggggtcctcgtgtggacagtgttggctggaagagaagctgaggtggtagacaagacctcactaattcgtggagcagtgtgtaacaggcagaggcgacctccattgacagagctgcctccggacagccctgagactcctggcttagaaggactgaaggagttaatgacgcattgctggagttctgagcctaaagacaggccatccttccaagactgtgaatcaaaaaccaataatgtttacatcctggtacaggacaaggtagatgctgctgtctccaaggtaaagcattatctgtctcagtacagaagcagtgacacaaagttgtctgccagagagtccagccaaaaaggtacagaggtggattgccccagggaaaccatagtttatgaaatgctggaccgcctgcatctggaggagccctctggatcagttcctgaaagactcacaagtcttactgagaggagaggaaaggaagcatcatttgggcatgccacaccagcagggacatcatctgacaccttggctggcactccccaaattccacatactctaccctccagaggcacaacacctaggccagcctttactgagactccaggtcctgacccccaaaggaatcagggagatggaagaaacagcaatccttggtacacctggaacgcaccaaacccaatgacaggcctacagtctattgtcttaaacaactgttctgaagtgcagattggacaacacaactgcatgtcagtacaaccgagaactgcctttcccaagaaggagccagcacagttcggcaggggtaggggctggtagcccgtccacgtccacgagtagacttcggagaggacctgcaagtgcctgaagcaggaaatacaccattcaggcagccagtataaatagagtgaaaataaaagcactttctaagtaaaaaaaaaaaa

SEQ ID NO: 1064 - DNA, 1053 bp, Rattus norvegicus
  Genbank Accession No. AF037072
ggagctgtccagcgctgagagacaggaaaggccatggctaaggagtggggttacgccagccacaatggtcctgagcactggcatgaactttatccaattgccaaaggggacaaccagtcacccattgaactgcatactaaagacatcaggcatgatccttctctgcagccttggtcagtatcttatgatcctggctctgctaagaccatcctgaacaatgggaagacctgcagagttgtgtttgatgataccttcgacaggtccatgctgagaggtggccctctctctggaccctaccgacttcgccaattccatcttcactggggctcctcggatgaccatggctctgagcacacagtggatggagtgaagtatgctgctgagcttcacctggttcactggaacccgaagtataacaccttcggagaggctctgaagcagcccgatgggattgctgtggttggcatttttctgaagataggacgggagaaaggcgagttccaaattctccttgatgccctggacaaaattaagactaagggcaaggaggctccttttaatcacttcgacccatcgtgcctgttccctgcttgccgggactattggacctaccatggctccttcaccacgccaccctgcgaggagtgcattgtgtggctgctactgaaagagcccatgacagtgagctcagaccagatggccaagctgcgcagcctgttcgccagtgcagagaatgagcccccggtgcctctggtggggaattggcgccctcctcagccgatcaagggcagggtggtgagggcctccttcaagtaaggctctggacgtgccctcttcaggaaaggaattctgtccctgaagagccagcttgcctcctcctggtgctccctgctccaagctatcctacaacactgagagaaagaagagacgcagtcagatgaaaccgcagtgccttttgacatgatctaacccagaagcatgaatttcacacctaacctttttaataactaccttttctaaaaaaattagtatttctagtataaattcagtgaa

SEQ ID NO: 1065 - DNA, 1884 bp, Rattus norvegicus
  Genbank Accession No. AF038870
caagcctttgctggagaccgctcctgtccagtccgcagctggcttcagcgccactcaggacaccggaaagatggcaccgattgccggcaagaaggccaagaggggaatcttagaacgcttaaatgctggcgaagtcgtgatcggagatgggggatttgtctttgcactggaaaagaggggctacgtaaaggctggaccctggaccccagaggctgcggtggagcaccccgaggcagttcggcagcttcatcgggagttcctcagagctggatcgaacgtcatgcagaccttcactttctatgcaagtgaggacaagctggaaaaccgagggaactacgtggcagagaagatatctgggcagaaggtcaatgaagctgcttgtgacattgcacggcaagttgctgacgaaggggatgcattggttgcaggaggtgtgagtcagacaccttcctacctcagctgcaagagtgagacggaagttaaaaagatatttcaccaacagcttgaggtcttcatgaagaagaatgtggacttcctcattgcagagtattttgaacatgttgaagaagccgtgtgggcagtcgaggccttaaaaacatccgggaagcctatagcggctaccatgtgcatcggacctgaaggagatctacatggcgtgtctcctggagagtgcgcagtgcgtttggtaaaagcaggtgccgccattgtcggtgtgaactgccacttcgaccccagcaccagcttgcagacaataaagctcatgaaggagggtctggaagcagctcggctgaaggcttacttgatgagccacgccctggcctaccacacccctgactgtggcaaacagggatttattgatctcccagaattcccctttggattggaacccagagttgccaccagatgggatattcaaaaatacgccagagaggcctacaacctgggggtcaggtacattggcggctgctgcggatttgagccctaccacatcagggccattgcagaggagctcgccccagaaaggggatttttaccaccagcttcagaaaaacatggcagctggggaagtggtttggacatgcacaccaaaccctggatcagggcaagggccaggaaagaatactggcagaatcttcgaatagcttcgggcagaccgtacaatccttcgatgtccaagccggatgcttggggagtgacgaaaggggcagcagagctgatgcagcagaaggaagccaccactgagcagcagctgagagcgctcttcgaaaaacaaaaattcaaatccgcacagtagccacaggccagcggttcggggcgaattcctccaggtccgggccacagtgtgcacccggaaggagaaggcatctctaaaccagcgtttgtgttgatgccggcttacacctgtgattggtgctagttagacaaaatggagtcacagatagcatttcacagttacaaaactacgctttagaattttacctagaaggaagaaaggagaagtccacagtaaatcctgaacacatttcctacgtgcctgtcgcattacaggcgcacaggagtcactgcagcgaagagaaagtcacccgacgtcaatctcatttcagatagggggataggacaccacctccacgagtgacatagaaccattcagggaccgtatcataagtgacacagcaaccatctatatctaagatgcttcccaagtggattccaagatcttttgagcaggacccttaggcagaaacaacacacaccagccctgtaaaacttaacagataactgatccattctgtaattctgtaatctctgttctgactgcttccattccatttcattaataaaaacatgccggttgaaaaccttcaaaaaaaaaaaaaaaaaaaa

SEQ ID NO: 1066 - DNA, 1108 bp, Rattus norvegicus
  Genbank Accession No. AF039085
ttgcttttaataacactgaaccccatcagagccagaagcaggtgcccgctgcagtttttgacacatgccactttccctacagctggaggccttgggttccatttacagtactggggtggggggataaggcctagtaaaaccctctcctcaaagatgcccttgagggtcggcggcgacggcgacatggagagcggggcctatggcgcggccaacgcgggcggctccttcgacctgcggcgctatgtgtcccagcctcaggtggtgacacgcctcgtgagcatggtcttggccttgatcgtattctcctgcatcttcggcgagggctacatcaaccttcactcatctgaccagctacactgtgtgttcaaccggaacgaagatgcctgccgctacggcagtgccattggggtgctggccttcctggcctcagccttcttccttgtggtggatgcgtttttctctcagataagcaatgccactgaccgcaagtatctggtcattggtgacctgctcttctcagctctctggaccttcctgtggtttgtcggtttctgctttctgaccaaccagtgggcagccaccaaacctgatgacgtgttggtgggagcagactcagcccgggctgccatcaccttcagtttcttctccatcttctcctggggtgtgctggcctccctggcctaccagcgttacaaggctggagtggatgccttcattcagaactatgtggaccccacgccggatcccaccacagcctacgcctcctaccctagtgcctcggtggaaaactaccagcagccgcccttcacccagaatgtggagactactgagggctaccagcctcccccagtgtactgagcagccagggacaaagaggcaggagggtgcttggtggggctgcccctccaccctggacttctctcaaggtttgctgtccagaactgtagtcccttggctgttacagttgacagcccgagtccatgcctttctgcaccccagcagccagagcacacctgaagtgcccatgcccagaggggcttcaccgccacccgcctgaccctcaagggcatctttgaggagagggttttactaggccttatccccccac

SEQ ID NO: 1067 - DNA, 1076 bp, Rattus norvegicus
  Genbank Accession No. AF044574
cacacagcaaacatgacccagcagccgcctgacgttgaggaggatgactgtctttctgaataccaccacctcttctgtccggaccttctccaggacaaagtggcttttatcactggtggtggttctgggattggcttccggatcgccgagattttcatgaggcatggctgccacactgtcatcgtcagcaggagtctgccgagagtgtccgaggctgctaagaagttggttgctgccactggaaagcggtgtctccctctgtctatggatgtccgagttcccccagctgtcatggctgctgtggaccaagcgctgaaagaatttggcaaaatcgacatcctcattaactgtgctgcagggaactttttatgccctgccagtgcattgtctttcaatgcctttaagactgtggtggacattgacacccttggcaccttcaatgtgtctcgtgtgctttatgagaagttcttccgggaccatggaggagtgatcgtgaacattaccgccaccctcagtatgcgggggcaggtgctgcagctccatgcaggcgctgccaaggcggctgtggatgctatgacgcgacacttggctgtggagtggggtccccagaatatccgtgtcaacagcctggctcctggtgccatcagcggcactgagggtctgcggagattaggaggccccaaggccagttcgaaatttaagtatctttcaagtcctattccaagactcggaaccaagacagaaatcgcccacagcgtgctgtacctagccagccctctggcttcctatgtctcagggattgtgttggtggttgatggtggtagctggatgacgctcccaaatgacattgggcgactgctagagtttgaatcctcctctgctaagctgtagtgtttgaagagcacacccaaggcttcaagcatgttaaagcaacagaatcaactgaactacgtcctctaccccaagataccttttttgacacataaacattgattgccttaagaaagttgtactgaggaggccgtgttcttccatggggaggcttccctgtctcacatagtctatagtcacacgaa

SEQ ID NO: 1068 - DNA, 1222 bp, Rattus norvegicus
  Genbank Accession No. AF044910
ctcggtccgtggtagcaggccatggcgatgggcagcggcggcgcgggctctgagcaggaagacaccgtgctgttccggcgtggcaccggccagagtgatgattctgacatttgggatgatacagcattgataaaagcttacgataaagccgtggcttcctttaagcatgctctaaagaacggtgacatgtgtgaaacttcagataagccagaaggcacagctagaagaaaacctgctaagaagaataaaaaccaaaagaagaatgccacagctccattgaaacagtggaaagctggtgacaaatgctctgccgtttggtcggaagatggctgcgtttacccagctaccatcacgtcagttgaccttaagagagaaacctgtgtcgtggtttatactggatatggaaacaaagaggagcaaaacctatctgatctgctttccccgacctgtgaagtagctaacaatacagaacagaacactcaggagaatgaaagccaagtttccacagacgacagtgaacactcctccagatcgctcagaagtaaagcacacagcaagtccaaagctgctccatggacctcgtttctccctccacctcccccggtgcccggggcgggattaggaccaggaaagccaggtctaaggttcaatggcccaccgccgccgccacctccccctcccccgttcttgccgtgttggatgcctccgttcccttcaggaccaccaataattcctccaccccctcccatatctcccgactgtctggatgacacggatgctctgggcagtatgctaatctcttggtacatgagtggttaccacactggttactatatgggtttcagacaaaataaaaaagaaggaaagaagtgctcacatacaaattaagaagttcagctctctcccaaggagatggtttgttggtgtccctggtcgataagaacagaagtctcctcgtcacctttgtggactcttggctaagtggtgtcatcatcagggtctccctgtcccgggagtccatcctgagtcagcagcagggcatgcatagagcagcagttggaggaaccgatcaatcgatcgatcagtggcagtgtgagtgcatggaagtcagccaaactgtgactgagcacaaacggacaattgcaattttcttagaatgtcaagatttgtattaatgcctttaaaattaaataaaagcccttttttgaaaaaaaaaaaaaaa

SEQ ID NO: 1069 - DNA, 1272 bp, Rattus norvegicus
  Genbank Accession No. AF045464
gaattcgactgctggaaccaacgtcctctcttaccctccaccttcttctgccacctctaccacggtcaccatgtcgcaagcccggcctgccactgtgctgggtgccatggagatgggtcgccgcatggatgtgacctccagctccgcgtcggtgcgcgccttcctgcagcgcggccacacggagatagacaccgccttcgtgtatgcgaacggtcagtctgagaccatcctaggagacctggggctcggactgggccgcagcggctgcaaagtaaaaattgccaccaaggctgccccaatgtttgggaagacactgaagccagccgatgttcggttccagctggagacgtcactgaagaggctgcagtgtccccgggtggacctcttctatttacactttccagaccacggcactcctatagaggagaccctgcaggcctgccaccagctgcatcaggagggcaagtttgtggagcttggtctgtccaactatgtctcctgggaagtggctgagatttgtaccctctgcaagaaaaatggctggatcatgccaactgtgtaccagggcatgtacaacgccatcaccaggcaggtggagactgagctcttcccctgcctcagacacttcggactaaggttctacgccttcaaccctttggctgggggcctgctgactggcagatataaataccaggataaggatgggaagaatcctgagagccgcttctttgggaatccattttctcaactgtacatggaccgctactggaaggaggaacacttcaatggcatcgccttggtggagaaggctctgaagactacctatggccccactgcccccagtatgatctcagctgccgtacggtggatgtaccatcactcacagctcaagggcacccaaggggatgcagtcattctgggcatgtccagtctggaacaactggagcagaacttggccttggtcgaggaagggcctctggagccagctgttgtggatgcctttgaccaagcctggaacctagttgcccacgagtgtcccaactatttccgctaagatacatctgccttggggatggcgcagcttactgcctgccccgccttgtcctgggctcgatctgatctggttctttcctttttagacaggtcactgtctttttcttccctgctttctatacagccagttgctttcaaagtgagagctggctgagccccaatacctcctgctgaataaaactgttccctgtcacagcctgggctacaactggcggccga

SEQ ID NO: 1070 - DNA, 834 bp, Rattus norvegicus
  Genbank Accession No. AF051943
caactcacgcttgccctgatcaaacctgatgcagttgcccacccactgattctggaggctgttcatcaacagattctcagcaacaagttcctcattgtacgaatgagagaattgctgtggaagccggaggactgccggaggttttaccgagagcatgaaggtcgttttttctatcagaggctggtggagttcatgacaagtgggccaatccgagcctacatccttgcccacaaagatgccatccaactttggaggacactgatgggacccaccagagtgtttcgagcacgccatatagccccagattcaattcgtgggagtttgggcctcactgacacccgaaataccacccatggctcagactctgtggtttccgccagcagagagatcgcagccttcttcccggacttcagtgaacagcgctggtacgaggaggaggagccccagctgcgctgtggtcctgtgcattacagcccagaggaaggcatccactgcgcagctgaaacaggaggccccaaaccagcttagtaaagtcctgtcggtccctgaggactatgcagtgtgcagcctttcttttagggtcaggaaggccgtctgaagacactgtctttgatggaccccaccacctgccggaaggtttcgcagaccacagttctgctacggcagcccagatctatctacctcttctatgagtattcacagaggtccaggaaggaggtgatgcctccttcctcgagaaagagcttgcctgttgaccagtcaggaaaacgcagtgcctgcctgtgtaaccagcatccacctggcttccttaataaacttcgtgctatcaaatgc

SEQ ID NO: 1071 - DNA, 2472 bp, Rattus norvegicus
  Genbank Accession No. AF052042
gaactaaaaagatcgtgtgcgcggatgtgctgtgtctgtagtgactttttccgggcctcttttttgggagaaggtaccagtctgcctcggtgaggcagaaaaggtccgtgatgccattgggctttgcccttctagaaaacaagctctagctggacggtccagaggctccaatggctgcgggctctggggtcgccccgccacctctcggcgttgggctttgtgcggtgaaagtggaggaggactctcccgggagtcaggagccctccggttccggagattggcagaatcccgaaacttctcgaaaacagttcagacaattgcgctaccaggaagtagccggccctgaggaggcgctgagccgactttgggagctctgtcggcggtggctgaggccggagctgcgctccaaagagcagatcatggagctactggtgctggagcagtttcttaccatcctgcctcgggagctccaggcctacgtgcgggaccactgccctgagagcggggaggaggctgcggctttggcgcggactctgcaaagagcactggacggggcctccctccagagctttgcaactttcaaggatgtggctgaatctctgacctgggaagagtgggagcagctggctgcagctcggaagggtttctgccgagagagcacaaaggaccctgggagtacagttggccctggcttggaaaccaaagctgtgaccacagacgtgattctaaagcaagaaatgtcaaaggaggcagagtcccaggcatggctacaagaagtgtcccagggaaaggtcccagtatttaccaaatgtggtgatacctgggaggactgggaggaacggcttccaaaagctgccgaattgctgccgctccagagttctcctgaagagcaaggacgcactgccatcccgcatctccttggcgtgtccaaagatgaaagcgattctaaagataatgaatttgagaacagcggcagcttggtccttggtcagcacatccagacagcagagggtctggtcaccaatggtgaatgtggggaggatcacaaacaaggcttacatgcgaaatgccacacggtgaagcctcacagctctgttgacaatgctttggggcttcttgagagccagaggcatttccaagaaggcagaccttataagtgtgataactgcgagaagagattcagacagcgctcagacctcttcaaacaccagaggactcacacaggtgagaaaccctatcagtgccaagaatgtgggaaaagcttcagtcagagtgctgccctggtgaaacaccagcggacacacacaggtgagaagccatatgcatgcccagaatgcggggaatgcttcaggcagagctcacacctcagtcggcatcagagaacccatggcagcgagaagtactgtaaatgtgaggagtgtggggagatctttcatatctccagcttatttaaacatcagagactgcataaaggggagagaccacacaagtgtgaagtctgtgagaagagctttaaacagcgctcagacctctttaagcaccagagaatccatacaggagagaagccctacatgtgctttgtctgtgagagaagattcagtcagagtgcaaccctcattaaacaccagcgaactcacactggagaaaaaccttataaatgttttcaatgtggcgaaagatttagacagagtacacaccttgtccgacaccaaagaatccatcacaattcagtctctgggcttagggtggagaagcaacatggtaacctcctgagctggtgaccctctggatgcaaagaatggaaatgccccattcgcctagcgcactgacccatcgagggagaaattgacccctccacagctgcagtttatgcgccaggtacaactagcccagtggcagaaaacactgccacagcggcggacctggaacatcgtgaccccccccccccccgggcatcggggccctggtgttagctatttatggttacaccttctactcagtggcccaggaacatttccttgatgagctggaagatgaagccaaagatgcccgagcccgagctcttgagagagagagagagcatcaggaccctaactgtacggaccatcctgaaactgctggagcccccgtacatgttgaatgatgcctggtggtctcacagcatcactggcataggaactgtggactatgattgagcccaagaagccacagactatgcatttggctactgccaaggggagattgctcacgtcacatgcagtttgtacatttactcagcccctttttatttccttgtttgagaggtatgcacgaccttgcctttccccaaactctgtggtttacctcttcacctcccaggggcccaactgttaagggggagggtgtggcctaactgcagagttggaaccaaagtgggaaagatagggtcaagtaaagagtaattaaaaaaaaaaaaaaaaaaaaaaaaaaaaa

SEQ ID NO: 1072 - DNA, 435 bp, Rattus norvegicus
  Genbank Accession No. AF056333
accaccagcacaactctgagatatgggctcctgatcctcatgaaatacccagaaattgaagagaaacttcatgaagaaattgacagggttattgggccaagccgcgtccctgctgtcagagacagactggatatgccctacatggatgctgtggtgcatgagatccagagattcatcaatcttgtcccttccaacctaccccatgaagcaaccagagatactgtgttccaaggatatgtcatccccaagggtacagttgtgattccaactctggactccctcttatatgacagccatgagtttccagatccagagaagtttaaacctgagcatttcctgaatgaaaatgggaagttcaagtacagtgactatttcaaggcattttctgcaggaaagcgtgtgtgtgttggagaaggcctggcccgcatggaattg

SEQ ID NO: 1073 - DNA, 3718 bp, Rattus norvegicus
  Genbank Accession No. AF057308
gacaccgcgggcaccgattcgccatggagggcgccggcggcgagaacgagaagaaaaataggatgagttccgaacgtcgaaaagaaaagtctagggatgcagcacgatctcggcgaagcaaagagtctgaagttttttatgagcttgctcatcagttgccacttccccacaacgtgagctcccatcttgataaagcttctgttatgaggctcaccatcagttacttacgtgtgaggaaacttctaggtgctggtgatcttgacattgaagatgaaatgaaagcacagatgaactgcttttatctgaaagccctggatggctttgttatggtgctaacagatgatggtgacatgatttacatttctgataacgtgaacaaatacatggggttgactcagtttgaactaactggacacagtgtgtttgattttacccatccatgtgaccatgaggaaatgagagaaatgcttacacacagaaatggcccagtgagaaaggggaaagaacaaaacacgcagcgaagcttttttctcagaatgaaatgtaccctaacaagccgggggaggacgatgaacatcaagtcagcaacgtggaaggtgctgcactgcacaggccacattcatgtgtatgataccagcagtaaccagccgcagtgtggctacaagaaaccgcctatgacgtgcttggtgctgatttgtgaacccattcctcatccatcaaacattgaaattcctttagacagcaagacatttctcagtcgacacagcctcgatatgaaattttcttactgtgatgaaaggattactgagttgatgggttatgagccagaagaacttttgggccgttcaatttatgaatattatcatgctttggactctgatcatctgaccaaaactcatcatgacatgtttactaaaggacaagtcaccacaggacagtacaggatgcttgcaaaaagaggtggatatgtctgggttgagactcaagcaactgttatatataatacgaagaactctcagccacagtgcattgtgtgtgtgaattatgttgtaagtggtattattcagcacgacttgattttctcccttcaacaaacagaatctgtcctcaaaccagttgaatcttcagatatgaaaatgacccagctgttcactaaagtggaatctgaggacacgagctgcctcttcgacaagcttaagaaagagcccgatgccctgactctgctagctccagcggctggggacacgatcatatcactggacttcggcagcgatgacacggaaactgaagaccaacaacttgaagatgtcccgttgtacaatgatgtaatgttcccctcttctaatgagaaattaaatataaatctggcaatgtctccattacctgcctctgaaactccaaagccacttcgaagtagtgctgatcctgcactgaatcaagaggttgcattgaagttagagtcaagcccagagtcactgggactttcttttaccatgccccagattcaagatcagccagcaagtccttctgatggaagcactagacaaagctcacctgagcctaacagtcccagtgagtactgctttgatgtggacagcgatatggtcaatgtattcaagttggaactggtggaaaaactgtttgctgaagacacagaagcgaagaatccattttcagctcaggacactgatttagacttggaaatgctggctccctatatcccaatggatgatgatttccagttacgttcctttgatcagttgtcaccattagagagcaattctccaagccctccgagtgtgagcacagttacaggattccagcagacccagttacagaaacctaccatcactgtcactgccaccgcaactgccaccactgatgaatcaaaagcagtgacgaaggacaatatagaagacattaaaatactgattgcatctccaccttctacccaagtacctcaagaaatgaccactgctaaggcatcagcatacagtggtactcacagtcggacagcctcaccagacagagcaggaaagagagtcatagaaaaaacagacaaagctcatccaaggagccttaacctatctgtcactttgaatcaaagaaatactgttcctgaagaagaattaaacccaaagacaatagctttgcagaatgctcagaggaagcgaaaaatggaacatgatggctccctttttcaagcagcaggaattggaacgttactgcagcaaccaggtgaccgtgcccctactatgtcgctttcttggaaacgagtgaaaggatacatatctagtgaacaggatggaatggagcagaagacaatttttttaataccctctgatttagcatgtagactgctggggcagtcaatggatgagagtggattaccacagctgaccagttacgattgtgaagttaatgctcccatacaaggcagcagaaacctactgcagggtgaagaattactcagagctttggatcaagttaactgagcttttcctaatctcattcctttgattgttaatttttgtgttcagttgttgttgttgtctgtggggtttcgtttctgttggttgttttggacactggtggctcagcagtctatttatattttctatatctcatttagaggcctggctacagtactgcaccaactcagatagtttagtttgggccccttcctccttcattttcactgatgctctttttaccatgtccttcgaatgccagatcacagcacattcacagctccccagcatttcaccaatgcattgctgtagtgtcgtttaaaatgcacctttttatttatttatttttggtgagggagtttgtcccttattgaattatttttaatgaaatgccaatataattttttaagaaggcagtaaatcttcatcatgatgataggcagttgaaaattttttactcatttttttcatgttttacatgaaaataatgctttgccagcagtacatggtagccacaattgcacaatatattttcttaaaaataccagcagttactcatgcatatattctgcatttataaaactagtttttaagaagaaactttttttggcctatggaattgttaagcctggatcatgatgctgttgatcttataatgattcttaaactgtatggtttctttatatgggtaaagccatttacatgatatagagagatatgcttatatctggaaggtatatggcatttatttggataaaattctcaattgagaagttatctggtgtttctttactttaccggctcaaaagaaaacagtccctatgtagttgtggaagcttatgctaatattgtgtaattgatattaaacattaaatgttctgcctatcctgttggtataaagacattttgagcatactgtaaacaaaaaaatcatgcattgttagtaaaattgcctagtatgttaatttgttgaaaatacgatgtttggttttatgcactttgtcgctattaacatcctttttttcatatagatttcaataattgagtaattttagaagcattattttagaaatatagagttgtcatagtaaacatcttgtttttttttctttttttctatgtacattgtataaatttttcattcccttgctctttgtagttgggtctaacactaactgtactgttttgttatatcaaataaacatcttctgtggaccaggaaaaaaaaaaaaaaaaaaaaaaaaaaa

SEQ ID NO: 1074 - DNA, 2225 bp, Rattus norvegicus
  Genbank Accession No. AF058787
tttcagggatttttgcgattcctctctgtagacttctacttgttctctaagggagttcttcatgtctttcttgaagtcatccagcatcatgatcaaatatgattttgaaactagatcttgcttttctggtgtgtttggatattccatgtttgttttggtgggagaattgggctccgatgatggcatgtagtcttggtttctgttgcttggtttcctgcgcttgcctctcgccatcagattatctctagtgttactttgttctgctatttctgacagtggctagactgtcctataagcctgtgtgtcaggagtgctgtagaccttttttcctctctttcagtcagttatgggacagagtgttctgcttttgggcgtgtagtttttcctctctacaggtcttcagctgttcctgtgggcctgtgtcttgagttcaccaggcagctttcttgcagcagaaaatttggtcatacctgtgatcctgaggctcaagttcgctcgtggggtgctgtccaggggctctctgcagcgggcacaaccaggaagacctgtgcggccccttccggagcttcagtgcaccagggttccagatggcctttggcgttttcctctggcgtccgagatgtatgtacagagagcagtctcttctggtttcccaggcttgtctgcctctctgaaggttcagctctccctcccacgggatttgggtgcagagaactgtttatccggtctgtttctttcaggttccggtggtgtctcaggcaggtgtcgttcctgcgccctcccccatgggaccagaggccttatacagtttcctcttgggccagggatgtgggcaggggtgagcagtgttggtggtctcttccgtctgcagcctcaggagtgccacctgaccaggcggttgggtctctctctgagaatttcatttttaaatcattcattaaaatgtcatgacttgatgtcctgctgtccgtctcacgccctcagctgtaacagtgccgagggagtcactgaagaagagactgaatgaccagagtatgggcagcacagacaactcaacaaaaatgtcttcagaggtggagactgcggaggccgtagatgagtcagagaagaactctatggcatcagagaaggaaaaccattccaaaatagcagacttttctgatcttctgaaggaagggacaaaggaagcagatgaccgggcagaaaatacccagtttgtcaaagacttcttgaaaggaaacattaagaaggagctatttaagctggccaccactgcactttcatactcagcccctgaggaggaaatggattcactgaccaaggacatggagtacttctttggtgaaaactgggaggaaaaagtgaagtgctctgaagctgcccagacgtatgtggatcagattcactatgtagggcaaaatgagccagagcatctggtggcccatacttactctacttacatggggggaaacctttcaggggaccaggtactgaagaaggagacccagccggtccccttcactagggaagggactcagttctacctgtttgagcatgtagacaatgctaagcaattcaagctattctactgcgctagattgaatgccttggacctgaatttgaagaccaaagagaggattgtggaggaagccaccaaagcctttgaatataatatgcagatattcagtgaactggaccaggcaggctccataccagtaagagaaaccctaaagaatgggctctcaatacttgatgggaagggaggtgtatgcaaatgtccctttaatgctgctcagccagacaaaggtaccctgggaggcagcaactgccctttccagatgtccatggccttgctgaggaagcctaacttgcagctcattctagttgccagtatggccttggtagctggacttttagcctggtactacatgtgaagggcctgtcaagttgtttgcatcctatctcaacatcctaccacttgttccttccccacctccacctctgcctagaactaccacctcaggtgacatttttaatgttgggtttgagaaaatgagcaaccaataaaagacagaccctagaaaaaagtcatgacttaagtggcacggggacacctaaagtcacactttgtgcttcagacatactttctttctctatttcaacactgaattcgggaagtaacctactactattaataataaatgctacacaatgcataataaaaa

SEQ ID NO: 1075 - DNA, 1607 bp, Rattus norvegicus
  Genbank Accession No. AF062594
  misc_feature (1)..(1607): n = a or c or g or t
catgctgaaatatcgcggtttaccatatggggatggtggcgacaatctcctggagcccgtcagatcgcggaaattaccgatgcctgcgcagctccttccgctcagctccgcgtccgagcctcctggaacgatatttggagttcttaaaagatggcagacattgacaacaaagaacagtctgaacttgatcaagatttggaagatgttgaagaagtagaagaagaagaaacgggtgaagaaacaaaaatcaaagcacgtcagctaactgttcagatgatgcaaaatcctcagattcttgcagctcttcaggaaagacttgatggtctggtagacacaccaacaggatacattgaaagcttgcctaaggtagtcaaaagacgggtgaatgctctcaagaatcttcaagttaaatgtgcacagatagaagccaaattctatgaggaagttcatgaccttgagagaaagtatgctgttctctatcagcctctgtttgataagcgatttgagatcattaatgcaatttatgaacctacagaagaagaatgtgaatggaaaccagatgaggaagatgaagtttcggaggagctgaaagaaaaggccaagattgaagatgagaaaaaggatgaagaaaaagaagaccctaaaggaattcctgagttttggttgacagtttttaagaatgatttgctcagtgatatggttcaggaacatgacgaacctattctgaagcacttgaaagatattaaagtgaagttttcggacgctggccagcctatgagttttatcttagaatttcactttgaacccaacgaatatttcacaaatgaagtgttaacaaagacttacaggatgaggtcagaaccagatgattctgatcccttttcttttgatggaccagaaattatgggttgtacagggtgccagatagattggaaaaaaggaaagaatgttactttgaaaaccattaagaagaagcagaaacacaagggccgtgggacagttcgtactgtgactaaaacagtttccaagacttctttctttaacttttttgctcctcctgaagttcctgagaatggagatctggatgacgatgntgaggcaatactggctgcagactttgaaattggtcactttttacgtgagcgtataatcccaagatcagtgttatacttcactggagaagctattgaggacgatgacgatgactatgatgaagaaggtgaagaagctgatgaggaaggggaagaagaaggagatgaggaaaacgatccagactatgacccaaagaaggatcaaaacccagccgagtgcaagcagcagtgagcagtgactggccttgaggacggcctccctgtaatagcctaaacatgactcacttacttacagccttatggttttgtattttcttgatagaatcagtaagtttctaagggaaaggaaattgatattttgcagaccaatttgttctaaccagcatcccaactctagctctgtagccacgttaccgagtccagccctttactgcatgctcaggtcgctgcagtctggttctcctgagagatttcatcatgtagctattggtacattatgaaaccactgtgaacaat

SEQ ID NO: 1076 - DNA, 2640 bp, Rattus norvegicus
  Genbank Accession No. AF064868
gaattccgccgggcagggcgcacgtggtgggcgccccctgcgggaagcggggcgctggggagccccggccgcgggctcgggcgcgcagagccggggccatgtggacgggcggccggcggccgggccggcttcgccgggcggcctctgccgcagacatggagaaactcagtgcgctgcaggaacagaagggcgagctgcgcaagcgcctgtcctacaccacgcacaagttggagaagctggagacggagtttgactccacccgccactatctggagattgagctgaggcgcgcacaggaggagctggacaaggtcaccgagaaactgcgcaggattcagagcaactacatggcactccagaggatcaaccaagagctggaagacaagctgtaccggatgggccagcactatgaggaagagaagcgtgccatgagccacgagattgtcgccctcaacagccacctgctggaggctaaggtgaccattgacaagctgtcagaagacaacgagctctataggaaggactgcaatctagcggcccagctgctgcagtgcagccagacctacggcagggtccataaggtgtccgagctgccctcggacttccagcagcgtgtgagcctgcatatggagaagcatggctgcagcctgccgtccccactgtgccatccgtcctacgccgacagcgtgcccacctgcgtcatcgccaaggtgctggagaagcccgaccctggcagcctgtcctcgcgcatgtcggatgcctcggcccgcgacctggcctaccgcgacggagtggagaacccgggcccgcgacccccgtacaagggagacatctactgcagcgacacggctctctactgccctgacgagcgagatcacgaccggcggcccagcgtggacacgccggtgaccgacgtgggcttcctgcgtgcgcagaattccaccgacagcctggcggaagaggaggaggccgaggcggcggccttcccggaggcctaccgtcgcgaggccttccagggctacgcggcctcgctgcccacgtccagctcctactccagcttcagcgccacgtccgaggagaaggagcacgcgcaggccagcacgctgaccgcctcgcagcaggccatctacctgaacagccgcgaagagctcttcagccgcaagccgccctccgccacctacggcagcagccctcgctacgccaaggccgcggccaccctgggctccccgctcgaggcccaggtagccccaggcttcgctcggactgtgtctccgtacccggccgagccctaccgctatccggcctcccagcaggctctcatgcctcccaacctgtggagcctgcgggccaagccgagcggtaaccggcttgccgcccgggaggacattcgaggccagtggcggcccctgagcgtggaggatgtgggcgcctactcttaccaggccggcgctgcaggccgcgccgcctcgccctgcaacttctcagaacgtttctacggcggcggtggcggcggcggcagcccgggcaagaatgccgagggccgtgccagccccctctatgccagctacaaagccgatagtttctcggagggcgatgacctctcccagggtcatctggccgagccctgcttcctccgagcgggtggtgatctgagcctcagccccagccgttcagctgatcctctccctggctatgccaccagtgacggggatggggataggctcggggtgcagctgtgtgggcctggcagtagcccggagcccgagcacggctcccgggattccctggagcctagctccatggaggcctctcccgaaatgcaccctccaacccgcctcagcccccagcaggccttcccaaggactggaggctctgggctgagccgcaaggacagtctcactaaggcccagctctacggaaccctgctcaactgactgccatcagcaggctgcagtcaggggctccctaccaccctgccccatatagggagtagctaaccccctcgtcccaacccctgctaaggaactccagttccagttccagttcctgttccagttccagttcctgttccagttcctgttccagttccagttcccgttcctgttccagttcctgttccagttccagttcccgttccagttcccgttcctgttccagttcccgttccagttcctgttccagttccagttcctcctgaccctgttactaacaccccagtagaacctgaaaagaccccctctgccaatcgtcttgtccaccccagcctctgctgcaaaccctacccagaatatttccgctctgcacccttccctgaagtgagcatcccctgttttataagtgaagctatttttttagggaaaaagagcgtttgttcacgcacttgctgccaacttctggatggcagccttggcgtaccccacacgaagttccttcatttccagtgagggtgcttggggcctgccccagggaaggggaggctggggccctagagggaccagtctccacaagtagggagaagccagcaacaagggaattctgaagttctgaacactgaggaggggaaccaaagccacttagggcgcagaaaatgtcttatgctcgctcccgtgtcacagtgcagccagcctcgtgccgaattcc

SEQ ID NO: 1077 - DNA, 312 bp, Rattus norvegicus
  Genbank Accession No. AF068860
gtctcacgtcctctctgcactctggaccctgacttcaccgacatgaaaactcattactttctcctggtgatgttattttttctcttctcccagatggagctgggtgctggcattctcacaagtcttggacgcagaacagatcaataccgatgcctccaaaatggaggattctgtctccgctccagctgcccatctcataccaaactacaaggaacatgtaaaccagataagcccaactgttgcaggagttgacagtggtttgaagaatggacataaaggacaagcaagggattgtaaaattagtgttttaat

SEQ ID NO: 1078 - DNA, 1590 bp, Rattus norvegicus
  Genbank Accession No. AF071495
cacgcggacatgggcggcagctccagggcacgctgggtggccttggggctgggcgttctagggctgctgtgtgctgcgctcggcgttatcgtgattctcatggtgccctcgctcatcaaacagcaggtgctcaagaatgtccgcatagaccccagcagcctgtcctttgggatgtggaaggagatccctgttcccttctacttgtccgtctacttcttcgaggtggtcaaccccagcgaggtcctaaatggccagaagccagtagtccgggagcgcggaccctatgtctacagggagttcagacaaaaggttaacatcaccttcaatgacaatgacacggtgtcctacatagagaaccgaagccttcatttccagccagacaggtcccagggctcagagagtgactacattgtactgcctaacatcctggtcctgggaggggcagtgatgatggaggacaagcccacaagcctgaagctgctaatgaccttggggttggtcaccatgggccagcgggcctttatgaaccgcacggttggtgagatcctgtggggctatgaggatccgttcgtgaatttcctcagcaaatatttcccagacatgttccccatcaaaggcaaatttggcctgttcgttgggatgaaccactcagagttctggctcttcaccgtcttacagggtgtccagaatttcagcaagatccatctggtggataagtggaacggcctcagcgaggtcaaatattggcattcggaacagtgcaacatgatcaatggtactgccgggcagatgtgggcaccattcatgacacccgaatcctcactggaattcttcagcccagaagcctgcagatctatgaagctcacctaccaggaatcaagggtgttcgaaggcatccccacttatcgcttcacggcccccgatactttgtttgccaacgggtccgtctacccacctaatgaaggcttctgcccgtgccgcgagtccggcattcagaatgtcagcacctgcaggtttggtgcgcccctgtttctctcccagccccacttctacaatgctgaccccgtgctgtcagaagctgttcttggtctgaaccctgacccaagggagcattctttgttccttgacatccacccggtcactgggatccccatgaactgttccgtgaagatgcagctgagtctgtacatcaaatccgtcaagggcgtcgggcaaacagggaagatcgagccagtagtcctgccattgctgtggttcgaacagagcgggatgatgggtggcaagaccctgaacacgttctacacgcagctggtgctgatgccccaggttcttcactacgcgcagtatgtgctgctggggcttggaggcctcctgctgctggtgcccatcatttaccaactgcgcagccaggagaaatgctttttattttggagtggtagtaaaaagggctcgcaggataaggaggccatgcaggcctactctgagtctctgatgtcaccagctgccaagggcacggtagtgcaagaagccaagctgtagggcccagaagacaccacgagccccccaaacctgatagcttggtcagaccag

SEQ ID NO: 1079 - DNA, 1469 bp, Rattus norvegicus
  Genbank Accession No. AF072411
tgattctgctgcacgaggaggagaatgggctgcgatcggaactgtgggctcattactggagccgttattggtgctgtcctggctgtgtttggaggcattctcatgccggttggagacctactcattgagaagacaatcaaaagggaagttgtccttgaagaaggaaccattgctttcaaaaactgggtgaaaacgggcaccactgtgtacagacagttttggatctttgacgtgcaaaacccagaggaagtggcaaagaatagcagcaagatcaaggttaaacagagaggtccttacacatacagagttcgttatttagccaaggaaaatataactcaggaccccaaggacagcactgtctcttttgtacaacccaatggagccatctttgagccttcactgtctgttggaacagagaatgacaacttcacagttctcaatctggctgtggcagctgcaccacatatctacacaaactcatttgttcaaggtgtgctcaacagccttatcaaaaagtccaagtcttctatgttccaaacacgaagtttgaaggaactcttgtggggttacaaagatccattcttgagtttggttccatatcctataagtaccacagttggtgtgttttatccttacaataacactgtagatggagtttataaagttttcaatggaaaggataacataagcaaggttgccataattgatacctataaagggaaaaggaatttgtcctattgggaaagttattgcgacatgattaatggcacagatgcagcctcctttccaccttttgttgagaagtctcaaacactgaggttcttttcctctgacatttgcaggtccatctatgctgtgtttgaatctgaagtgaaccttaaaggaatccccgtatacagatttgttcttccagccaacgcctttgcctccccactccagaacccagacaaccactgtttctgcactgaaaaagtaatctcaaataactgtacgtcgtatggtgtgctggacattggcaagtgcaaagaaggaaagcctgtgtacatttctcttccacatttcctacatgcaagtcctgatgtctcagaacctatcgaaggcttgaatcctaacgaagatgagcataggacatacttggatgtggaacccataactggattcactctacagtttgcaaaacgactgcaggtcaacatactggtcaagccagctagaaaaatagaagcactgaagaatctgaagagaccttacattgtacctatactgtggctaaatgagactgggaccatcggcgatgagaaagcagaaatgttcagaaaccaagtgaccgggaaaataaagctcctgggcctggttgagatggtcttacttggtgttggagtagtgatgtttgttgcttttatgatttcatactgtgcttgcagatctaagaatggaaaataagtagtggatgagcctacattatgcac

SEQ ID NO: 1080 - DNA, 1999 bp, Rattus norvegicus
  Genbank Accession No. AF072865
agccctaaccgcctaagtccccgggccatggcggcgattgtggcggcgctgcgcggatccagcgggcgcttccggccgcagacacgggttttaacacgcgggacgcggggcgcggcgggcgcggcgagcgcagcgggagggcagcagaacttcgatctcttggtgatcggtgggggatccggtggcctagcttgtgccaaggaagcggctcagctgggaaggaaggtggctgtggctgactatgtggaaccctctccccgaggcaccaaatggggccttggtggcacctgtgtcaacgtgggctgcatacccaagaagctgatgcatcaggccgcactgctggggggcatgatcagagatgctcagcactacggctgggaggtggcccagcctgtccagcacaactggaaggcaatggccgaagccgtgcaaaaccatgtgaagtccttgaactggggtcatcgtgtccaactgcaggacaggaaagtcaagtactttaacatcaaagccagctttgtcaacgagcacacagttcacggtgtcgacaaagccgggaaggtgactcagctttcagccaagcacatagtcatcgctacaggaggacggccgaagtaccccacacaggtcaaaggagccctggaacacggaatcacaagtgatgacatcttctggctgaaggagtcccctgggaaaacgttggtggttggagccagttatgtggccctggagtgtgccggcttcctcactggtattggcctggataccacggtcatgatgcgcagcgtgcccctccgaggctttgaccagcaaatggcgtctttggtcacagagcacatggagtctcatggcacccggttcctgaaaggctgtgtcccctccctcatcagaaaactcccgactaaccaactgcaggtcacttgggaggatctcgcttctggcaaggaggacgtgggcacctttgacactgtcctgtgggccatagggcgagttccagagaccagaaatttgaatctggagaaggctggcgttaataccaaccctaagaatcagaagatcattgtggatgcccaggaggccacctctgtcccccacatctatgccattggagatgttgctgaggggcggcctgagctgacacccacagctatcaaggcaggaaagcttctggctcagcggctctttgggaaatcctcaaccttaatgaattacagcaacgtccccacaactgtctttacaccactggagtatggctgtgtgggactgtctgaggaggaggctgtggctctccacggccaggagcatatagaggtttaccatgcatattacaagcccctagagttcacagtggcagatcgggatgcatcacagtgctacataaagatggtatgcatgagggagcccccacaactggtactgggcctgcacttccttggccccaacgctggagaagtcacacaaggatttgctcttgggatccagtgtggggcttcatacgcacaggtgatgcagacagtagggatccaccccacctgctctgaggaggtggttaagctgcacatctccaagcgctctggcctggatcctactgtgaccggctgctgaggttaagttaccatccctgctgagctaaggatacacactgtgcctgccatgtgcccagtacaaggctctcagacacctggacctagctattgtcatgggagccactgtgccagcatgattccaggcacatggtgaagctacctagaacaggactggaaggccttgctgcctcgcagagatctgagaagatgtggatggagcattgtgtatctgaatagatggtgtgtgtcctgcagggatgactgccccctctaacctctggccagccttcacacactgccagtgtcagatgatgacggcctgtgcagaaacccccacgtgggctgccaggtttgaacccctggcatttctggagtgctaataaagagcgtgttttagtaaaaaaaaaaaaaaaaaa

SEQ ID NO: 1081 - DNA, 649 bp, Rattus norvegicus
  Genbank Accession No. AF072935
catggctaatcgaggagcaacaagacccaacgggccaaatactggaaataaaatatgccagttcaaactggttcttctaggagagtctgctgttggcaaatcaagtctggtgcttcgctttgtgaaaggccaatttcatgagtttcaagagagtaccattggggctgcctttctaacccaaactgtgtgtcttgatgacacaacagtaaaatttgaaatatgggatacagctggccaagaacggtatcatagcctagcaccaatgtactaccgaggagcacaagccgccatagttgtgtatgatattacaaatgaggagtccttttcgagagcaaaaaactgggttaaagaacttcaaaggcaagcaagtcctaatattgtgatagctttgtcaggaaacaaggctgacttagcaaataaaagagctgttgacttccaggaagcacagtcctatgcagatgacaacagcttattatttatggagacatcagctaagacatcaatgaatgtaaatgaaatatttatggcaatagctaaaaagctgccaaagaacgaaccacaaaatccaggcgcaaactcagccagaggaagaggagtagaccttactgagcctgcacagccagccaggagtcagtgttgtagtaactaa

SEQ ID NO: 1082 - DNA, 3803 bp, Rattus norvegicus
  Genbank Accession No. AF074608
acagcccaaggttcaggcaaagtcttagtcgccaggctgtgaggtaagggcggggcaggggattccccatctccccagtttcacttcagcttttaacctgtgtcaggtccttctgctcgggtactgatgacgctctggaaattctcattcccattgggtgccgtaaaccctgtgaatcaatcagcgtcgccccaggcactgcacgtaaagtcgaagcagcccgacggatttagccaggtccgggatctcagatgggggcaaaggcacttcaggcgctgctcctgctggtggcggtcgccctggccccgacccagaccagcgcaggtgagtgcggggtcgggagggaaacggcctctgcgtggaagagcgggtgaggggaatcggggaagccgggtccccgcgtcgcataccagaccctcgccctttctcaacccgcgtccagagccccgcgccctgctccccgcccggcccgcacacccgcccgggatcccgggaggaggtcggggtctcaccgcgcgccgcccccaggctcacactcgctgcggtatttcgaaaccgccgtgtcccggcccggcctcggggagccacggttcatctctgtcggctacgtggacgacacggagttcgtgcgctacgacagtgacgcggagaatccgagatacgagccgcgggcgcggtggattgagtgggagaagccggactattgggagacgcagacacggagagccaagggaaacgagcagatttaccgagggagcctgacgaccctgctccactactacaaccagagcgaggacggtgagtgaccccgggtcggaggtcacgaccctccgggtccccacactgccagggacttccgggtccgaagtccgaggttcttagcagaaccgacccaggcccgtttccctttcagtttggaggagtccgcgggtgggcggggctggggcggggccgggtctgaccgcggggtcccgcaggctctcacaccatccagtggatgtatggctgtgacgtggggtcggacgggagcctcctccgcgggtattggcagcacgcctatgatggccgcgattacctcgccctgaatgaagacctgaaaacgtgggaggcctcggacagagcggcgcagaaaacccggaacaagtgggagcggaaaggtgttgcagagagaagcagggcctacctgaagggcacatgtgtggagtccgtccgcagatacctggagctcagaaaggagacgctcgtgcgctcaggtgcggggactgcgggcttctcctcctctgccctcgggctggggctcagtcctggggaagaagaaaccctcagctgggtgatgcccctgtctcagaggggagacagtgtctcctgatccctcatcacagtgactggactgcctctcccagggcccagccttctccctggagagttctgagtccctctcaggagggaaggagagaatttccccacttaacagcaggggctccctgctgtcagccatggcctctcccaggccaggttctctgcccacacccactctctgaggacactgactcctgtcctgctgagtgtgtcagcccttacacctcaggaccagaagtctcctttacctcagaggagacatggactccactgcactaggctggttcccccagtttctagaatttccatagaacacattctcacagatccctccctgaatgtgggttttgcatcccttcaatacctcatttctctctattcctacagtggagaatggtcccatgagcccttatggggtaccctggaggaatataaatcatgggatttctttttctattttctcttttttaatatttctttcttttttctttcccttttttttgaaggcatacttttgcttctagtcagtctttactgcaaacacatattaaatcaattattttccattccctcttctgttctatgaccacccacctcatgctatagaacatcacataaggacggccatgttgacccactggctcatgtggattccctcttagcttgtgagtccctcaggaaagtgtgcagttctctactgaggggaccagctctccctgcagctctctagtgagatgacagttgaagtgtcagacacacacagttcagtgtcatccttgatttaactgtgtcttgtgtagatttcagtttgtcttgttaactgtgtgatttcttaaatcttccacacagatcccccaaaggtgcgtgtgacccttcaccccagacctgaaggtgatgtcaccctgaggtgctgggccctgggcttctaccctgctgacatcaccctgacctggcagttgaatggggaggacctgacccaggacatggaacttgtggagaccaggcctgcaggggatggaaccttccagaagtgggcatctgtggtggtgcctcttgggaaggagcagagttacacatgccttgtggagcatgaggggctgcctgagccgcttacccagagatggggtaaggagggagccttctgtagaccctgagctggtcaagtctgagagctggggtcatgaccccactttcatttcctgaacctgtccttgcagagcctcctccatcaactgattccaacatgggaatcattgctgttctggctgtcgttggagctgtggctgtcattgtacttgtggccctcattggagttgttgtgaggaggaggaggaaaaacataggtaggaatgggcagggactgagtgtctcctcagcccactttagaagagtgctgttctcattaatggggcttgcagccacaccctgcattgcgactgtctccaactttgtccattctggaaacttcctcctgtgaagaccttccttgaactctcacagctttccttctcacaggtggaatatgaggagattacgcccctgctctaggttagtgtgggggcaggattatccctgagggtattggagtgaagctggagatgtggggagctcttggaatccatagtagctcctccagagaaatcttctggggtctagttttactgtgatgtacacatacacatatacatatacatatatacatatacagaaacacatacatatatacgtatgttttgttttaccctaggcagggacagctgccagagctctgatgtctctcccagattgtaaaggtgacactggggtctgactggggagtggcaatgtggacatgattgggtttcagggactcccagaatcccctgtgagtggagggttgttgggctgttgtcttcacagtgatggtttgtgactctccttctctagcatgaagacagctgcctggagtggactgagtgacagatgatgtgttcaggtctctcttgtgacatccagagccctcagttctctttagacaccagtgtctgatgttccctgtgattctatggcttcagtgtgaagaactgtggagcccagcctgccctgcacttcaggaccctgtccctgcactgccattccttcccttcctaggccaaccttagtggtccagcctgggggtggggggtggggacatctacatcctgtccctccttgctgccctgagtgtcagcccctcacttccacactgagaataagaatctgagtgtgaacttgattgttcacatccttgactcaagtgtggatggctttttcaattactggatggaatacttagaggtttttcagttttggggttttgttttgaaaaaaaataaatggcagatggagaagcttccagaatctgtgtcactaagctgtgtgtatctggtgggacaggatgaggatgtgggaggtgagtgtgaaca

SEQ ID NO: 1083 - DNA, 4784 bp, Rattus norvegicus
  Genbank Accession No. AF077000
gagaaagctctgtagtagacagagtgactacaggagaccctgggttcaaaggtggtagggtagagaggtggacctaacagaagaaaaaaagaaaaaaagaaaaagaaatgcaatctcaacgtcaacctcatgctgggccaggctcaggagtgcctgttggagaagtccatgttggacaaccggaagagcttcctagtggcccgcatcagtgcacaggtggtcgattactataaggaggcatgccgggccttggagaaccctgacactgcgtccctgctgggccgcatccagaaggactggaagaaactcgtccagatgaagatctactacttcgcggctgtggctcatctccacatggggaagcaggctgaggagcaacagaaatttggggaacgggtggcctacttccagagtgccctggacaagcttaatgaagccatcaagttggccaagggccagcccgacactgtgcaagatgcacttcgttttgctatggatgtcattgggggaaagtacaattctgccaagaaggacaatgactttatctaccatgaggctgtgccagcactggatacccttcagcctgtgaaaggagcccccttggtgaagcccttgccagtaaaccccacagacccagctgttacaggtcctgatatctttgccaagttggtacccatggctgcccatgaggcctcatcactgtacagtgaggagaaggccaagctacttcgggaaatgctggccaagattgaagataagaatgaagtcctagatcagttcatggactccatgcagcttgaccctgacacagtggacaacttggatgcctacaaccatatcccaccccagctcatggagaagtgtgcagcactcagtgtccggcctgacactgtcaagaaccttgtccagtctatgcaggtgctgtccggggtgttcacggatgtggaggcctccctgaaggacatccgggatctactggaggaagatgagctgcaagagcagaaattgcaggagaccttgggccaggctggggctggccctggcccttctgttaccaaggctgagctcggagaggtgaggcgagaatgggccaagtacacggaagtgcatgaaaaggcttccttcaccaacagtgagctgcatcgtgctatgaatctgcacgttggtaacttgcgcctgctcagtggaccactggaccaggtgcgcgctgccctacccacaccagccctcaccccagaggacaaggctgtgctgcagaacctaaagcgcatcctagccaaggtgcaggagatgcgggaccagcgcgtgtccctggaacagcagctccgagagctgatccagaaggatgacatcactgcctccctggtcaccactgaccactcagagatgaagaaactgtttgaggaacagctgaagaagtatgaccagctgaaggtgtacctggagcagaacctggctgcccaggacaatgtcctccgggcactgaccgaggccaacgtgcagtatgcagcagtgcggcgggtgcttagtgaactggaccaaaagtggaactccacactacagaccctggttgcatcctatgaagcctatgaggacctgatgaagaagtcccaggagggcaaggacttctatgcagacttggaaagcaaggtagccgccctgctggaacgggcacagtctctctgccgtgcccaagaggccgctcgccagcaactcctggacagggagctgaagaagaaggcaccaccacctcggcccacagccccaaagccattgctgtcccgccgtgaggagggagaggccgcagaggctggagaccaacccgaggagctgcgcagcctgccccctgacatgatggctggcccacggctgcctgacccattcctaggaactgctgcccctctccacttttctcctggccccttccctggttccacaggcccagcaacccactatctctcaggacccttaccacctggaacctactcaggccccactcagctgatgcagcctagggctgcagtgcccatggcccctggacctgtcctctacccagcccctgtctatacatcggagttgggccttgtacccagatcctctccccagcatggaattgtaagcagtccctatgcaggggtagggccaccccaaccaatcgtaggtcttccctctgctccaccaccccagttctcaggacctgagttagccatggacgtccggccagctaccactacagtagatagtgtccaagcccctatctctagccacatggcactacggccaggccctgccccagctcctccccagccttgctttccagtgcctcagcctgtaccccaatctgttccccagccgcagcctctgcccacaccctatacttattctatagggaccaagcagcacctcacaggccctctaccacagcatcactttcctcctgggatccctaccagttttcctgcccccaggattgggccccagcccccacctcagcttcagccccagccccagccccagccccagccccagcctccgcctcagccccagccccagccccagccccagccccagccccagccccagccccagccccaacggccagtatttgggccacaacccacacaacagccccttccattccagcatccacatctcttcccatctcaggccccagggattctcacaccaccacccccctacccttttactcctcagcctggtgttttgggacagccaccacccacccggcacacccagctctacccaggcccacctccagacactcttcccccacactcaggggctctgcctttcccgagccctgggcctcctcatcctcaccccaccctggcatatggccctgccccttcccctaggcccctgggtcctcaggcaacccctgtctccattcgaggtcccccaccagccaatcagcctgcccctagtccccacttggtgccttcacctgccccatcgccagggcctggcccagtaccttcaagacccccaacagcagagccaccaccatgtttgcgccgaggtgctgcagctgcagacctgctgtcttccagccctgagagccagcatggagggactcagcctcctgggggcgggcagcccttgctgcagcctaccaaggtagatgcagcggagcggccgacggcacaggccctgcggctaattgagcaggacccctatgaacatcctgagaggctgcagaagttgcagcaggagctggagagctttcggggccagctgggggatgcaggagcactggatgctgtctggagagagttgcaggaggcccaggaacacgatgcccgaggccgatccattgccattgcccgctgctactccctgaagaaccggcaccaggacgtcatgccgtatgacagtaaccgtgtggtgctgcgctcaggcaaagacgactacatcaatgctagctgtgtggaggggctctcgccatactgtccacccttagtggccacccagcgtccgctgcctggcacagctgcagatttctggctcatggtgcatgaacagaaagtgtccgtcattgtcatgctggtgtctgaggctgagatggaaaagcaaaaggtggcccgctacttccccattgagaggggccagcctatggtgcacggggccctgagcgtggccctgagcagtgttcgtactactgatacccatgtggagcgagtactgagcctgcagttccgggatcagagcctcaagcgctctctcgtgcacctacacttccctacttggcctgagttaggcctgccagacagccctggcaatctgctgcgcttcatccaggaggtgcacgcacattatttgcaccagcgacccctgcacacacctattgtcgtacactgcagctcgggggtgggccgcacaggagcctttgcgttgctgtatgccgccgtgcaggaggtagaggctgggagtaggattcctgagttgcctcagctggtgaggcggatgcggcagcagaggaaacacatgctgcaggagaaactgcacctcaaggttctgccacgaggcattggtgcgacatgtggagcaggtcctgcagcgccacggcgtgccgcctcctggcaagcctgtggccagcatgagcgtcagctagaagagccaccttcctcaggactcccaggatctggtccttggtggagacgtgcccatcagctccattcaggctaccattgccaagctcgcatccggcccctgggtggcctggattcccccgctgccagccttcccagccttgtagagcccccaggtcttccaccagctagccttccagagcccacccctgccccaccttcctcgcctccccccccctcttcccctctgcctgaacccccccagccagaggaggagccatcagtgcctgaagcccccagcttagggcctccctcgtcatccctggagctgttggcctctctgactccagaagcattttccctggacagctctttgcggggaaagcagcggatgagcaagcagaactttctgcaggctcacaacgggcagggtctcagggctgcccaacctacggatgaccccctcagcctcctggatccactctggacacttaacaagacctgagaaggctttgcctgtctggtccttacactacacctcccatccctgctgccttcagctgtgccagatggagatgcacttcaggcctcagtcaggctctgctccttcctttgcggaacctgacatttttccagccctgggctattgacataataaacttactctgtgaaaaa

SEQ ID NO: 1084 - DNA, 1361 bp, Rattus norvegicus
  Genbank Accession No. AF082834
tccagtactctggtagaggtctgaccaccatcaaccatgacaacctacagcaacaaaggaccaaagcctgagagaggccggttcctccatttccactctgtgaccttctgggttggcaacgccaagcaggctgcctccttctattgcaacaagatgggcttcgaaccgctggcctacaagggcctggagacgggctcccgggaggtggtcagtcatgtcatcaagcaagggaaaattgtgtttgttctctgctctgctctcaatccctggaacaaagagatgggtgaccacctggtgaagcatggtgatggcgtaaaggacatcgcattcgaggtggaagactgtgaacacattgtgcagaaagcccgagaacggggcgctaaaattgtacgggagccatgggtggaggaagacaaattcgggaaggtgaagttcgctgtgctgcagacgtatggagataccacgcacaccctggtggagaagatcaactacaccggtcgtttcttacctggattcgaggccccaacatacaaggacaccctacttccaaaactacccagctgtaacctggagatcatcgaccatattgtaggcaaccagcccgaccaggaaatggagtctgcctcagaatggtacctgaaaaacctgcagttccaccggttctggtctgtagacgacacacaggtgcacacggagtatagctctctgcgctccatcgtggtggccaactatgaggagtccatcaaaatgcccattaatgaaccggccccgggcaggaagaagtctcagatccaggaatatgtggactataatgggggtgctggggtccagcacatcgctctcaggaccgaagacatcatcacaacgatccgccacttgagggaacgaggcatggagttcttggctgtcccgtcttcttactacagactgcttcgggagaatctcaagacctccaagatccaagtgaaggagaacatggatgtcttggaggagctaaaaatcctggtagactacgatgagaaaggctacctcctacagatcttcaccaagcccatgcaggaccggcccacgctcttcttggaagtcatccaacgccacaaccaccagggctttggagcaggtaacttcaactctctgttcaaagctttcgaagaggagcaagccctacggggtaacctcactgacctggagaccaacggtgtgaggtctggaatgtaagctccacccacacccagaccgcgcaaggcgctggacaagtcaatcagctccaactggctgaaaggctggacctcagggctccacccacaccatggccacgccccctctacggcaaggcttctcctgatccgtttcgagtaaac

SEQ ID NO: 1085 - DNA, 7420 bp, Rattus norvegicus
  Genbank Accession No. AF084186
atggatccaagtggggtcaaagtgctggaaacagccgaggacatccaggagagacgacagcaggttctggatcggtaccaccgcttcaaggagctctctaccttgcggcggcagaaactggaggattcctatcgcttccagttttttcagagagatgctgaggagctggagaagtggattcaggagaagcttcaagttgcctctgatgagaactacaaagaccccaccaacttgcagggaaagctccagaaacaccaagcctttgaagctgaagtacaggccaactcaggagccattgtgaagctggatgagacaggaaacttgatgatttctgaagggcactttgcatctgagaccatccggacacgtttaatggagctgcaccgccagtgggagttgcttttggagaagatgcgggagaaaggaatcaaactgctgcaggcacagaagctggtgcagtatttgcgggagtgtgaggatgtaatggactggatcaatgacaaggaagcaattgtgacgtctgaggagctgggccaggatttggagcatgtagaggtactacagaagaagtttgaagagtttcaaactgatctggctgctcatgaagaaagagttaatgaagtaaaccagtttgctgccaaacttatccaggagcagcacccggaagaggagctgatcaagaccaagcaggaggaggtgaatgcagcttggcagcgactgaaaggcctggctcttcaaaggcaggggaagctctttggtgctgccgaggttcagcgctttaacagggatgtagatgagaccattggttggattaaggagaaagagcagttaatggcctctgatgactttggcagagacttagcaagtgttcaagctctgcttcggaagcatgagggtctggagagagatcttgctgctctagaggacaaggtgaaagccctgtgtgccgaggctgaccgcctgcaacagtcacaccctctgagtgccaaccagatccaggtgaagcgagaggaactaattaccaactgggagcagatccgaactctggccgcagagagacatgcacggcttgatgactcatacaggcttcagcgctttcttgctgacttccgtgacctcacgagctgggtgactgaaatgaaagccctcatcaatgcagacgagcttgccaatgacgtggctggtgctgaggccctgctggacaggcatcaagagcacaagggtgaaatcgatgctcatgaagatagctttaagtctgcagatgagtctgggcaggccctactcgctgctggtcactatgcctcagatgaagtgagggagaagctgagcatcctctctgaggagagagctgccctgctggagctgtgggagcttcggaggcagcagtatgagcagtgcatggacttgcagctcttctaccgagacactgagcaggtggacaactggatgagcaaacaggaggcattcctgctaaatgaagatttgggtgactccttagacagtgtggaagctcttttgaagaagcatgaggactttgagaaatctctcagtgcccaggaagaaaaaatcacagcacttgatgagtttgcaaccaagcttattcagaacaaccactacgcaatggaagatgtagccactcgacgagatgctctcctgagccgccgcaatgccctccatgagcgagccatgcatcgccgggcacagctggccgattccttccacctgcagcagttcttccgcgattccgatgagctcaaaagttgggtcaatgagaagatgaaaacggccactgatgaagcttacaaagatccgtccaacctgcaagggaaagtccaaaagcaccaggcttttgaggctgagctctcagccaaccagagccgtattgatgccctagagaaagctgggcaaaaactaatagatgtgaaccactatgccaaggaagaagtagcagctcggatgaatgaggtcatcagtttgtggaagaaacttctagaggccacagaactgaaaggagtcaagctccgagaagccaaccagcagcaacaatttaatcgcaatgttgaggacattgagttgtggctgtatgaagttgaaggtcacttggcttcagatgattatggtaaagacctcactaatgtccagaacctccagaagaagcatgctctgctagaggcagatgttgctgctcaccaggatcgaattgacggcatcacaattcaggcccgccagttccaagatgctggccatttcgatgccgaaaacattaaaaagaagcaagaggcccttgtagctcgctatgaggctctcaaggaacccatggtggcccggaagcagaagctggcagattctcttcgtctgcagcagctcttccgagatgtggaggatgaggaaacctggattcgagaaaaggagcctattgctgcgtccactaacagaggcaaagatcttattggagtccagaatctgctaaagaagcaccaagctttacaggcagaaattgctggccatgaacctcgcatcaaagcagtgacacaaaagggcaatgccatggtggaggaaggccattttgctgctgaggatgtgaaggccaaactgagtgagctcaaccagaagtgggaggcactgaaagccaaagcctcccagcggaggcaggatctggaggactcactacaggcccagcagtactttgccgacgccaatgaagctgagtcctggatgcgggagaaggagcccattgtgggcagtaccgactatgggaaggatgaagactctgctgaggctctgctcaagaagcatgaagctttgatgtccgatctcagtgcctacggcagcagcattcaagctttgcgagagcaggctcagtcatgccggcaacaagtggcccccatggatgatgagactggcaaggagctggtcttggctctctatgactatcaagagaagagccctcgtgaggtcaccatgaagaaaggggatatcctcaccttgctcaacagcacaaacaaggactggtggaaagtggaagtgaatgaccgtcagggttttgtgccagctgcgtatgtgaagaagctggaccccgcccagtcagcctcaagggagaacctcctggaagaacagggcagcattgctctgcggcaggggcagatcgacaaccagacacgcataactaaggaggccggcagtgtatctctgcgtatgaaacaggtggaagaactgtatcagtctctgctggagctgggtgagaagagaaaaggcatgttggagaagagttgcaagaagttcatgttgttccgggaagcgaacgagctacagcagtggatcaacgagaaggaagctgctctaacgagtgaagaggttggcgctgacttggagcaggtcgaggtgctgcagaagaagttcgatgacttccagaaggatctgaaagccaatgagtcccggctgaaggacattaacaaagtggccgaggacctggagtctgaaggtctcatggcggaagaagtgcaggccgtgcagcagcaggaggtgtatggtatgatgcccagggatgaagcagattccaagaccgcctccccatggaagtctgctcgactgatggtccacacagtggccaccttcaactccatcaaggagctgaatgagcgctggcggtccctgcaacagctggctgaggaacgtagccagctcctgggcagtgcacacgaagtacagaggttccacagggatgcggatgaaaccaaagaatggattgaggagaagaaccaggctctgaacacagacaactatggccatgatctagctagcgtccaggccctgcagcgcaaacacgaaggcttcgagagggaccttgcagctcttggtgacaaggtgaattcccttggggaaacagcccagaggctgatccagtcccaccctgaatctgcagaggacttaaaggaaaagtgcacagagttaaaccaggcctggaccagcctagggaagcgtgcagaccagcgcaaggccaaactgggtgactcccatgacctgcagcgcttccttagcgatttccgggacctcatgtcttggatcaatggaatacgagggttggtatcttcagatgaactggccaaggatgtcactggagctgaggctttgctggagcgacaccaggaacaccggacagaaattgatgccagggctggcactttccaggcatttgagcagtttgggcagcagctgttggctcatgggcactatgccagcccagagatcaaggagaaacttgatattcttgaccaggagcgcacagacctggagaaggcctgggttcagcgcagaatgatgctggaccactgcctggagttgcagctgttccatcgagactgtgagcaagcagagaactggatggctgcccgggaagccttcctaaacacagaagacaaaggagactcgctggacagtgtggaggctctgatcaaaaaacatgaagacttcgacaaagctatcaatgtccaggaggagaagatagctgccctgcaggcctttgccgaccagctcattgctgtggaccactatgccaagggagacattgcaaaccgacgcaatgaggtcctggacaggtggcgccgcctaaaagcccagatgattgagaaaaggtcaaagctcggagaatctcaaacacttcagcagttcagccgggatgtagatgagattgaagcctggatcagtgagaagttacaaacagccagcgatgagtcatacaaggaccccaccaacatccagagcaagcaccagaagcaccaagcctttgaggcagaactgcacgccaatgctgaccgaatccgtggagttattgacatgggcaactccctcattgagcgtggggcctgtgctggcagtgaggatgctgtcaaggcccgcctggctgcccttgcagaccagtggcagttcctggtgcagaagtcagctgagaagagccagaagctgaaagaggccaataagcagcagaacttcaacaccgggatcaaagactttgacttctggctttctgaggtggaggctctcctggcatctgaagactacggcaaagacctggcttccgtgaacaacctgctcaaaaagcatcagctgctggaggcagacatatcggcccacgaggatcgtctgaaggacctgaacagccaggctgacagcctgatgactagcagtgccttcgacacctcccaagtgaaagagaagcgggacaccatcaatggacgctttcagaagatcaagagcatggcaacctcccgaagagcaaaactgagcgagtcccatcgcctgcaccagtttttccgagacatggatgacgaggagtcctggatcaaggagaagaagttgttagtgagctctgaggactatggcagagacctcactggtgttcaaaatctgaggaagaaacacaagcggctagaagccgaactggccgcacacgaaccagccattcagggtgtcctggacacggggaagaagctgtctgatgacaacaccatcgggcaggaggagatccagcagcgtctcgcacagtttgtggagcactggaaggaactgaaacagctagcagctgcacggggccagcggctggaggagtccttggagtatcagcagtttgtggccaacgtggaggaggaggaggcttggatcaatgagaagatgaccctggtggccagcgaagactacggggacactcttgctgccatccagggcttactgaagaaacatgaagcttttgagacagacttcactgtccacaaggatcgagtgaatgatgtctgtactaatggacaagacctcattaagaagaacaatcaccatgaggagaacatctcttcaaagatgaagggtctgaatggtaaagtgtctgacctggagaaagcagcagctcagaggaaagcgaagctggatgagaactcggccttccttcagttcaattggaaggctgacgtggtggagtcctggattggtgaaaaggagaacagcttgaaaacagatgattatggccgagatctgtcttctgtccaaactctgctcaccaagcaggagacatttgatgctggcctgcaggccttccagcaggagggcattgccaatatcactgccctcaaagaccagctgctagctgccaagcacattcagtcgaaggccatcgaggcccgacatgcctccctcatgaagaggtggacccagctgttggccaattcagctacccgcaagaagaagttgctagaggcccagagtcatttccgaaaggtagaagacctcttcctgacctttgccaaaaaggcatcggctttcaacagctggtttgagaatgcagaagaggacctcacagacccagtgcgctgcaactctctggaagaaatcaaagccctccgagaggctcatgatgccttccgctcatcgctcagctctgcgcaggccgacttcaaccagctagccgagctggaccgtcagatcaagagtttccgagtggcctccaatccctacacctggttcaccatggaggccctggaagagacgtggaggaacctacagaagatcattaaggagcgagaactggagctgcagaaggaacagcggcggcaggaggagaatgacaagctacgccaagagtttgcccagcatgccaacgcgttccaccagtggatccaggaaacaagaacgtatctcctcgacgggtcctgcatggtcgaagagtcgggaactctggaatctcagcttgaagctaccaaacgcaagcaccaggagattcgggccatgagaagtcagctgaagaagattgaggacctgggggctgccatggaggaagccctcatcctggacaacaagtacactgagcacagcactgtgggcctggcccagcagtgggaccagttagaccagctgggcatgcgcatgcagcacaacctggagcagcagatccaggccaggaacacaacaggagtcactgaggaggccctcaaggagttcagcatgatgttcaaacacttcgacaaggacaagtctggccggctgaatcatcaagagttcaaatcctgccttcgttctctgggttacgacctgccaatggttgaggaaggagagcctgatcctgagtttgaggccatactggacactgttgatcccaacagggacggccacgtctccctgcaagagtacatggctttcatgatcagccgtgaaaccgagaatgtcaagtccagtgaagagatcgagagtgctttccgggccctcagctccgagggcaagccttatgtgaccaaggaggagctctaccagaacctgacccgggaacaagctgactactgtgtctcccacatgaagccctatgtggatggcaagggccgcgaacttccaactgccttcgactacgtggagttcacccgctctctctttgtgaattgat

SEQ ID NO: 1086 - DNA, 2335 bp, Rattus norvegicus
  Genbank Accession No. AF086624
gtccccaagctccaccagcccttggtgaaccgacagggagcgtccggctttcccagcaccactttgccagactcaaaacagccacaccgcaaagtgagcctcgggcggaaggaggcggagctacaggcggccccgcctccgcggagggatacgtgtctccgcggtccaaaaccccggggcgaggcggccggggcgtgtgagccgctcggccagctgccgtctacgggcttccgcgcggccaccgggcaactgcgccgcgcggctgccccactgagcgctcggcctcggggccgtgggatccgccgcgctgtctgcggtcaggaagaccgccctcccgcgtccgtgccggacgggtcagaggcggcgccgcacgcgaggccacccgcgatgctgctgtccaagttcggctccctggcgcacctctgcgggcctggcggcgtggaccacctcccagtgaagatcctacagccagccaaggcggacaaggagagcttcgagaaggtgtaccaggtgggcgccgtgctcggcagcggcggcttcggcacggtctacgcgggcagccgcatcgccgacggactcccggtggctgtgaagcacgtggtgaaggagcgggtgaccgagtggggcagtctcggcggaatggccgtgcccctggaggtggtgctgctgcgcaaggtgggcgcggcgggcggcgcgcgcggcgtcatccgcctgctggactggttcgagcggcccgacggcttcctgctggtgctggagcgacccgagccggcacaggacctcttcgacttcatcactgaacgcggcgccctggacgagcctctggctcgtcgcttcttcgcgcaggtgctcgccgctgtgcggcactgccacaattgtggggtcgtgcaccgcgacatcaaggacgagaacctgctggtggacttgcgctcgggcgagctgaagctcatcgacttcggctcgggcgcggtgctcaaggacacggtctacactgactttgatggcacccgtgtgtacagccccccagagtggatccggtatcatcgatatcacgggcggtctgccactgtgtggtctctgggtgtactgctctacgacatggtgtgtggggacattccctttgagcaggatgaggagatcttgcgcggcaggctctttttccggaggagggtctccccagagtgccagcagcttattgagtggtgtctctccctgcggccctcagagaggccctcgctggaccaaattgctgcccatccctggatgctggggacagagggcagcgttccagagaactgtgaccttcggctctgtgccctggatactgatgacggagccagtaccacttccagcagtgagagcttgtgaggaggaggaggggcctggactccacactgggggcctgggctcagcctagccagccctctcccagaatgaacattttctgcctgggatgtctcctgcaaaagcagtgacctctgacccctggtgacctttgctctcggcaccgggcctgtttcctttgctttgagtgcctttttgaacgctgctccacagggcctgggttttcttgagctcttctgtccaaagatggctgcgggctaagcaaggtcccgcctgccctgggtggatacttgaacccgagaccctaccctgctgctccatcttgcggcagccttcctgaccaagtgtgtttgacatggagcgccctgtggtgcccacctccaaccctccagtctcctggtcttcgtctgggcatgtctgcacaagcaatgcaacgctgggccactgctgcccgcctgcctccctggcaccgcacgcaacgagcgtgccacggtctcttatttatggtgtgatcaccctggagggcgcccctgccctgctggggctatttattgtttaatttatttgctgaggttacttcctccaagcaaccaccttctccaggcccctggggtgttcaggaaagccaagggtggccgttcagtccacagacggcatcctggttcctgcacctgcagtaggtccctaaccccatgtttgtgggaggaggaatttgtacagtggctaatttaaggggagtgggagaccctgtcaccctgggcactctgcgctggggagggggtttaaattattgaccttgtacagtctgcttgctggctctgaaagctggggtgggggacagagtctcaagcccttaatttattttagcaactgtgttctgtgaccctggtgtgagtaggcatcaggggtggggttgtataagttcaaaagtgtgaaatgtctggagatcatattttttatacaggtatttcaattaaatgttttggtatat

SEQ ID NO: 1087 - DNA, 2703 bp, Rattus norvegicus
  Genbank Accession No. AF087431
cgcccgcatggcccggggcgagaggcgacggcgcgctgcggccgcagagggggcgcgcccgctggagagggcgcggggtgcgggccggcgggatggcagagccggcggggcgcgcggctcggcgggcggcgcggccctggccgtggtggttttggcgctggccttcggcctgtcggggcgctgggtgctggcgtggctgggtgtgcgccgcgcgctcacactgcaccccgctccgtcagcgctaccgccggactcctccagtcctgccgtggccccggaatttttttggggtacctatcgcccacacgtctatttcggcatgaagactcgcagccccaaaccactgctcacgggactgatgtgggcgcagcaaggcgccaccccggggacccctcctaagctcaggcacacatgcgaacaaggagacggcgtgggtccctatggctgggagttccatgatggactctcctttggtcggcaacatatctatgatggggccttaaggctcaccactgagttcgtcaagagatctgggggtcatcacggaggggattggagctggagagttaccgtagagcctcaggcctcaggtacaccttccttccctttggtctccctgttcttctacgtggtaacagatgggcaagaggtcctactaccagaggttggagccaaaggacagttgaagttcatcagtgggcacaccagtgaacttggtgacttccgcctcacacttctgccaccaaccactccaggagacactgtccctaagcatggcagctacaatgtcttctggtcctccaacccagggctgcctctgctcacagacatggtaaagagccacctaaacagctggtttcatcaccggcccccaggagcctctccggaacgataccttggcttgcctggatctcttaagtgggaagagagaggccctagtgggcaagggcagttcttggtccagcaggtgacactgaaagcccctttctctgtggagtttgtgtttgaatctggcagtgccaggacaggaagagaccaagcctctgagcagctggtaggtggccaactgacccgggccctggagagccatgctgcagcattcaaggagcgttttgagaggaccttccagctaaaggagaagggcctgagccctgaggagcaggctctgggtcaggttgccctcagtggcctacttggtgggattggttacttctatggacagggtttggtgttgccagacactggcatggaagggtctgaacagaaaatggacccttccctatttccgcctgtcccccttttctctggggtcccttcccggtcattcttcccacgaggcttcctctgggatgaaggctttcaccagctagtggtccagcgatgggatccccacctcacccgggaggccctaggacactggctggggctgctcaatgctgacggttggattgggcgagagcagattctgggggatgaggccagagcccgagtgcccccggaattcctagtgcaacgtgcagcccatgccaaccctccaaccctgctcctgccagtcatacacatgctagaaggccgggcccctgaggacttggccttcctgcgcagggctttcccccgcttgcatgcctggttctcttggctccatcaaagtcaggcagggccagtgccactttcctaccgctggcggggcagggatctagctttgcctaccctacttaaccccaagacactgccctcgggcctggatgactaccccagggcctcacatccttctgcagcagagcggcacctggacctgcggtgctgggtgacattgggtgcccgggtgctgtcacagcttgcagaagagcttggggagactgaagctgctgcagagttgggcccattggctgcctctctagaagcagctggaagtctcgatgagctgcactgggctcctgagctgggtgtctttgccgactttgggaaccacacaaaagcagtacagctcaagtctaggcccccacaggggctggttagggtggtaggcaggcctccagctcgactgcagtatgtggatgccctgggctatgtctctctttttcctttgctgctacaactgctggagcccagctcaccccgcttgggacccctgctggacgttctagctgatagccgccatctctggagcccctttgggttgcgctccctttcagcctccagtctcttttataaacagcgaaatacggaacacgatccaccttactggcgaggtgcggtgtggctgaatatcaactacctggctttgggggcactacaccactatgggcgtgtggagggtcctcacaaggttcaggctgccaaactctaccgtgaacttcgggccaatgtagtaagcaacgtacggcagcaataccaggctacagggtttctgtgggaacagtacagtgaccaggatgggcggggcatgggctgccgccccttccaaggatggaccagtcttgttttactgatcatggctgaagagtactagtgggacagaaggaaagctaggcctttgtgtcacttggaatatgcagacaagggcttgggtttctggtctcagtgtttcagatcccgtaagctcatctcaggtgtctccttattgtcatcccatacagctctggggtgaacgtgaactcaaagagtctatttttctaaataaactggaaaacaacggaattc

SEQ ID NO: 1088 - DNA, 1591 bp, Rattus norvegicus
  Genbank Accession No. AF087943
ggaaagaaactgaagcctttctcggagcctgtctgggctgctcccactctcagaatctaccgaccatgaagcttatgctcggcttgttgctgttgcctttgacactggtgcatgcctctcccgccacaccagaaccctgtgagctggaccaggacgaggaaagtgtccgctgctactgcaacttctcagatccgcagcccaattggtccagcgcttttctatgcgcgggggcggaagacgtggagttctacggcggcggtcgcagcctggagtaccttctaaagcgtgtggacacggaagcaaatctggggcagtacactgatattatcaggtctctgcccttgaagaggcttactgtgcggtccgcgcgggttcctactcagattctattcggaaccctgcgtgtgctcggatattctggcctccgggaactgactcttgaaaacctcgaggtaaccggcaccgcgctttcgccgcttctggatgccaccggacccgatctcaacaccttgagcctccgcaacgtgtcgtgggcaacaacggatacctggctcgcagaactgcagcagtggctaaagcctggactcaaggtactaagtattgcccaagcacactcactcaacttttcttgcaaacaggtcggcgtcttccctgcccttgccaccttagatctgtctgacaaccctgagttgggcgagaaaggactgatctcggccctctgtccgcacaaattcccgaccctccaagttttagcgctgcgcaacgcggggatggagacgaccagcggcgtgtgctctgcgctggccgcagcaagagtgccactgcaggcactggatctcagtcacaattcactgcgggatactgctggcactccgagctgtgactggcccagtcagctaaactcgctcaatctatctttcactgggctggagcacgtacctaaagggctgccagccaagcttagcgtgcttgatctcagttacaacaggctggataggaaacctaggccagaggagctgcctgaagtggggagcctgtcacttacaggaaatccctttttgcactctgaatcccagtcggaggcgtataactctggcgtagtcatagccacagctctttcacccggatcagcgggcttgtcaggaactttggctttgctcctaggacatcgcctctttgtttaaggaacgtttgcatcttcctggtttctgagggtcctggtcaacaaatcctctgctttaaatttattaaaatcttaatccacaatgtaaggaaggacaatcaagatggctcaatgggtaaaagccaccaagcttgactcctgattttgatcctcgggatccacaccaaaggaaagaactctctcctgaaagttgtccatcggtgctcacaaataaatatatttttttttccggagctgaggaccgaacccagggccttgcgctcactaggcaagcgctctaccactgagctaaatccccaaccccacaaataaatatttttaaaaaaaaaaaaaaaaaaaaaaaaaaaaaaaaaaaaaaaaaaaaaaaaaaaaaaaaaaaaaaaaaaaaaaaaaaaaaaaaaaaaaaaa

SEQ ID NO: 1089 - DNA, 2304 bp, Rattus norvegicus
  Genbank Accession No. AF093139
attccatcctaatacgactcactatagggctcgagcggccgcccgggcaggtccaaggcgtccgggtgtttggtggcgtcaggttctgcgcctgagcccgcccctgtacctgcctgtgccatggcggacgaagggaagtcatacaacgaacatgatgaccgtgttagtttcccacaaagaagaaagaaaggtcgggggcctttccgatggaagtgtggtgtggggaatcgtaggtctggaagaggtggttctggtatacggtcttcccggtttgaggaagatgatggagatgtggcaatgaatgatccccaggatggcccccgagtgagattcaacccctataccacccgacctaaccgtcggagagatacttggcatgatcgagatcggattcatgttactgtacggagagacagagctcctcaagaaagaggaggtgctggcaccagtcaagatgggaccaccaagaactggttcaagattacaattccttatggcaaaaagtatgataaaatgtggcttctgagcatgattcaaagcaagtgcagtgtccccttcaaccccattgagtttcactatgaaaatacacgggcccatttttttgtggaaaatgccactaccgcttctgcattaaaggctgtcaactataagattcaggatcgagaaaacggaaggatatctatcatcatcaactcttctgctccaccctatattgtacagaatgaactgaagcctgaacaagtagagcagctcaagctgatcatgagcaaacgatatgatggctcccagcaagcacttgacctcaagggcctccgctcagacccagatttggtggcccagaacatcgatgttgttctaaaccgtagaggctgtatggcagccgccctgaggatcattgaagagaacattcctgagctattgtctttgaacttgagtaacaacaggctgtacaagcttgatgacatgtccagcattgtacagaaggcaccaaacttaaagatcctgaatctctctggaaacgaattgaagtccgagtgggaattagacaagataaaagggctgaagctggaagagctgtggcttgacagaaaccccatgtgtgacaccttcctagaccagtccacctatatcagcaccattcgcgaacgatttcccaagttattacgcctggatggccatgagctaccccctccaattgcctttgatgtcgaagcccctactatgttaccaccctgcaagggaagctattttggaacagagaacctaaagagtctggtcctgcacttcttgcagcagtactatgcaatttatgactcaggagaccgccagggtcttctggatgcctaccatgatggcgcctgttgctcgctaagcactccttccaaccctcagaaccctgtccgacacaacttagccaaatacttcaatgacagcagaaatgtgaagaagattaaagataccaccacgcggttccggctattaaagcatacacgtcttaatgtcgttgccttcctcaatgagttacctaaaactcaccatgacgttaactcctttgtggtagatataagtgcccaaacaagcacattgttgtgtttttctgtcaatggagtcttcaaggaagtggacgggaagtctcgagattctttacgtgctttcacgagaacgttcattgctgttcctgccagcaattcagggctatgtattgtaaatgacgaattatttgtgcggaacgccagccctgaagaaatccaaagagccttcgccatgcctgcacccacaccttcttccagcccagtacccacactctcccaagaacagcaggatatgttacaagcattttctacccagtctggcatgaacctcgagtggtctcagaagtgccttcaagacaataactgggactacaccagatctgcccaggccttcactcatctcaaggccaagggagagattccagaagtagcgtttatgaaatgatctcaagaaaagtccccttgtaaatagcccttggataatattgtctggctgtcatctgcggactcctgtccagcccgaggccacmctgtaactgtgactggggaggaagggctgcytcatccktcctcacctaccttctggaagmcttagcagaagacttccggaagattgagcctctatggtgccaggaagccaaagcttactttgtagagctdgacrctaaattaccggaaggacttaggtgctctgtgtacttaaccccagsattccctttactttttaagataaagagtgatattgtagtgtgtgtcccaaaaaaaaaaaaaa

SEQ ID NO: 1090 - DNA, 416 bp, Rattus norvegicus
  Genbank Accession No. AF093536
atctgtcagctcaactacctgggagtctcacgtcctctctgcactctggaccctgacttcaccgacatgaaaactcattactttctcctggtgatgttattttttctcttctcccagatggagctgggtgctggcattctcacaagtcttggacgcagaacagatcaataccgatgcctccaaaatggaggattctgtctccgctccagctgcccatctcataccaaactacaaggaacatgtaaaccagataagcccaactgttgcaggagttgacagtggtttgaagaatggacataaaggacagcaagggattgtaaaattagtgttttaataaatgaaatgtttttgaagtttatttacatcatctcaaaataaattttatgcctcagtttaaaaaaaaaaaaaaaaaaaaa

SEQ ID NO: 1091 - DNA, 1752 bp, Rattus norvegicus
  Genbank Accession No. AF096269
atgacaacttcgtctatcagacggcagatgaaaaacattgtgaacagttactcagaggctgaaatcaaagtccgggaagccacctccaatgacccatggggcccatccagctctctgatgactgagattgctgacctgacctataatgtggtacgcttctcggagatcatgagcatggtttggaagcggcttaatgaccatggcaagaactggcgacatgtatacaaggcgctgacactgctggactaccttatcaagacaggttctgagcgggtggcccagcagtgtcgggagaacatctttgctatacagactctgaaggacttccagtacattgaccgtgatggcaaggaccagggtattaatgttcgagagaagtcaaagcaactggttgctctcctcaaggatgaggagcggctgaaggttgagagggttcaggctctcaaaaccaaagagcgcatggctcaagtggccactggtgtgggcagcaaccagataaccttcggtcgaggctccagccagcccaacctttctatcagccactcggagcaggagtatggcaaggctgggggctcgccggcgtcctaccacggctctacttccccacgagtgtcctctgagttggagcaggcccggccacagaccagcggagaagaggagctgcagctgcaactggcacttgccatgagcagagaggttgcagaacaggaagaacgcctcaggcggggtgatgacctcaggttgcagatggctttggaagaaagccggagagacacagtaaaagttccaaaaaagaaagaggtgaaagcttgctgcaagccaggctcccactcgcagcagactaccttgttggatttaatggatgccctccccagctcaggccctgttgcacagaaaactgagccgtggagtacgggaacccctgccaaccagaccaacccctggggtggaaccgtggcacctgcgaacatttctgacccctggccttcatttggtaccaagccagctgcctctgtggacccctggggagtacctaccacagccagcatacagtctgtccccaagaactcagacccttgggcagcctcacagcagcctgcctccgatgctggaaaaacagctgatgcctggggggctgccaagcctagtcctgcctcagggtcctttgagctcttcagtaatttcaacggtacagttaaagacgatttttctgaattcgacaaccttcgaacttcaaaaaaaccagctgagtcaggggcctcagtaccaccccaggacagcagaaccacgagccctgacctctttgagtctcaatccttgacttctgcctcgagcaagcctagcagtgctcggaaaacacctgagtccttcctgggccccaatgcagcactggtgaacctggactcactggtgactaagcctgctccaccagctcagtccctcaatcccttcctggcaccaggtgctgctgctccagctcctgtcaatcccttccaggtcaaccagccccagccactgacactgaaccagcttcggggaagccctgtcctgggaagcagtgcgtcctttgggtctggtccaggggtggagacggtggctcccatgccctctgtagctccacactcagcactgggggccactggctcctcattgacaccactaggccctacagcaatgaacatggtaggcagtatgggtattcccccatcagcagctcagccagcgggcacaaccaaccctttccttctctag

SEQ ID NO: 1092 - DNA, 931 bp, Rattus norvegicus
  Genbank Accession No. AF099093
  misc_feature (1)..(931): n = a or c or g or t
agctccaccgcggtgngccgctctagaactagtggatccccgggctncaggaattcctttcccttccgggcgtgacgcctgagaggaaagccgagcggagatctcgcataggcagcgaggtgcttctcgggtctcccaagaccggcctcccgcggcttcggcgctccagtcgcggggcccgggttcctcaacacacntagcttcagccaccgtcagagcttgtcccccatccgtcgaagtcccggcggcaccgggcttcttggtggggaggatgacggagctgcagtcggcactgctactgcgaagacagctggcagaactcaacaaaaatccagtggaaggcttttcagcaggtttaatagacgacaatgatctctatcgttgggaagtccttattattggtcctccagatacactttatgaaggtggtgtttttaaggctcatctcactttcccaaaagattatcccctccgacctcctaaaatgaaattcattacagagatttggcacccaaatgttgataaaaatggtgatgtttgcatttctattcttcatgaacctggagaggataaatatggttatgagaagccagaggaacgctggctgcctatccatactgtggaaaccatcatgattagtgtcatttctatgctggcagatcctaatggagactcacctgcaaatgtagatgctgcgaaagaatggagggaagacagaaatggagaatttaaaaggaaagttgcccgctgtgtaagaaaaagccaagaaactgcttttgagtgatgtttattcaatagctagtaacttcacttatttcagggtctccaattgagaaacatggcactgtttttycttgcacctctacccaccttattgctgggacttctgttgtaacaagttggcaaactctggctggaactgggctgcaat

SEQ ID NO: 1093 - DNA, 614 bp, Rattus norvegicus
  Genbank Accession No. AF100470
ggggcaggtggcgccgcgaagatggtcgccaagcagaggatccgtatggccaacgagaagcacagcaagaacataactcagcgcggcaacgtcgctaagacctcgagaaatgcccccgaagaaaaggcgtcggtaggaccctggttattggccctcttcatttttgtcgtttgtggatctgcaattttccagattattcaaagtatcaggatgggcatgtgaagtgactgaccttgagatgtttccattctcctgtgaattttaacttgaactcattcctgatgttcgatgccctggttgaaaaacaattcagtaaatcaccctgcctcagaatgactttttcatatcaaccttcatgtgtcattccaaggtttcttcaagagtcattccaggtttgctagtccatgccacagtgccttgcaaaagcaccacatgaataaagcaaataaaatttgattaagttccagtagtagaccatacttattcagtacagaatgagttttatgtggttattaaaacttatgactaattagattaaatctgtgtagacagggatatagttttgttaacccttaatgtgtaaatgcaattagctaatttaaatttggaactta

SEQ ID NO: 1094 - DNA, 780 bp, Rattus norvegicus
  Genbank Accession No. AF150106
gacgccatgcgccctgggcgtgatggagcaccagcagcagcaactgagaaacttgcgagactttctgttggtctacaatcggatgacagaactgtgcttccagcgctgtgtgcccagcctgcaccaccgagctctggacgctgaggaggaggcctgcctgcacagctgtgctgggaagctcatccattctaaccaccgcctcatggccgcttacgtgcacctcatgcccgccctggtccagcgccgcatggcggactacgaggctgcctctgccgtgccaggtgttcctgcagaacagcccagagactcgccatcaggcagctagctagctgtccctgaccgcaggagagaaggtggttttgctgtgggcacattggtcttcaatacgatcctcctgtctcagcctcccaggaaggtggagacccaggatattgtgtgactgctgagagagctctacatcagcatctgtatgtatcccttcaataaacatgtgctgtgagttactggaattacagacatgggctacaactggttgctagataattctttaggaatataaaaattgctgaccagaagcttccctacagagtgacctgtgtacatgattaatttcactccttgacaagtacaaacgtgagtagagcagcttgtgaacttaattccccaaaccaggaaggtggagacccaggatattgtgtgactgctgagagagctctacatcagcatctgtatgtatcccttcaataaacatgtgctgtgaaaaaaaaaaaaaaaaaaaaa

SEQ ID NO: 1095 - DNA, 1885 bp, Rattus norvegicus
  Genbank Accession No. AF159245
ccaggaccatggatcccagtgtcctgctcctttttgctcttctcacaggcttcttgctactcttgatcaggggccagggaaacggatatggccatcttccaccaggaccctgtcccctgcccctcttggggaacgttttgcaaatggacagaagaggtctcctcaagtcttttattcagcttcgtgacaaatatggagatgtggttacagtgcacttgggaccaaggcccatagtcatgctgtatgggaccgagaccataagggaagctctggtggaccatgctgaggctttctctggccggggaacagttgctgtggttcagccaattatacaggactatggtatgatctttgccaatggggaacgttggaagatccttcggcgattctctctagccaccatgagagactttgggatgggaaagcgaagtgtggaggagaggataaaggaggaggcccaatgtttggtggaggaactgaagaaatacaagggagccccactggaccccaccttccacctacagtgcattacagccaacatcatctgctccattgtctttggagaacgttttgactacacagaccaccagtttctgcacctgctcgacctgttctatgagatcttgtcacttgttagctcattctccagccaggtgtttgagcttttcactggcttcctgaagtactttcctggcacccacagacacatctccaaaaacatagaggaaatcctcaacttcattggccattgtgtggagaagcacagggccacattagaccccagcactccacgagacttcatagatacctaccttctcagaatggagaaggagaaattaaaccaccacacagaattccatcaccagaacctcatgatgtctgtgctctctctcttctttgctggcactgagaccagcagcaccacacttcgctatggtttcctgctcatgctcaagtacccccatgttgcagagaaagttcaaaaggagattgatcaggtgattggctcacaccgggtcccaacccttgatgaccgcatcaaaatgccatacactgatgcagtcatccatgagattcagagattttcagatcttgtcccgattggtctgccacacagagtcaccaaagacacattgttccgagggtacctgctccccaagaacattgaggtgtaccccatcctgagttcagcactccatgatccacagtactttgaacacccggacaccttcaatcctgagcacttcctggatgccaatggggcactgaagaagaatgaagcttttctgcccttctccacaggaaagcgtgtttgtcttggtgaaggcattgcccgcaatgagttgttccttttcttcacaaccatcctccagaacttctcagtgtccagccctgtgtctcctaaggacattgatctcactcccaaggagagtggctttgccaaaatacctccaacataccagatctgcttcttatctcgccaattgggctgaggcaaacaagtatctcatctgttgagaatagctttatctttgtgcctcagagagagcagctggaatccaggcccagggtcactgctcacacccttactcctactgcagttctctaatccccagtgtgtgttcatctcctgtgaatggaatggagaaatcaatcaactgtctttcttggtgtatgaacagagacttctgaaggtcacttctcatcctgaatcacttccatcttcctcccaacagcccaagacctcacttatcatctctccacagttcatggtttatgctaattcactctgtataaggtttggattctatgtctacaatcttgcctagtatgtacggttcaaataaacagaatcaccgagtgtgtgaaaaaaaaaaaaaaaaaa

SEQ ID NO: 1096 - DNA, 1393 bp, Rattus norvegicus
  Genbank Accession No. AF207605
ccagggcagacactagataatccggagcgcggccctggaattgggcagacagcgggactgagactgaagctggggcagtgagcacgcggagaccgccgtcccttggactacggcttgtggcggctgcggggcgcgctgcccttcgccatgtacaccttcgtggtgcgccaggagaatagcagcgtctacgccgaggtctcccggctgctgctggccaccggctactggaagaggctgcggcgggacaaccccaggttcaacctgatgctgggcggaaggaaccgactgcctttcgggagactaggacacgaacctgggctggcacagctggtgaactactacaggggggccgacaaactgtgccgcaaagcttccttagtgaagctagtcaagaccagtccggaactgtctgagtcctgctcatggttccccgagtcctatgtgattcatccaactaacctcaagacgccagtcgctccagcgcagaatggcatccagcttccggtcagtaactccaggacagatgagagagaattcttcttggcttcttataacagaaagaaagaggacggggaaggcaacgtttggattgcaaagtcatcagctggtgccaaaggcgaaggcatcctcatctcctcagaggcgtcagagcttctggattttatagacaaccagggccaagtgcacgtgatccagaaatacctcgagcaccctctgctcctcgagcccggtcaccgcaagtttgacattcgaagctgggtcctggttgaccaccagtataacatctacctctacagagagggtgtgcttcgaactgcttcagaaccatatcatgttgataacttccaagataagacctgccatctgaccaatcactgcattcagaaagagtactcaaagaactatggaaaatacgaagaagggaacgaaatgttcttcgaagagttcaatcagtacctaacaagcgctctgaacattaccctagaaaatagcatcttgctgcaaatcaaacacataataaggagctgcctcatgagcgtggagcccgccatcagcaccaagcacctcccttaccagagcttccagctccttggctttgacttcatggtggatgaggagctgaaagtctggctcattgaggtcaacggtgcccctgcgtgtgcccagaagctctatgcagaactgtgtcagggcatcgtggacatagccatatccagcgtcttcccacccccagacacggagcaggtgccgcagcagccggctgctttcatgaagctgtgaaggactggaaggcacagagccaccttgggaaatgtatggggtctgctccagaggaacgtgagatggctggactgctcctgaccaaggcatctggggaaccagatgtcaggaa

SEQ ID NO: 1097 - DNA, 3059 bp, Rattus norvegicus
  Genbank Accession No. AF227200
  misc_feature (1)..(3059): n = a or c or g or t
gcgctcccccttcttctgacccccggcccggcggcgcccgccttctccgcagccactccgtctcttccctcccccggtctttctttcctcgccctcttcttttgcttttcttcctcgccgccgcccaataccgccggccccgggacgagctctggggaagcagccagaaagtatagcttctaccattgagctcaatgcactgtgcgtgaaactggaaagaaaaccaatgtataagcccgtggacccccactctcggatgcagtccacctacagctatggcatgcgtggaggtgcctatccccccagatacttttacccatttccagttccaccgttactctaccaagttgagctctccgtgggaggacagcagtttaatgggaagggaaagatgagaccacctgtgaaacatgatgccactgcccgagccctgaggactctgcagagtgagcccctaccagagaggctagaggtaaatggaagagaatcagaagaagaaaaccttaataaatcagaaataagccaagtgtttgagattgcgctgaagcggaatttgcctgtgaattttgagtctttccctctgacacaggtggcccgggagagtggcccgccacacatgaagaactttgtgaccagggtttcagttggggagtttgtaggggaaggagaagggaaaagcaagaagatctccaagaagaatgcggcaagggccgtgctggagcagctaaggaggctgccacctctacctgctgtggagcgagtgaagcccagaatcaagaagaaaagtcagcccacctgcaagctacagactgcccccgactatggccaagggatgaatcctattagcagactggcacagatccagcaggcaaaaaaggagaaggagccggagtacatgctccttacagaacgaggtcttccacgtcgcagggagtttgtgatgcaggtgaaggttgggcatcacaccgcagaaggagcaggtaccaataagaaggtggccaagcgcaatgctgctgagaacatgctggagatcctggggttcaaagtcccccaggcgcagcctgccaagccagcactcaaatcagaagagaagactccagtaaagaaaccaggagatggaaggaaagtaacattttttgaacctagccctggggatgaaaatggaaccagtaataaagaggatgagttcaggatgccctatcttagccatcagcagctgccagccgggattctccccatggtgccagaggttgcccaggctgtcggggttagtcaaggacaccataccaaagatttcgccagggcagctccaaatcctgccaaggccacggtaactgccatgatagcccgagaattgttgtacgggggcacctcgcccacagccgagaccattttaaagagtaacatctcttcaggacatgtaccccatggacctcgcacaagaccctctgagcaactgtactacctttccagagcccagggattccaggttgaatacaaagacttccccaagaacaacaagaacgagtgtgtatctctcatcaactgctcttcacagccacctctcgtcagccatggcatcggcaaggatgtggagtcctgtcatgatatggctgcactgaacatcttaaagctgctgtctgagttggaccaacagagcacagagatgccaaggacaggaaacggaccagtttcagcgtgcgggaggtgctgaacctattctggccatgaaccattataaaacccaacatatataccgaaaatactgagaactgctttgaaaatttggaatttctgataactccagtgggccaagacatggtggataaaaaaatgtggcaaagaagaaaaggaactgcaggtggtggccttggttgggctgggctgctggtgacgctgtgctccgccatccaccaggagaccagcagctccagtgtctccagctttttttttgcctcgtgacagagaaacggagagcgtggccaactctcacgctggcttcttcagattctttggaaaaccgggacagccacaccagagaggccttacagcggccccggagctaaacgcaccagagaaaaaccagtgcttcctacatgactgacgcaactctgccacacgtagcacccaccgtaaccactgctttctcttcaacagtgatggatgcctgttagttccattattccctttggttgagatgacactatgtaattttcatttcagtttctcagttgcatctacttacctagcagtttagaaactagtctgagacagatgctatccagctatgtaactggcaaagaccacagccctgtttggtgatgcnttctgtgcctctggctcggctggcagttctggacttanccacaagaatccttgactcccaaccccttgtataaattggacagcttaggacttttaaactttaggagatcaaaagatttggtcctttttaactttatttttaagcagcatacttaaaagtgagcctgacctttaccagttataacagattgtcaacgggagaggttgtcacccattttaacagattgccagtgggaggtcacttgagggagtattgctcaaggtggctttttctacacactacaggacattacctgtgggcccagaagactatgggctggtgtccctggagggcccaatacagtcaatcccagcctccacgtagggaagggcgacaggtttcctggtgctgtgctagtgtgcacagaggcaggaaggtctgccggcctggtgtggagcattgtggctccgagtgcaaccctgctgctcccactcggggtttagctggaccttttcacccatggaatataaggaaacttagtctttgtcaccaataaatgagaatactaaattttttttgttaatttattttcaaatgtcactacttctagatcaatctccttctggttcatccccttccccacctttttttaaaagaagagaatatttgtaatgcttgtgattctgtctgggcaaaaatctgaagatctaaaatctctttatattaaactattgatcaataaacagctactaag

SEQ ID NO: 1098 - DNA, 2100 bp, Rattus norvegicus
  Genbank Accession No. AF245227
aattcggcacgagcagagctcacgttgcattgaagacgaaacctcggggaggtctggagctgtctttccttccctccctacccggcggctcctccactcttgctacctgcagggatcagcggacagcatcctctgaagaagacaaggttccttaactaagcaccactgacttgctggccccggcgcccagcaaccccccaccactaccatggccgaggacgcagacatgcgtaatgaactggaggagatgcagaggagggctgaccagctggctgatgagtccctggaaagcacccgtcgcatgctgcagctggtcgaagagagtaaagatgctggcatcaggactttggttatgttggatgagcaaggcgaacaactggaacgcattgaggaagggatggaccaaatcaataaggatatgaaagaagcagaaaagaatttgacggacctaggaaaattctgcgggctttgtgtgtgtccctgtaacaagcttaaatccagtgatgcttacaaaaaagcctggggcaataatcaggatggagtagtggccagccagcctgcccgtgtggtggatgaacgggagcagatggccatcagtggtggcttcatccgcagggtaacaaacgatgcccgggaaaatgaaatggatgaaaacctagagcaggtgagcggcatcatcggaaacctccgtcatatggccctagacatgggcaatgagattgacacccagaatcgccagattgacaggatcatggagaaggctgactccaacaaaaccagaattgatgaagccaaccaacgtgcaacaaagatgctgggaagtggttaaatctgcccttctgctgtgctctcctccaatgttgttggacaagagagaagagagctccttcatgcttctctcatggtattacctagtaagacttacacacacacacacacacacacacacacacacacacacacacacacacacacacacagagtcagtcacccccattgtaaatgtcctgtgtggtttgtcagcttcccaatgataccatgtgtcttttgttttctccggctctctttctttccaaaggttgtacatagtggtcatctggtgactctatttcctgacttaagatcttgggtctctctcttttttcctttttcttttctcagtggcgtttgctgaatgacaacaatttaggaatgctcaatgtactgttgatttttctcaatacacagtattgttcttgtaaaactgtgacattccacagagctactaccacagtcctttcttagggtgtcaggctctgaatctctccaaatgtgctgtctttggttcctcatggctattctttgtctttatgatttcataattagacaatgtgaaattacataacaggcattgcactaaaagtgatgtgatttatgcatttatgcatgagaactaaatagacttttagattcctacttaaacaaaaactttccatgacagtagcatactgacaagaaaacacacacaacagcaacaataacaaagcaacaactacgcatgctcagtattgggacactgtcaagattaagtcataccagcaaaacctgcagctgtgtcaccttcttctgtcaacatacagactgatcataatcatcccttctttacacacacacacacacacacacacacacacacacacacaaatggatttaacacaccattaatcatttctagcaaaatatatgtttggctgaaactatgtgaaatgggtgtaatatagggtttgtcgaatgcttttgaaagctctgttttggagacaatactcttgtggaaaacgtgaagatcttctaagtctggctcttgttgatcaccatctccctgtggtttgtcatcagtacaactctttgttgcttaatctagagctatgcacaaccaaattgctgagatgtttagatgctgataaagaaacctttaaaaaattatataaatgaatgaaatatagataaactgtgagataaatatcattacagcatgtatattaaatccctcctgtctcctctgttggtttgtgaagtgatttgacattttgtagctagtttaaaattattaaaaattataga

SEQ ID NO: 1099 - DNA, 1895 bp, Rattus norvegicus
  Genbank Accession No. AF276998
gcccagcgcagtggatagcgaagctgttcccagcggagttgcggcgcccgtcgcgtcgggattgaaactgtaatgggcaccgaggggaaagccgggagcaaactgttgtttctcttcacgtctatgatcctgggctccttggtgcaaggcaagggttcggtgtacagtcctcagactgccgtccaggttcctgagaacgactctgtcaagttgccctgtatctactctggcttctcctcaccccgcgtggagtggaagttcgtccaaggcagcaccactgcgcttgtgtgctataacaaccagatcacagttccctatgcagaccgcgtcaccttctcatccagtggcatcaccttcagctctgtgacccggaaagacaatggagagtatacttgcatggtctctgaggacgggggtcagaactacggggaggtcagcatccacctcactgtgcttgtgcctccatccaagccgacagtcagtatcccctcctctgtcaccattgggaacagggcagtgctgacctgctcagaacacgacggttcccctccttctgaatattcctggttcaaggatggggtacctatgcttacagcagatgccaagaaaacccgtgccttcatcaattcttcatacaccatcgatccaaagtcaggggatttggtctttgaccctgtgtcagcctttgatagtggcgaatactactgcgaggcacagaacgggtatgggacagccatgaggtcagaggctgtacgcatggaggctgtggagctgaatgtggggggcatcgtggcagctgtcctggtaacactgattctccttggactcctgatttttggcatctggtttgcctatagccgtggatactttgaaagaacaaagaaagggactgcaccgggtaagaaggtcatttacagccagcccagtgctcgcagtgagggagaattcaaacagacctcgtcattcctggtgtgacctgctggggctcatctcatgtccacttgccttactcaggtgctacaagttccagcccctgctggctgtagctgcactggatgccttcaatgtcttctaggtcccccgggaccccttgcttttattctagctaggatatgaatttaataacatcagctacttctccctcctctttcccgccctccctcctttccttaccaccattgcgtggcctgagactagttacaaagttttcattccccattcctatgtgggattggacaagagtcctagactaggcagtaataatgactgggctgacaggagcccaaaaccactacctgcctgtaaaggcctctccataaggactttgagcctagcttcccagctttcctccccgggcggagtgccagttgctctagagtggggactggaggaagatgggctgaggcatttgatggtgacctcaggtgtctagcctctggagcctgctctttgtctcaaaatgtgccactgggattctcctggatacaagtaaactgacaccgtgtccgaacaaggtgggagagctcggttaactcccaagagacttggagtgagaaagatttaaagcgatctaaggagaaaaggctggaactggtggctgttagtcacttcatttggctggaactactgcacagacccttgtaagatttatatggatcgaggagatgtgtgtgttaatagtctcgtctctttgatggtgtgtgtgtgtgtgtgtgtgtgtgtgtgtgtgtggagagagagagagagagagagagagagagagagtgagattgagattctatattgaaattgattgttatatagaagggctttctagctctttggcaaggttgtgtttatatctgacagatgttgctggaaataaaaacttgatttgacaaaaaaaaaaaaaaaaa

SEQ ID NO: 1100 - DNA, 861 bp, Rattus norvegicus
  Genbank Accession No. AF286535
cgaaagtggagcaaggccggagctttgaccataaagcccaaggcggcggcgttggcgacggtgtttggggctggcagctccgaggagcctgctggagccggagtcgaacctctctgtcgcggcctgcgttgtgtctcctcctctgttgaccctgcgcttcaaggatgacctctaggaagaaagtgttgctgaaggtcatcatcctgggagactctggtgttggaaagacatcgctcatgaaccagtatgtgaataagaagttcagtaaccagtacaaagccacaataggagcagactttctgaccaaggaggtgatggtggatgacagacttgttaccatgcagatctgggacacagctggtcaagaacggttccagtctcttggtgtggccttctacagaggtgcagattgctgcgttctggtgtttgatgtgactgcccccaacacattcaaaacccttgacagctggagagacgagtttctcatccaggccagcccccgggatcctgagaacttcccttttgttgtgttgggaaacaagattgacctggaaaacagacaagtggccacaaagagggcacaggcttggtgctacagcaaaaacaacattccttacttcgagaccagtgccaaggaggccatcaatgtggaacaggccttccagacaattgctcggaatgcccttaaacaggaaacggaagtggagctgtacaatgaattccctgaacccatcaaactggacaagaacgagcgggccaaggcctccgcagagagctgcagctgttgaagaggcagtgagcacagagcacagagtccttcacagaccaagaacacacacgtaggccttcaacacgcgtccc

SEQ ID NO: 1101 - DNA, 2117 bp, Rattus norvegicus
  Genbank Accession No. AF290895
ttctccgggggtcccccggagctggaacccttcttcttcttcattatttggtcggtcgggcgtccacgggcgtggacatgccggagatcagcctccgccacgtcgtgtcctgcagcagccaggactcgacccatcgtgccgaaaatcttctcaaggctgacacttaccggaagtggcggtcagccaaggcaggagagaagaccatctctgtggtcctacagttggagaaggaggaacagatacacagtgtggacattggaaacgatggctcggccttcgtggaggtgctagtgggcagctcggctggaggggccacagctggtgaacaggactatgaggtccttctggtcacctcctctttcatgtccccatctgagagccgaagtggctcgaatcccaaccgtgttcgcatttttggacctgacaagttagtccgggcagcagcagagaagcgctgggaccgagttaaaatcgtgtgcagccagccatacagcaaggactcaccctacggcctgagttttgtgaagtttcacagccctccagacaaagacgaggcggaggctccatctcagaaggtgacagtgaccaagctcggccagttccgtgtgaaagaggaggatgacagtgccaactccctgaggccaggggcgctcttcttcaatcggatcaacaaggcggcttcagcctctgcaagtgacccggcaggacccagctatgcagcggctacgctgcaggcctctagtgcggcctcctcagccttgccagtccccaaggttgggggcagctcttccaagcttcaggagcctcccaaagggaagaggaaactggacttgggtctagaagacagcaagcctccgagcaaaccctcagcagggcccgctgccctcaagagacccaagttgcctgttcctagccgtaccccagctgcaactccagcctctaccccagcacagaaagccgtcccagggaagccccggggagaaggcacagagcctaggggagctcgcgctggaccccaggagcttggcaagatcctgcagggggtggtggtggtgctcagtggcttccagaaccccttccgttcagagctccgggacaaggccctggagctgggggccaagtatcggccagactggaccccggacagcacacacctcatctgtgcctttgctaacactcccaagtacagccaggtcctgggcctcggaggccgtattgttcgtaaagagtgggtgctggactgttaccgcatgcggcgccggctgccctcccggaggtacctcatggcaggccttggatccagcagtgaggacgagggggactctcacagtgagagcggtgaagatgaagctcccaagcttccccggaagaggccccagcccaaagccaagacccaggcagcaggacccagctcacccccgaggccaccaaccccagaagagaccaaagcaccatcaccaggaccccaggacaatagtgacactgatggggaacagtcagaaggacgggacaatggggcggaagattctggggacaccgaagatgaactgaggagggtggccaagcagagggagcaaaggcagcccccagccccagaggagaatggcgaggacccgtatgcaggctccacagatgagaacacagacagcgaggctccctcagaggctgacctgccaattccagagctcccagacttcttccagggcaagcacttcttcctgtacggcgagttccctggggatgagaggaggaagctcatccgatatgtgacagctttcaatggtgagctcgaggactacatgagcgaccgggtccagtttgtcatcacggcccaggagtgggatcccaactttgaggaggccctgatggaaaatccttccctggccttcgtccggccccgctggatctacagttgtaatgagaagcagaagttactcccccaccagctctatggggtggtgccccaggcctgaatgtacacctgtgtatgcgcatgcatacacttatgcacatgtatgcacaggcctgggtgcacacgtgtgcacacagatgagtttaataaaggagactttgtttgaagcagaaaaaaaaaaaaaaaaaaaaaaaaaaaaaaaaaa

SEQ ID NO: 1102 - DNA, 2642 bp, Rattus norvegicus
  Genbank Accession No. AF333325
gcgctgttgtctgctgaactggtcagagtctagctcctgggaagccccgctgtgtgctttgccaagatgaggtgtgtgttggtggccactgagggcgcagaggtcctcttctactggacggatgaggaatttgaggagaacctccggcagaagttcaggcagtcagagaatgaggaagaggagctccctgtgctggaggaccaactcaacaccctcctggctccggtcatcatctcttacatgacgatgctggagaagctctcggacacgtacacctgcttctcaacagaaaacggcgaccacctgtatgtcctgcatctgtttggagagtgcctgttcatcgccatcaatggagaccacagtgagaacgaaggggacctgcggaggaagctgtgcgtgctcaagtacctgtttgaggtgcacttcgggctggtgactgtggacagccagctcatccggaaggagcttcgtccccctgacctggaacagcgtgcccaggtgtggaagcactttcaaagactgctggggacctacagtcgcctgcgtgaacaggagcagagctttgctgtggaggctgtggagcggctcattcacgcccagctctgcgaactgagcatcgagaccctggagcgacatgtggttcaagcggtcaactccagccctgagcggggcggtgaggaggtcctgcatgccttcctgcttgtgcactgtaagctgctggctttctactccagccatgttgcgagcgccctgcgccctgcagatctcctggccctcatccttctggttcaggacctccagccctcccaaggcaccaccgaggaggaggaggatggcaatgacggccctcagcctttcccccataggagacccatgagcagccagaacatcccagtccagcagtcgaggagccagagcacctcagttcccaccaggagttccaaggagacagacacagacagcatctccctccctgaggagtacttcacccctgctccttccccgggcgagcagagttcaggtagcctcgtctggctggatggtggcaccccgcccagcgacgtccttcagatggctgaggacaccctcaacgggctggcgccacactccccagagcttcccaggcccagaaggatcttcctggatgccaacataaaagaaaactactgtcccttggtgccccacaccatgtactgcctgcccctgtggccgggcatcagcatggtgctgctgaccaagagtcccagcaccccactggccctgatcctgtaccaactgctagatggcttctcgctactggagaaaaagctgaaggaaggtcaggaggccggaagtgccctgcggtcccagccctttgttggagacctgcgccagaagatggacaagtttatcaagaatcgagttgggcaggagattcagaacgcctggctggagttcaaaagcaaagccttctctagaagtgaaccaggatcgtcctgggagctgcttcagatctgtggaaagctgaagcgacagctgtgtgccatctaccggctaaacttcctggccactgcacccagcaggggaggcccacacctgccccagcacctgcaaagccaagcccagaaactcatgaaggagcgacttcaggactggaaggacttcctgttggtgaagagctggagaaatgtcaccatagtgtcctacctggaggatttcccaggcctggtccacttcatctatgtggaccgtacgacagggcagatggtggctccttctctcagccccagtgaaaaaatgtcttctgagttgggcaaggggcccctggctgccttcgtcaaagccaaggtctgggctctgatccgactggcacgcaggtacctgcagaagggctgcaccacgctgctattccaggaaggggacttccgctgctcctacttcctgtggttcgagaacgacatgggatacaaactgcagatgatcgaggtgcctgtcctctccgatgactcagtccccattggcgtgctgggaggtgactactacaggaagctccttcgttactacagcaagagccgcccctcggagccggtcaggtgctatgagctgctgacactgcacctgtccgtcatccccactgacctgctggtgcagcaggccaaccagctcgcccggcgcctgggggaggcctcccgggtgaccctgccctaggccttcttgcttgcagacattcaccatagctaggcttcttccggtcccttctcccataccccactgtggactcctccacacaagctaatgagcaagccttctctgaagggaggggtgccacatttctgtcggcccccagaaccgtgtggtcagagatggcagcagctgctctggaaaactgcccctctgggtgcccagcagagcggaaggaagtcttagtactcaggctgtgtgaggtcaccgccctcctgccgtcctgcacagggtagctgttttcctaccctgactggaaggtgctccctctggctggtctacattccagcttggcccctgcccccttgcaactgggccagtgctgtctcctcacatttgaaccgacaacacctacctcagggtggtcaggaggattgctggacatgctcagatgctcaataaatgttggctcttgtcattaa

SEQ ID NO: 1103 - DNA, 2303 bp, Rattus norvegicus
  Genbank Accession No. AF336828
cgatgcctacctctgtgccccgcggggcgcctttccttctcctaccacctttactgatgctgtctgctgtgctggcagtgcctgtggaccgcgcagcacctcatcaggaggacaaccaggccactgagaccccggacacaggcctgtactaccatcggtacctccaggaggtcatcaacgtgctagagacagatgggcacttccgggagaagctgcaagctgccaacgctgaggacattaagagtggaaagctgagtcaagagctggacttcgtcagccacaacgtccgcaccaagctggatgagctcaagcgacaggaggtatcaaggcttcggatgctgctcaaggccaagatggatgcaaagcaggagcctaacttgcaggtggaccacatgaaccttctgaagcagtttgaacacctggaccctcagaaccagcacacgtttgaggctcgggacctagagctgctgatccagacggccacccgagacctcgcccagtatgacgctgcacaccatgaagagttcaaacgctacgagatgctcaaggaacatgagcgaagacgttacctggagtctctgggagaggagcagcggaaggaggctgagaggaagctacaagagcagcagcgcagacaccgggaacaccccaaagtcaatgttcctggcagccaagcccagttgaaggaggtgtgggaggagctagatggattggaccccaacaggttcaaccccaagaccttcttcatactgcatgacatcaacagcgatggtgtcctagatgagcaagaactggaagctctgtttaccaaggagctggagaaggtgtacgacccgaagaacgaggaggacgacatgagggagatggaggaggagcggctgcgcatgcgggagcatgtgatgaagaacgtggacaccaaccaggaccgacttgtgaccctggaggaattcctggcatccacacagaggaaggagtttggggaaactgcggagggatggaagacagtggaaatgtatccagcctacacagaggaagagctgaagcgttttgaagaggagcttgctgcccgggaggctgagctaaatgccagagcccagcgcctcagccaggagacagaggccctggggcgctcccaggaccgcctagaggctcagaagagagagctgcagcaggccgttctgcagatggagcaaaggaagcagcaacagcaagagcagagcgctccgccttcccaacctgatgggcagctgcagttccgtgcagacacaggggatgctcctgtcccagctccagcaggtgaccagaaagacgtgcctgcttctgaaaagaaggttccagagcagccccctgtgctgccacagctggattctcagcatttataagccctcagagatcccggccctcaagttcccacagacagtgatggaagctggatgaagtgtccttgcagcctttctggagaccaaagccttcatggcctccaggggagaacagggccaccctgttcctcagatgcgcttctgcccatgtctaccagtctgttctcacagcctctgggtcccagtcctgccttcctccctcccttccttggcagggactcaactgcaggagcccctcaccccacctgagtgcacaccccaggcctgcctgccttccatgctttgctcttacctgtcccaggctcaacctttctgcttcctgtacctgtcagtgggtcacaggagcttgacttggtctctccaactctttgccttgtgagaggccaatgatctcaattccttttggtggctagaggccgccacaatgtggggtgtcctatcagctctgcctgggactcctgaactccaccaccaccccaccagccttaccctaaccacctgggcccaatacctacctgagggtcccagaaggggcccagatatggctacaccccttactgaggtccagcctcactcagccccctatgggggctcctgaaaattggttcacccacttccctggcttcaggccacactgctgtgtcctgctctgtgtcccagtctcatccaactatagcctggcacaaataaacattagcatatctgtgtgaatgtactgccctcttgcaagtccccctgcatgccacctgctcgactccctggtgtcctgtggcacatacttccactgccaggaggcttgccgggggctttctgtgtgctcttgccagaatggcctccttgcttcatttttgccatggaaacagaaaacccaaacctgagcttgaaaaaaaattaatatcttaaataattaaaatatatatatgt

SEQ ID NO: 1104 - DNA, 2393 bp, Rattus norvegicus
  Genbank Accession No. AF390546
atcttcgttgacttcggggtttgggtacccctctctcttcttcggactccggaggaccttctgggcccccacattaatgaggcagccacctggcgagtctgacatggctgtcagcgacgctctgctcccgtccttctccacgttcgcgtccggcccggcgggaagggagaagacactgcgtccagcaggtgccccgactaaccgttggcgagaggaactctctcacatgaagcgacttcccccacttcccggccgcccctacgacctggcggcgacggtggccacagacctggaaagtggtggagctggtgcagcttgcagcagtaacaacccggccctaccccggagggagaccgaggagttcaacgatctcctggacctagactttatcctttccaactcgctatcccaccaggaatcggtggccgccaccgtgaccacctcggcgtcagcttcatcctcgtcttccccagctagcagcggccctgccagcgcgccctccacctgcagcttcagctatccgatccgggccgggggtgacccgggcgtggctgcgggcaacacaggtggagggctcctctacagccgagaatctgcgccacctcccacggcccccttcaacctggcggacatcaatgacgtgagcccctcgggcggcttcgtggctgagctcctgcggccggagttggacccagtatacattccgccacagcagcctcagccgccaggtggcgggctgatgggcaagtttgtgctgaaggcgtctctgagcacccctggcagcgagtacaccagcccttcggtcatcagtgttagcaaaggaagcccagacggcagccaccctgtggtagtggcgccctacagcggtggcccgccgcgtatgtgccccaagattaagcaagaggccgtcccgtcctgcacggtcagccggtccctagaggcccacttgagcgctggaccccagctcagcaacggccacaggcccaacacacacgacttccccctggggcggcagctccccaccaggactacccctacactgagtcccgaggaactgctgaacagcagggactgtcaccctggcctgcctcttcccccaggattccatccccatccggggcccagctaccctcctttcctgccagaccagatgcagtcgcaagtcccctctctccattatcaagagctcatgccaccgggatcctgcctgccagaggagcccaagccaaagaggggaagaaggtcttggccccggaaaagaacagccacccacacttgtgactatgcaggctgtggcaaaacctatacgaagagttctcatctcaaggcacacctgcgaactcacacaggcgagaaaccttaccactgtgactgggacggctgtgggtggaaattcgcccgctcagatgaactgaccaggcactaccgcaaacacaccgggcaccggccctttcagtgccagaagtgcgacagggccttttccaggtcggaccaccttgccttacacatgaagaggcacttttaaattccacatcgtggacatgacccacactgccaggagagagttcagtatttttttttaacctttcacactgtcttcccacgaggggaggagcccagctggcaagcgctacaatcatggtcaagttcccagcaagtcagcttgtgaatggataatcaggagaaaggaagagtccaagggacaaaagaaaagaaaagaaaaaaatactaaaaaacaaacaaacaaaaaaaaaaaacaaaagaaaaaaatcacagaacagatggggtctgagactggatcttctatcattccaataccaaatccgacttgaacaagactggacttacaaaatgccaaggggtgactggaagtttgtggatatcagggtatacattaaatcagtgacctggggggagggaagaccagagttcccttgaattgtgcttcaatgatgcaatatacatggaaagaccaccttgtatgctctttgccttctaaaaagccattatgacgtcagaggaagaggaagcaattcaggtacagaacgtgttctaatagcctaaacgatggtgcttggtgagtcgtggttctaaaggtaccaaacgggggagccaaagttctccaactgctgcatactttgacaaggaaaatctatttttgtcttccgatctacatttatgacctaagtcaggtaaataagcctggtttatttctgtaacattttttatgcagacagtctgttatgcactgtggtttcagatgtgcaataatttgtacaatggtttattcccaagtatgcctttaagcagaacaaatgtgtttttctatatagttccttgccttaataaatatgtaatataaatttaaaaaaaaaaaaaaaaaaaaaaaaaaa

SEQ ID NO: 1105 - DNA, 2284 bp, Rattus norvegicus
  Genbank Accession No. AF461736
ggcacgagggagagctaccatgtccgtggtgtgccggagctcatgttcgcttctgcttcttccgtgccttctgctgtgtgtgttgggtccctctgcgtcccatgctgggaagctgttagtgatccccatagatggcagccactggctgagtatgctcggagttattcagcagctccagcaaaaggggcacgaagtggtggtcatagcacctgaagcttcgatacacataaaagaaggatcattttacactatgaggaagtaccctgtgccattccaaaatgaaaacgtgacagctgcttttgtggaacttgggcggagtgtctttgatcaagatccttttctgctgcgtgtggttaaaacatacaacaaagtcaaaagggactccagtatgctgctgtctggctgctcccaccttctgcacaatgccgagtttatggcctctctggaacaaagccactttgatgctctgctgacagaccctttccttccgtgcggctccattgtggcccagtacctgtctctgcctgctgtgtacttcttgaatgcattgccatgcagcctggatttggaagccacccaatgccctgctccgttgtcctacgtgcccaagagtttgtcctcgaacacagatcgcatgaacttcctgcagcgggtgaagaacatgattattgctttgacagagaactttctatgcagagtggtttactccccctatgggtcacttgccactgaaatcttacagaaagaggtgactgtcaaggaccttctgagtcctgcatctatctggctgatgagaaatgactttgtgaaagattaccccaggcccatcatgcccaacatggtttttattggtgggataaactgccttcagaaaaaagccctatcccaggaatttgaagcctatgtcaacgcctccggagaacatggcatcgtggttttctctttgggatccatggtctcagagattccagagaagaaagcgatggaaatcgctgaggctttgggcagaattcctcagacggtcctgtggcgctacaccggaactagaccatcgaaccttgcaaagaacactattcttgtcaaatggctaccccaaaacgatctgcttggtcatccaaaggctcgggcgttcatcacacactccggttcccatggtatttatgaaggaatatgcaatggggttccaatggtgatgatgcccttgtttggtgatcagatggacaacgccaagcgcatggaaactcggggagctggggtgaccctgaatgtcctggaaatgactgccgatgatttggaaaacgcccttaaaactgtcatcaataacaagagttacaaggagaacatcatgcgcctctccagccttcacaaggaccgtcctatcgagcctctggacctggctgtgttctgggtggagtacgtgatgaggcacaagggggcgccacacctgcgccccgccgcccacgacctcacctggtaccagtaccactccttggacgtgattggctttctcctggccatcgtgttgacggtggtcttcattgtctataaaagttgtgcctatggctgccggaaatgctttgggggaaagggtcgagtgaagaaatcacacaaatccaagacccactgagaagtggcaggaagtgaaggagaagtattagtcccttatccaatcagttgaaacttggaaacaagtgttaaatccatgttgcttttattagggaaataattcaccatacactatacacccagaacatttttttttctttttctttttttcggagctggggaccgaacccagaacattttttttttaaataaaaacaatctaattgctggccacacccatcagggaagatactggaatatgtgatctgtttctccagtatcttcagtctggacaatgactgccatctgttggtaacttacagaaagtttagtgttctgttctgccttcagtgacagcaccacagtttcccttactcctgtcagctaatggcttcctcccctggattctcagaccagtgtggccttcccagtgttagtcattcctcactgtgctcatgttttgtgggtggcacggcctttgagctttgggagaaaacaagatgaggctgtgacactggtggccctgtgtttgagataataattattgcttgtctctgaatttgatgaaaactgaagtacattctaaagaaagtatgtcttctattgtgttcccaaaccaagaacttgtcaataaattcatataaattgtattattacttttaaaaaaaaaaaaaaaaaa

SEQ ID NO: 1106 - DNA, 2282 bp, Rattus norvegicus
  Genbank Accession No. AF461738
ggcacgagagcagctgtcttgccttggtctgcacttctcccatggctcctgcagacattccagcctctcttcctctcggtctgtgcctgctgctggcctctggctttgggcatgcaggcaagctgctggtggtgcccatggatggcagccactggttcaccatgcagatggttgtggagaagctccttcccaaaggccatgaggtggtggtggttgttccagaggtcagttggcagctgggaaaaccactgaattttacggtgaaaacgtattcagtttctcacactcaggaggatttaaatcgggagttcaagttttttattgattctcagtggaaaactcaacaagagggcggagttcttcctctactgactagccctgcccagggtttcttcgaattactgttttcacactgtaggagtttgtttaaggacaagaagttagtggagtacttgaagcagagttcgtttgatgctgtgtttctggatccttttgatgtgtgtggcttaactgttgccaagtacttttctctcccgtcagtggtcttcagcagggggatattttgtcactatcttgaagaaggctcccagtgccccagtcctccttcatatgtccccagaggtatcttgaaactcacagataccatgactttcaaggaaagagtgtggaaccttctttcctacatgggggagcatgcattctgtcccagttttttcaaaactgctaccgacattgcctctgaagttctccagaccccggtgactatgacagacctcttcagcccagtgtccgtttggttgttacgcacagacttcacgttggaattacccagacctgtgatgcccaatgtgatccacattggagggatcaactgccaccaaaggaagccactttccaaggaatttgaagcctatgtcaacgcctccggagaacatggcatcgtggttttctctttgggatccatggtctcagagattccagagaagaaagcgatggaaattgctgaggctttgggcagaattcctcagacggtcctgtggcgctacaccggaactagaccatcgaaccttgcaaagaacactattcttgtcaaatggctaccccaaaacgatctgcttggtcatccaaaggctcgggcgttcatcacacactccggttcccatggtatttatgaaggaatatgcaatggggttccaatggtgatgatgcccttgtttggtgatcagatggacaacgccaagcgcatggaaactcggggagctggggtgaccctgaatgtcctggaaatgactgccgatgatttggaaaacgcccttaaaactgtcatcaataacaagagttacaaggagaacatcatgcgcctctccagccttcacaaggaccgtcctatcgagcctctggacctggctgtgttctgggtggagtacgtgatgaggcacaagggggcgccacacctgcgccccgccgcccacgacctcacctggtaccagtaccactccttggacgtgattggctttctcctggccatcgtgttcacggtggtcttcattgtctataaaagttgtgcctatggctgccggaaatgctttgggggaaagggtcgagtgaagaaatcacacaaatccaagacccactgagaagtggcaggaagtgaaggagaagtattagtcccttatccaatcagttgaaacttggaaacaagtgttaaatccatgttgcttttattagggaaataattcaccatacactatacacccagaacatttttttttctttttctttttttcggagctggggaccgaacccagaacattttttttttaaataaaaacaatctaattgctggccacacccatcagggaagatactggaatatgtgatctgtttctccagtatcttcagtctggacaatgactgccatctgttggtaacttacagaaagtttagtgttctgttctgccttcagtgacagcaccacagtttcccttactcctgtcagctaatggcttcctcccctggattctcagaccagtgtggccttcccagtgttagtcattcctcactgtgctcatgttttgtgggtggcacggcctttgagctttgggagaaaacaagatgaggctgtgacactggtggccctgtgtttgagataataattattgcttgtctctgaatttgatgaaaactgaagtacattctaaagaaagtatgtcttctattgtgttcccaaaccaagaacttgtcaataaattcatataaattgtaaaaaaaaaaaaaaaaaa

SEQ ID NO: 1107 - DNA, 2337 bp, Rattus norvegicus
  Genbank Accession No. AF509819
ggccattacggccggggacagtttgaaggataaactcaggaaagcacagcaagaaaaagaacaacttgaatgtcagctgaagacagaaaaggatgagaaggagctttataaggtacatttgaagaacacagaaatagaaaataccaagcttgtgtcagagatacagactttaaagaatgtagatggaaacaaagaaagcatgattactcatttcaaagaagagattggcaaactgcagtcttgcttggctgacaaggaaaatttgcacagagctctcctgcttacaacctcaaataaagaagatacattacttctaaaggaacaacttcgcaaagcggaggaacaagtccaggcaacacggcaagaacttatctttctggctaaagagctcagtgatgcagtgaatgtgcgagataaaacaatggcagatctacataccgcacgcttggaaaatgagagagtgaagaagcagctggccgacacgctggcagagctccagttacatgctgtaaagacagatcaggaaaagactgatacactggaacatgaactgagaagagaagttgaagatctgaaactccggcttcagatggctgcagatcattacaaagaaaagtttaaggaatgccagaggctccaaaaacaaataaacaaactttcagaccagtcagccagttctaacggtgtcttcacaaagagaatggggagtcagcagaaagtgaatgatgcttcaataaacacagacccagctgcttctgcttctgccgtggatgtaaagccagcagcatcttgtgcagcagagacagattttgacatgtcagcaaaggatcatgtctgtgaagtgactaaagaaatggctgagaaagtagagaagtataataagtgtaaacaactcttgcaggatgagaaagccaaatgcaataaatatgctgatgaacttgcgcaaatggagctgaagtggaaagagcaagtgagaattgctgagaatgtaaaactcgaactcgctgagctagaggacagttacagtctacagttggcagagaaagacaaagaaataaattgcctggcttcatttttggaaaatctctcaagggagaaggaacttacaaagagtttagaagatcaaaaaggaaggaaaatggaaggccagagccctcaacaagtctcacggtgtcttaacacctgctctgagcagagtgggctcctccctacactgccggctgcccagccagttcttcagtatgggaacccttacaccgcacacgagacaagagatggagcagatggtgctttttatccagatgaaatccagaggccacctgtgcgcggcccatcttgggaagacaacgttgtctgtagccagcctgctcgaaaccttagcaggccagatggtttagaagacccggaggatagcagagaagatgagaatgtgcccattcctcctgatccagcaaatcagcatttacgaggtcatggagcaggcttttgctttgattccagctttgatgttcacaagaagtgccccctctgtgaattaatgttccctcctaactatgatcagatcaaatttgaagaacacgttgaaagtcactggaaggtgtgcccaatgtgcagcgagcagttcccacctgactacgaccagcagggctttgaaaggcatgttcagacccattttgatcagaatgttctcaacttcgactagtttttagtgagaggtagtaaaatttagcagttaaaaaacaacccaaaactcagatagaggctaaggagactgcgggcctgatgccctgattgagaaccttagagcgagctgtcaatagggccagggtacagctttgactacaataaatacaggtttaatctgttaaccttgtctgctttaaggaaagagtttctgcatttctatctctaccctgttagcaaaagtgtatgaagaacacaggagttattttaatgttaaaattgaaaacatatatgtaatagttaattacctagcacaatcagatttacaagttcctgttcaccttggtgattgagcatgactactattatgtaataaaagcattgatcataacagttctgtgaaatcattctttgaatatagaaaaacccttactcaatgaaatgattttaaaatcctactcagatgtggagctgcatgaagaatgagatgcaaggttgaagaaaacttttatatgtgaaaccctggctttccgagttaatgtgaggcatatttagttaattttatgataaaattttagcatattctgatgactatttttaaatgattgactttgtatttataactaattgtaattgtataaactataatgggcg

SEQ ID NO: 1108 - DNA, 2341 bp, Rattus norvegicus
  Genbank Accession No. AF513015
cgtcggtggcccacgcaggatcacgatgctgcccagcctggcactgctcctgctggccgcctggacggttcgggctctggaggtgcccactgatggcaatgccggtctgctggcagaaccccagatcgccatgttctgtggtaaactcaacatgcacatgaatgtgcagaatggaaaatgggagtcagacccatcagggaccaaaacctgcattggcaccaaggagggaatcctgcagtactgccaagaggtctaccctgaactgcagatcacaaacgtggtggaagccaaccagccagtgaccatccagaactggtgcaagcggggccgcaagcagtgcaagacgcacacccacatcgtgattccttaccggtgcctagttggtgagtttgtaagcgatgcccttctcgtgcccgacaagtgcaagtttctacaccaggagcggatggacgtttgtgagacccatcttcactggcatactgttgccaaagagacatgcagtgagaagagcactaacttgcacgactatggcatgctgctgccctgtggcatcgacaagttccgaggggtcgagttcgtgtgctgcccgttggcggaggagagcgacagcatcgattctgcggacgcagaggaggacgactccgatgtctggtggggtggagcggacacagactatgctgatggcggtgaagacaaagtcgtagaagtagccgaagaggaggaagtggccgatgttgaggaagaagaagctgaggatgacgaggatgtggaggatggggatgaggtggaggaggaggccgaggagccctacgaagaggccacagagagaacaaccagcattgccaccactaccacaactaccactgagtctgtggaggaggtagtccgagaggtgtgctctgaacaagctgagaccgggccatgccgtgcaatgatctcccgctggtactttgatgtcactgaaggaaagtgcgccccattcttttacggcggatgtggcggcaacaggaacaactttgacactgaagagtactgcatggcggtgtgtggcagcgtgtcatcccaaagtttactcaagactaccagtgaacctcttccccaagatccggttaaacttcccacgacggcagccagcacccctgacgcagtcgacaagtacctggagacccccggagatgagaacgagcacgcccatttccagaaagccaaagagaggttggaagccaagcaccgagagagaatgtcccaggtcatgagagaatgggaggaggcagaacgtcaagccaagaatttgcccaaagctgacaagaaggccgttatccagcatttccaggagaaagtggaatctctggaacaggaagcagccaacgagaggcagcagcttgtagagacacacatggccagagttgaagccatgctcaatgatcgccgtcgcctggccctcgagaattacatcaccgcactgcaggcggtgcctccaaggcctcatcatgtgttcaacatgctgaagaagtacgtccgtgcagagcagaaggacagacagcacaccctaaagcattttgaacatgtgcgcatggtggaccccaagaaagctgctcagatccggtcccaggttatgacacacctccgtgtgatctacgagcgcatgaaccagtctctgtccctgctctacaacgtccctgccgtggctgaggagattcaagatgaagttgacgagctgcttcagaaggagcagaactactccgacgacgtcttagccaacatgatcagtgaacccagaatcagttacggcaacgatgctctcatgccttctttgactgaaacgaagaccactgtggagctccttcccgtgaatggcgaattcagcctggatgatctccaaccgtggcatccttttggggtggactctgtgccagccaatacagaaaatgaagttgagcctgtcgacgcccgccccgctgctgaccgaggactgaccactcgaccagggtctgggttgacaaacatcaagacagaagagatctcagaagtgaagatggatgcggagttcggacatgattcaggcttcgaagtccgccatcaaaaactggtgttctttgcagaagatgtgggttcaaacaaaggtgccatcattggactcatggtgggtggcgttgtcatagcaacagtgattgtcatcaccttggtgatgctgaagaagaaacagtacacatccatccatcatggcgtggtggaggttgacgctgctgtgaccccggaggagcgccacctctccaagatgcagcagaatggatatgagaatccaacatacaagttctttgagcagatgcagaactaaacc

SEQ ID NO: 1109 - DNA, 2355 bp, Rattus norvegicus
  Genbank Accession No. AF549441
ctcagttggtagcgtgcttgtctagcatgcctgcaccccagggtttcctccccagcactgtataaatgggcatgctgatacaacaagcctgtgattccaatacacaggaggtagagacaggagggtcacaagttcaaagttctcctctgctcccccaagagtcagtaccagcctggggctacatgaaaccgttaagaaaggagtgagggccagaggagcaaggttcatttatccaatggctgtttgattgaatatttgaggaggcactactgcgtttcaggccctggacgggcagaatctctcactgagcctggagtgcatgttccaccaaacctggctgaccagcaagttcccctcaggatctccctgtctctgctgccacagtgctgggatttcagcagggcactgtgagaaagtctctcaccgtgaccaagtttctctgagtgtccagccaacccaggctcaccagctccctccagctaccgcccgtccatcaggtcagctgccaaccccaggctgaacaccaaccccagctatgagctcctggaggcatgactccctcagggccagcagctccgatcccctcccagtagttatcattggcaatggtccctcgggtatctgtctatcctacctgctctctggctacatcccctatgtgaaaccaggagctgtccacccgcaccccctgctgcagaggaagctgaccgaggctccaggggtctccatcttggatcaggacctagaatacctttccgaaggcctcgaaggccgaagccagagtcctgtggccctgctctttgatgccctcctacgtcctgacacagactttggaggcagcctagactctgtgctctcctggaagcggcagaaggaccgtgccattccccaccttgtcctgggacggaacctccccgggggtgcctggcattccattgaaggctccatggtgactttgagccaaggccagtggatgagtctcccagacctgcaggtcaaggactggatgcggaagaaatgcagaggcctccgtaacagcagagccacagccggtgacatcgcccactactacagggactatgtgatcaagaagggtctcagtcacaactttgtgtctggtgccgtggtcactgccgtggaatgggctaagtctgagcactgcagccctgaggcccaggcacccagccccctcttccaagtgacaggctacctgactgccaaggaccacagccgccagcccttctcactgtgggcccataacgtggtcctggccacgggcacctttgacagcccagccatgctaggcatcccgggagagaccctgccttttgtccaccacgagctgtcagccctggaggcggccctccgggcaggcactgtgaacccaacctcagacccggtgctgattgtgggagctgggctatctgcggccgacgctgtcctctttgcccgtcactacaacatccaggtgatccatgcctttcgccggtctgtgcacgaccctggcctggtgttcaaccagctgcccaagatgctgtaccccgagtaccacaaagtgcagcagatgatgcgtgaccagtccatcttgtcccccagcccctacgagggctaccgcagcctcccagagcaccagccactgctcttcaaggaagaccgtcaggcagtgttccaggacccacaggggggccagcagctctttggagtctccatggtgctcgtcctcatcggctcccaccccgacctctcctacctccctagggcaggggctgacctggccatagaccccagtcagccactgagccccaagaggaaccccatcgatgtggacccgttcacccatgagagcactcaacaggagggcctgtatgccctagggcccctggctggggacaactttgtgaggttcgtccagggtggagccctggctgctgccagctccctgctgaagaaggagaccaggaagccaccttaacactagcctgatgctctgacacccaatccctgaggaggaagagggctcaccatagcccagtggcacatgagcccgcctaaagattttccatgcggggaccagtctcccctgcaggaggggaagacttgagccccgtggatgggggactatctgccccagaggtatggggaacacaggccgccctatcctcaggcgagtcaaggcccaaggtgggagcagtagccatagaccagaggggcctgggacccctgaagctgtcggtgtgtgctggagtcacagggccagctgagtgtccaactaggaagacctcagacctaacctttcaccatcagatctgcaataaaaccagctgtgcctccactgcaaaaaaaaaaaaaaaaaaa

SEQ ID NO: 1110 - DNA, 550 bp, Rattus norvegicus
  Genbank Accession No. AI007750
gatgataaattctaagctcaaattttatttctacaaaaaaaggcaatcaaaacaatataaaacacattgaaaggatattattgagcttcaagtggagcttgactggaaaggctttgggtccagaggggagggggaaaagccatcctgttcctgggctgccccaggagctgctctgaggaagaggcagaagccaccaaccctggctgatcccaccaagagtaaaccccaaggagggaaggccgtggtgcctgctgtgctgaggagtgggaacaccttagcacatcctatcagagcttggtagtagagaagcttgaaatttcaaaagaatattctggttttgctttgtatgtgatgaccaggtcttctaccacagctgtaggaaggactgctgactgtcagcctttctggagagaaattcatcacacaagtgcactgtattctccaatggcagacctcccttcaaggtcaccacaaacctgatataacagggttccccacaaagacccagcacagtctgaccactgatgtggaccatggggtctgtctgttg

SEQ ID NO: 1111 - DNA, 466 bp, Rattus norvegicus
  Genbank Accession No. AI007803
gaaggaaccagtgaatttctgaaggcatttccttacagtggtggcacctggctcaggacagaggcagccaggctttccccatgccgcccaggtctctcagggtgagagcagaaacaacattttaaaggatgaggccattgtcacgccctgggtacaacaaccagggaaatcacaagaatcattgaaaacaggaactcctctaaaatttcaatactacactctttaaaaaaaaaaaagaatgaaccaaagataccaagcggtagctccgaggaccttgggcaccctgtccattatgagcagtggctgccatagacagcccctggtaaaccttggacttggttatcacacattgccgaggggagacttcttgtctggtccaaaggtccttgcttagtgagggtcccagtggtgtccttggcggactggtgaagggacactttggtaggaagaacccttaggggaagac

SEQ ID NO: 1112 - DNA, 577 bp, Rattus norvegicus
  Genbank Accession No. AI007820
accctcactataaggactaagcttgcggacgctaaagtttttttttttttttttttttttttttattttgcatacttttaatttcagaacaaaataaaacaaacaaaaaaacacaatacacaacacccaaccctgctattctgtgggaggggatcttcctgccttaaggcacaaggacaggatagaagagattcttgtagacatgagcagagagccaggtgggtcagggccagtcaaggctgttgggggagccacagggatactatacagagggcgggggcttcccaggagcctttaatccacttcttccatgcgagaggcatcctcatcaccctccagtggggggatctcatcgggaacagcagcactgggctcttctgcagtgacctcatcttcatcaatgcccaggcctagtttaatcatgcggtagatgcggttggagtgggtttgggggtcctcaagtgagaagcagaggagagcagagcattctcaaacagcagcaccaccaggtctttgacagctttgtcctttttgtctgcctcagccttctgccgcaaagtctccacaatggggtggg

SEQ ID NO: 1113 - DNA, 545 bp, Rattus norvegicus
  Genbank Accession No. AI007857
ctcactaaatagaataagcttgcggccgctagagtattttttttttttttttttttttttttttttaattttgaaatacattttattttcactgttctgcactggagagatgacatccaaggagtaggggagacagagatgcctgaaacttctacccttgctgtgcatgggtcacatcgttcttctgggtaccagggccatgcctggacaccacacagttcacatcggactctgggccaggctaaccatccccacagcagtcacctctggcaggccccgacacagctgggcattctccagaaaaggtcctacttgtcctgcagagtcccagtcccgggaaggtcggactgcatcaggaccaaagcagggaaccagtgacaggagccagaccactgaggacagggaggagggccaagggtgaaggcccaccccttgctcacagaagggacactacagggcagtaatgggaggaaatggctagttagacatataagtggtttctggagaactgtactgttactctggatggtgagcgccagactcaa

SEQ ID NO: 1114 - DNA, 570 bp, Rattus norvegicus
  Genbank Accession No. AI007881
aacaagcataataacctttacaacctcttttcttcgaggttttactatagcacttctaacacaccccggggcagcacaaaattctgcacagcacacacccaacagctggttttgtgatgtctgcggggcgagggagaaggctgaaaacagatcagaacagtgcgggaggaagtccactgccaaagagcagccgccaagagctggggatcttccatggcaagacagaggccacggggccgtcactacatgggttgattatctgaagccattcattaagatactccacaaggctgactgcatctgggatattgtccccttctgaaacaaatttcagcagaactgccatttggatttctttacaacagctttcctcatagagtgtttttgtgattccacctccgggaatgcgaatgcagaactcagaatcactcatctcggggatgcaccgactcttttccatttctagccagtttaggctctttagtttattttgagcactcttttgcaaacaaggtgtaagaatataccgatagggagtactgcggagttgtacatcagtacggtgatatg

SEQ ID NO: 1115 - DNA, 565 bp, Rattus norvegicus
  Genbank Accession No. AI007893
aaaaaagcaaaatgtatgttcatctcaaatataacagttaaaaatggagaagcaatacaaacaacgtgttagccagcagcatccggtcctcagcttgcccacccgcttcagtcaggtttgggtgagctcagtcactgcctgcctgcctcctgccttacagctagcccaggtgaaacagactcatataaaattaacaagttagggttaaataagcttaaataagagcgttaaatacaagacactttgtcagaggttctgtacaaagataaacaggtctgggttgtacacagggccctgctggtactcagcagcggggtctatggggagggcagactgactgactgcagcagagcaactatgagaaagcaaactacacgcagaagtgactaccaacaggtccagctgttcacaaggcattcgcatctcttttcttaaaaaaaaaaattcagaacactgttaatattcaggcaccgtttgttcctgcaaataaatacgtctctacggcaacagtgttcgtgctagtgttaaacttcagggcttgtctctgacagagctctgcagactg

SEQ ID NO: 1116 - DNA, 510 bp, Rattus norvegicus
  Genbank Accession No. AI007920
acaaactttattcaatatcctgtatttaaagtacgaatatatatgtatatacatatacatacatatatacatacatacatatatattgtacctcagaccatagcattctgctcagcttaggaagtggctttaaagaggtgttctgactccatgctgggctcccacggggacttgtttggggcaggtaccactgagtacaaagtcaccagttatcatggtagtggatgacatgggagtacttaaaggtccctggcaatgactggctttgtgacatgggtccagatcttggacaaggggctggccagcacaccgtgagagtacatggctccatctgctggccatccttcaactcacacaggatgtcagcgatgagtctggaaaagatctgaaagtctgtggtcagtctgggcctggacctgaagcacctatcttcagcattggacacgcaattcttccctgtctgaacaccacagacgtgattttatcgttaggaccccgactgctactgca

SEQ ID NO: 1117 - DNA, 697 bp, Rattus norvegicus
  Genbank Accession No. AI007924
cactgctgaagtacatttactgtacaaagaagtaagaacaaagaaccaggaatggtggagtccacagcagcaagtgtagtgttgatggtgtgcacgcaggccaatccaagtcctcacagtctataccattctattcgcgactccagagaaaaggtctctgtcaacaacaacaggactggtgggggaaggtgatgcttgattgtatccagcctctgggccagggtcccaggggccactgcttatcaggcagttcccacaaccacagccctgtcccccactacaggcattaacccaatctcccagaactgcaggctggcgcagtgtctaccagtgccctagtaacatccatggcaaagatggtcttaggaaatgtgcactaagaggtccccagcaaggggtcatggctcctgttatagccaggaccctgagggcaagaggtagagttaagcaccagcgtgcctgagggctgtgtcaccaggcaaggacagggagtggtcacacaggacatccattggggacaacatccccacaggggaaaggctaaccagagcagactgggataggcggagcattgtggaagaatatagtccatggcttctttagaagtagctcggtctagtgagtccctaaggagggcttggtgttcaaccctaaggttgaggcctcttttccagagtgtcactaagaaattccagtg

SEQ ID NO: 1118 - DNA, 434 bp, Rattus norvegicus
  Genbank Accession No. AI007981
cacatgaacaatttacatttatttgttgacagccgtagtcaaatgcacttcaaacacagcacatggtagagtctgtttgcacggtggagccactgcttgccaacgcactggtggttcatgagagtaacttgaggttcatcctcaggctgaggccccagctccaggctgacagctgacaggtgcctgtcccttctggacggaaggcgcagggagttactcctgtttctcgtacttgtgctttatgtgtttccacagtttcccctcgttgatgaatcgtagaccgcgtctgcaccctgatcgaaggcgcgctcgaagaacagggcgctcactgcgatggtgagggcgaaggtagaagtcctgcggaacagcaaggagtacaaacgcgaagtgaccgtcggcgacgccatgttgcctcgctgacgaaccctcgtgcc

SEQ ID NO: 1119 - DNA, 573 bp, Rattus norvegicus
  Genbank Accession No. AI007987
ttccaggaaaactgtatttcaaacttggaaagagtcataacccgggaaggattcagccatcacattccacagagactagtctctcctctggagagggttctggggtccccaccccggtgtgtgtttgtgtgtgtagtggtgggatgcacccagggtgtgacttaaaccccagcatacagatgcctctgaccacaagactaggaacatgctagtgaggaaactgctccgaggcaactgtggaccacaatgcttggccatacaaagggccagaggcagaagcagcatctgccctgggctcacctgcatgcctgacagctaacagctggcccttctccctagtctcttgcccagtaagtgatacaggatctcagcggcccttggtgctagagaggaagtcagatgtgttcagtcccagcggtggggccctgggaagcaggtggcttgttccagtccctggccctgagggcagctgtgtgggggaggcaaaagagcagtggcttagtgccctgatgcctaccacagccgcgtgtatcagagagcagcaggatggccaggcagtgtgcactcaactcc

SEQ ID NO: 1120 - DNA, 605 bp, Rattus norvegicus
  Genbank Accession No. AI008020
cgcaattgtttttttttttttttttttttttacaatgttattcatatctctaggctttaataaatctttgcataggtaaatacattcatttacaactacctgacaacatagaaacagacaagaaaagatagatcttttgactctcccccagataactaccctgaggaaacccttagtgagagtcaccattagaacgactacactgtaagtcacgcctgaaagagtccgtgtcttccccttcacggggtcactttatagagctgcccttggtaaaacccacacaagctttaaaggacttcaaaaccaggagtgtgtcgagatagacagagtgttctccaacctgagcttaggaattaaggctatttctagtcatgccgttatcaacttgtccaataaattaatacaacctgggaaaggctgactttttctcacagaatagttttagtaattaacatattttaatatgtgatagaaaggtaggcgtttgagatgtatttactcaggccctgagctctcagtcatctaagctaagcccagggacattagggcaggtgaccctcatggagcccgagcttgtctgggaaccatggtcttgccctcgtgcc

SEQ ID NO: 1121 - DNA, 489 bp, Rattus norvegicus
  Genbank Accession No. AI008066
  misc_feature (1)..(489): n = a or c or g or t
caagtttgcggatgagtttattgaggtggaatctctgctaacttcacagaagagaagctacttgccaaaatcaaggaggttctcaagaacttcctacgttagaaacaaatgttcaaaagcacagcaagctgttccgattcccagtgacgaggctgaggcaagcgactctgcatgtttacttcaagcttttgaagagtttgtgggccacacagtgatcccgtgcatgcaggaagtcaaagagctcctctgtacaatcctcttctgtctgtgatcgggaagacacgcgcctatcacacgactctagtcgttcccgggcttttacacacttctccaactgctcacagtgctctctcactgttgtcagggggtccactaattcttcctcttcttcctctttggggtctccggagccagtgagcatctttcgttcatcctctagtcncatggcggagccggtttgggattcancaccaagagcaacacctcgtg

SEQ ID NO: 1122 - DNA, 493 bp, Rattus norvegicus
  Genbank Accession No. AI008074
gccgctgtcatcctcctcatcagatcccacatcctcaatcttaggcttctcctcatcctccttatcttcctcctccttctcccctttctcttcctctgcctcatcatcactgatctccttctcgcgttccttctccagatagagggtgatggggtagcctatgaactgtgagtgtttcttcaccacctccttgaccctcctctcctctaagtactctgtctggtcttctttgaggtgaaggatcactttggtaccccggccaatgggctcaccgtggtctgcacggacagtgaaggatccaccagcagaagactcccaggcatactgctcatcatcgttgtgcttcgtgatcacaaccactttctctgccaccaggtaggcagagtagaagccgacaccaaactgcccaatcatggagatgtctgcaccagcctggagagcctccatgaacgcctttgtaccagacttagcaatggttcccaagttatttatg

SEQ ID NO: 1123 - DNA, 410 bp, Rattus norvegicus
  Genbank Accession No. AI008087
agaagaaccttccaggagatgaaacatccatgattccccaaaaatatttatttatacaaagattctgagagtaatatttgtatttgtctgtatacttcagtctgtgcatctggggccgagtcatcatgtcagacatgggaggctccccggatactctgcatgtagcacctgcttccaggaacacccggggagcacggggtctagggcaggagggaaacgatgtctgatgccccaggctgtgtggatccagaatccagagaatgcaccctgacccggaaggtgtctagccaaatgtccaaggtggtgcacttacacgacttcaccaccatgttggacagctgctccaccttgggggttctgccaacatagtacaagatggtcagaggctccaggtcttggggcacacagca

SEQ ID NO: 1124 - DNA, 496 bp, Rattus norvegicus
  Genbank Accession No. AI008131
agcaaaactggtaaaaacaaaattgtaatcgttgaacatagcgctctggcaatcaagacgtttgaaaccgtcaatcttctggggcgaagaaagcactgtgcgacacttagaactctgattaacagacaaggtggtcacaaattttcctggcttgaagacttccacaactttcctgatcaggtcatcataggaggtctgacttaggtttgtttcaaagctaacataagaaaattctggttctggagtgatgtgaatattccaatatgttccatccgatttcattccattcattgagtagccacaaggattgaacagtgtggcatcaatgacagaacctggtatcaggtcacgaattccactctcacgagtgacatcctttgcagtaacaccatctttcatgtagaactggtccataactgctgggtcaagctcactcatcagaatttccacggtttgatctggctgattgattactcggctctctgggagcctcgtg

SEQ ID NO: 1125 - DNA, 512 bp, Rattus norvegicus
  Genbank Accession No. AI008151
agtaggtgctaaaacttggttttgaaattttattaaaaaaatatatttgcaaacatataaaatttaggatgaaaaatgctcattttaaaacatgtaataacttaatatttgcaaacatacacagatggtataaaatccacaccactaaaaaggttaatgaggtggcactgcgctcacggaacgaaagcttcacagtggcgcacgcagggcttctcgtgtcctcggaagggctgagagcctggtgcagggaagccaggggagccacacggccgatgcagtagagagtgagaccactccgcacgcacaccaacaacacgctctaaggattcacagataaaagggaaacacaactttgcattttctcccacttcaaagtgatatgtattgcattgcagtgtttgaaagagtgatgtcaaatcggaatccgagggaaacattgcacagctctcctgctgaaacttgaaatgaaaaacaaaaaaataaaacaacaaaacaaccttacacctaacccc

SEQ ID NO: 1126 - DNA, 357 bp, Rattus norvegicus
  Genbank Accession No. AI008242
gagaaccatcactttcacattcctgattctaatgtgttttgttttgttctctgtgggtttcacgggactccagatgctgccctggaaatactgtattttggagttcatgctccgtaagcccctgtgctgctgggtcctttgactcctccagcagcaggtgtttcggacttgcaattagcaatgcaactttttctaaatatgaggatatctacctttattaagaagttatactaagcaatggcgtccttgtttattttatgttttcacattacgtctgaatctgtggtggtgagcaaagatcattacaaacacaaactgtaaatttgttagcttcgattcaatggaatttctttactt

SEQ ID NO: 1127 - DNA, 429 bp, Rattus norvegicus
  Genbank Accession No. AI008284
cagttttaacattttattgggtaaatgattttaaaggtaataacaatagtgtcaaaactactacaatgtctttccacagccataccttacagacccacataaaccttttcatatttttgtcattttgctcacttttaatatcattgagcttaatcccaccaaccttccctcctcattgtccagtttctgttctttccttgggtttcctgtgaagttggagggaagtttgtagtcatgtgacactatccgtcctgcccctgctgtcagattttttttctccagagaggtgcctgtcctgtgcttggatagtcagtttgtgtatgaaacaatgtacaaatcaatgttttgaaaataatgatctcagactttctaagttaaattttaaacaatttgattgtttgccatattgggtgggtttactcttagaat

SEQ ID NO: 1128 - DNA, 234 bp, Rattus norvegicus
  Genbank Accession No. AI008309
aagacaaaaggtttttttattcaaaaaatgccaagtataaaaaaaaaaataagatctcttttattcccctgtacagtatctctcagagaaaaaccagcgggctacacgctgctcaaagcacaaccccagagaggatccggaaggcacaccacaccggaactgcctttctgtcttaggtagcgaatccactctggaggactgtacactcgggttccgtcaaagtccgtgtagact

SEQ ID NO: 1129 - DNA, 478 bp, Rattus norvegicus
  Genbank Accession No. AI008316
aaaagatgtcatgtctgactcaatacaataatgtcatcttaaattttggccccttatttgaatactatagctacaatcaaaataatttgttaaattgcttatattaagagtaaacatggatatgacattggttgtccacctgcaaactttagaacaatttactgtagcttgatgcttagccaattttaagtgaggaattcaacatctaggacacggatagtggagatggcgtgagggccctcagccatgctaacaacttggaaagaaaagagagaagccaacggcaccgttacagtgaactctcaggtgaacttttcagttatgaaaacatctattttgaatctgtaaatattttaactgttttattaaggcatggacttaactattccttgacacctgttgggtagaatgaaaatttaaagccatagtggtaaaagatggcatactgattgtaaaataaacaaataataataatgac

SEQ ID NO: 1130 - DNA, 435 bp, Rattus norvegicus
  Genbank Accession No. AI008416
tcagtaaacaaccaattcgattttcctattctagccatataagccagctggactttgtaaggaaaatgttctgaagcgtcaccgtcaaggactacagaaaactgccacccacagataaactgccacagtaagtgactacagcgtggctctgtcactcataccagacaaccccaaataaatactttatgaaaagaattaaagtctatcaaaaccacttaaaatagaatcttaaatgcagaaatcttaattttccttcagttgggccagaaaccaccacagaccctacggtcagggttccaggaagctgcccggcgggtcatgggaataacgccgccgcatcgccagtcggcatcgtttatggtcggaactacgacggtatctgatcgtcttcgaacctccgactttcgttcttgattaatgaaaacattcttggca

SEQ ID NO: 1131 - DNA, 512 bp, Rattus norvegicus
  Genbank Accession No. AI008423
agtgcacgactgctctttttttactttaaaaatatttattagaaatgtacatttaattcgttttaaggaatggtctagacaagtgttaatatcacctcgaatttgtaaaactttacatcttgaagctatttacagatttacaagaactcatcccttcccaacaccagacaggacagctaagggcactgtcacttcactctgtacttgtagaaggaacacagcgtgtgggtaaagttccatcccagcgccagtgatagtccgtacagcacaatgagaggtgcaaatggatagagcaggaccactgtatttttcaaaaatggcaatgcactgtatcccaggaaggtcacatagatataatagccaaccgcgatcaaccataaggtatttccaactaaatatccaataaacgtgtctgtgagaataacatggttgatgaagaagagctggatgaaatgcaggatgacgaggagcggatagaaagcattcaagtgcacgtcgaaggcgtagcccca

SEQ ID NO: 1132 - DNA, 488 bp, Rattus norvegicus
  Genbank Accession No. AI008462
gaggaaaatgtctggagtaaacctttgttttctgaaactactttagctaaaagaaaatgggttgttctagactttggaatggttcttaaagtttcctggaaataaaaataaatgattggcacttcaaagacattctttagccaagacttcagtgtctagcagaaaccacaagtgactagaagagcaagtgatcttggtgatgcacttgattgtatacaatgagtattttttctcttaaactggaaataaatctgttagaaataatgtagccaaaaaaaaaaaaaaaaaaggtgaatctgaaggatgcttttgccaatagttagagcagttacactgaaccaaagtgactgagtttgtacagacggtaatccgtaccaagcacactcactgtcctgatctgaacacccagcaaggttcatgtccgtgctaagtttgcagcattgtgttcttttgcattctttttttacttttattaaaggttcaaaacc

SEQ ID NO: 1133 - DNA, 607 bp, Rattus norvegicus
  Genbank Accession No. AI008638
ccagtggagagcacaaatgtattttggaatctgcttgttaacttgggtagcaagccagcagaggtcccatagccagctcgccaaccacccagagcccatctatctctccagacccgacagtcctcttgtcaaccgaggctccagagcgagggtcaagaggggtctcaggagataagaggcaggatctggtgacccaaggggcagcaagcggacgtgggcctctccttccaggaatggaacatggagggatgtgcggtgtgcagagacgggtgggcaaccagaggttccctttagtcttgagtcaacccctggagaaagtttaggacttggggtggttggtacagcagcccacataccccaacttcactcttcttctctattcatctcagacctgtccaactcccccagaatgcctgagagaaggggctagcaggaggcctgtgggggctgcagggtgaggggaagggtgaggggcaactctgaaacccccttgcccttcctgcctgtagtcccagtgcaatcaagagggaggattgagaaggtgtcagccacagaaggcagcatggcctgggaggcagggccaggaggcccctcagcctctggccgt

SEQ ID NO: 1134 - DNA, 496 bp, Rattus norvegicus
  Genbank Accession No. AI008639
cgctacagaaaataaaaactcaaaaaataaccaactctacacatgatccataatgtacatgggaaagtcctggtagagtgtgaaggaaaaccagagctgcccaatacaactggctgttgcctgtcagttagtagaaggtgtcttgccactgagattggattcaaaagtgcaaaaggaaagcattttaaaaaccaaacctagaattcaacttcgtatatggactcagttttattcactctagtaactaggtaaaaagtatacatgtctgtggtacagtcaatgcgtcccacgcttctacttcaacgtctacaaagtcaccaccaagggatcaatgatggcaaacgaagggcttaggataaccaaaaggtataaaaaagtttgcagtcttgccccaagatacaaaaactgaattttaaacaatgtcaaaacatacatgatttaaacagtatatgaaaaaaagtcacacatcaaatcaagtacaaaaatatccaaacta

SEQ ID NO: 1135 - DNA, 423 bp, Rattus norvegicus
  Genbank Accession No. AI008641
gttcctaaattttatttatgaattaatacaaaacatggcagaccaatgtgtcttaatcctcatcctcctcctcctcctcgtcctggttgatctggaagtagcgcagctcgtagctctccttgctgttggcaacgacgcgcagccagtctcggaggttgttcttcttcaaatattttttggtgagatatttcaaataccttttggagaaaggcacctcggaagtgacagtgatcttgctcttgctccgctcgatggtcacaacccctccgccaaggttaccagctttcccgttcaccttgatcctctcctggaggaactgctcaaaattggcagcatccatgattccatcttctacagggtgagtgcagtcaagggtgaacttcaaaacctgcttctttttttttgccccccttcgccacaagc

SEQ ID NO: 1136 - DNA, 485 bp, Rattus norvegicus
  Genbank Accession No. AI008740
gagacaatcacttatttattggacaaggcaaggtcatttaaagagagaaaaatatatccaacaatgggtttattggtgttacaggcatcaaggctcacaaacagtattcgatacatcatggaaaccggtcacgtacagtcaagaagatgctgtcatgtcactcaaaagtatgccccaagtgcttcggaagaattattagggagttacgtgcatacttgcccccagttcacaatcttcattccctgcagctgagctattagcccataggatttggctagttccctggttataaagtgtgttcctgcattctggagaactttgatcagtatatgtctcctatttttgagtgtcactgaaatcatgtcggctatacgttacctagcactagatcacttccctggttttcaactatcctaggcagtaatggactatcacacaatactgtaaacagaagtctactgaacacacttagcactgtttcaatg

SEQ ID NO: 1137 - DNA, 527 bp, Rattus norvegicus
  Genbank Accession No. AI008749
tccagccccttcttaaggatttgggattttccatgaagattagactgggatttttctgctacaaatacagtttctttaatggacatgtaataatcacttaagattattccttctcaactgagtttgatagtttagcccatttgttggttcttgataagagaattaagccagttttattggcattcaagaaagaaaccagcaaagcaggctgcttcaggagggaaatagacaagagaatcaggttttctcagtttgaggcaagaaagatagctggatcatgatagtatatgtctataattttagcacttgaggagtctggagcagaaaggtatctgcaagttcaaagccagggtcacatagcaaaatgtctgaaaagagaaaattgtaaagaacacagcaaggctcacagtgggagtttgctggttgctggatgtcggggatcggatatcaagacagtgagaaagagtctcaagagtctcaagcatcagggcccggggctggtgtccaagagagacaagatgaaagga

SEQ ID NO: 1138 - DNA, 437 bp, Rattus norvegicus
  Genbank Accession No. AI008758
ccattagaaagataatgaagttaaaatgctttaatgaaaatgctcaaagaaaggaagtaggaagaactgacgcaagtattccttcatgttagaatttgtgacacaaatattttcaacttttaacggggcaagtcgctatgttccaagctgcctcttctcactaggagacattggtaattttttaaaagcacatttacaatgctttcccatcacccttgctgtgtttatgtagcacctatagccataactggcagtgagcagctcttctcgaggcgagctgacagtagcctggttgggtttgtatgcttggacctgggtttctagccatattctctgttcccgcttctcttgttgctggcctaatgacatcattacccacgtcttgccacccccttaaataagggaacaagattttggaccagcctagtaagggggga

SEQ ID NO: 1139 - DNA, 523 bp, Rattus norvegicus
  Genbank Accession No. AI008815
ggaagtgttactttaaaaaagatcatatccactttatgacaagtcaattttacttaaatcggggctgtccaacaaaaacattgttagccattcatgatctgaatttggtgtatgaattaaattatggtatacattaaaagccatgagacatttgttttgtaataaataaggcagtggaattattcattagtagcctttttaagataagctattaggtctgccctttctcccttcttcttaattccagcgaagatcatttttgttccagggatgtactttttgggattttccaaatactccatcagggtatcctctccccaggtgatacctttgttcttgttggcatctgtgtaagagaatccagcagcctggcctgtcttccgcccaaacagaccatggaggtttggtccagtcttatgcttgcctcctttttccacagtgtggcactgggcacacttttgaacaaaaatcttcttgcctttttcaacatcacccattttaaattcggcccgggctggtcaac

SEQ ID NO: 1140 - DNA, 460 bp, Rattus norvegicus
  Genbank Accession No. AI008836
gagcctgttggcctaccaggacccttctttcctacttcacttttgcccttggcacggtatgcagcaatatccttttcatacttctcctttagtttagctgctttctgctcatacggttgtttatctttggcagattgctcagaccacatctcccccagtttctttgcagtatctccaatagacaggccggggtgttcacttttgatctttgggcgatgttcagagcaaaacaggaagaaggcagacggtggtctcttgggagcatttggatcttttttctttcctttcttatcaccttggggaaggaagtctctctgtggaggtctgagggaagagctcgcgccaggtagacgctgcgccgtcatcatgggcaagggggaccccaacaagccgcggggcaagatgtcctcgtacgccttcttcgtgcaaacctgccgggaggagcacaggaagaagcatt

SEQ ID NO: 1141 - DNA, 478 bp, Rattus norvegicus
  Genbank Accession No. AI008838
aaaccgacatttctgtaatcaacaacaactacttagacagacccactgctgtctgattatgtccataggtcaggggtgttctgcttacgcatttggtgcctcataattaagttcagctaacactagggcctatagtttgctgtcagtgagaccaggtctggtcttgacagtaaagccaccatcaaaagctgcattgagaacttcatccaggcggacagttgtacttttgttccaaggaagctccaccataagttccaaataatttctagtcagagcatattcaggcattgactgaggcatttttttgagtctttttatctgcttgacacagactttatgagcctgttctggcatactagatgttcttatttttttctccagcatgacaatgtcatcattatcttcctcttgctcttcatcttctaaagctcctgggatgtgtgtaatcctctgatggggcgtattgctataacccttt

SEQ ID NO: 1142 - DNA, 531 bp, Rattus norvegicus
  Genbank Accession No. AI008852
cgcaacgggtttgccgtcagaacgcaggtgttgtgaaagccaccgctaattcaaagcaaaaatgggaaaggaaaagactcacatcaacatcgtcgtaattggacacgtagattccggcaagtccaccacaaccggccacctgatctacaaatgtggtggaatcgacaaaagaaccattgaaaagtttgagaaggaggctgcggagatgggaaaaggctccttcaagtatgcctgggtcctggacaaactgaaagctgagcgtgagcgtggtatcactattgacatctccctgtggaagtttgagaccagcaagtactatgtgactatcattgatgccccaggacacagagacttcatcaagaacatgattacgggcacatctcaggctgactgcgctgtcctgattgttgctgctggtgttggggaatttgaagctggtatctccaagaacgggcagacccgtgagcatgctcttctggctacactttgggtgtgaaacaacttaattgtggtgtcaacaaaatggattcc

SEQ ID NO: 1143 - DNA, 295 bp, Rattus norvegicus
  Genbank Accession No. AI008863
ccaggcagggttaatttatctaaaacatggggagagaggtagctgcggaacctggtgccacccattaccatcaccccctcctcccatacacactgggccagagaagacagaaggagacaggaccctggaggcagggctagcggggttcctggtcctaagtcactgggctgggcaggatgtcagtgaattttgcccagctggatctttttccacgcttctgaggctgtgaagatgcaggagtccaaaatgccggccacagtgaaggtcccgccgatgatggcccagattgcggtga

SEQ ID NO: 1144 - DNA, 440 bp, Rattus norvegicus
  Genbank Accession No. AI008888
acggtctctaaaaatatatatttagagagatagttttatacagttttctgaaaataattgtttggaaagaaacaaaatacaacgccgtttgggcatcacaaaggaagctgctcacagaggggtatttacttcgtggtcccaaacacggattccaaaggtgaagtatttggcaaaggggctgcagaatcagaagtaggttagctcatcgtgcttttctttgtcggtctggtaagaggacaaggtcaaaggcttgttctcatgagggaggggttcaaacaccctcaagtgcacacatttttcttcgccgacatcaaccttgatgaagaagttggtgccggccactacctgtctcctgaaggatatggctttaaagacatcaaacttctgatttgctttctcttcaagttgagacttcaccttgttggcgatctcctgcgtct

SEQ ID NO: 1145 - DNA, 649 bp, Rattus norvegicus
  Genbank Accession No. AI008971
gcactctaaccctaggtttattcaacagtcctttcactctacacaagtacaaacacaaccttatctaaaatgctacaaagttataaaactcaaaacagattttatagtactgactgtacaacaaaagcaaagaggcaacgcacacattgccaaggctaacctgcgacatcaccatgaatggcaggtgacaatggggtgggctaggtttcatcaggaccctgtagaactggttcaccaattttagaaagtaacagagacactgggacagaaaagacaaccatttatggaggaatccttcaaaggttttaaccctagaaggtgaagggtactcagcaggggccatgggcaggcctaacagaacagacagaggcttggtcctttccactgctgtggcacagcatggcttggccaggttgtctgacgggtcctaggtcatctggaaaacggtgtgctgccctatgttccagttggctctgctactgaacagactatcaagaactgaaggggcgaactttctagccagaaaactacagggtacctctacgggcacagtcctgaatcaacagtacctctacaaggcagaaccctcctgcagaggaaacatctcaactgctgtcttcaaagcctaccctggtaagggcctcgtgcc

SEQ ID NO: 1146 - DNA, 604 bp, Rattus norvegicus
  Genbank Accession No. AI009003
gtccccggcactcaccccgcggcggcggctgtgtctcggcttgctgacgtttttcgtcactttgtggcctttgttgaggcccacggccatggggtagcgcagggccatggctgcgggcagcgggaataagacagcgactgagataccgtacctcggcccgcgcccgcccgcctgcccgccggggcgccccgcgaggcgggaggcccgatggcggcagatgagcccagacgagacggacttacctgcagctttccgatggcggccggacaggaagaacgacgccgcgcagaatcctgggatatatgcgactcgctggccttttcggcgcgcgcgcgagagagacaggcgccctagggcgacctctggtggccggaggtactgctgcacccgtgagcccgcggggttatgcttgtggtttgggattcttcccttacgttatactttgaataccgcctctcactattgttaactgttgaagtaacttaatctctgacaatgaaagtactttttgggggaagggacgctgtaagttaagagcactgcctgcttttccagagatcctgagttcaattccaacaaccacatgatggctcataaacgtcta

SEQ ID NO: 1147 - DNA, 564 bp, Rattus norvegicus
  Genbank Accession No. AI009007
gacatttccaaactggctttaaacattcatcagggtgccacacgagggatctggggtgagagaattgttacatgtgtggagctgtgaagccctgagacacaagacgggaacccatgtgacaaggctgctggggtgcccccacccctaccacaagagagtagaatagaggccctctgtgaaggtctcagggctatgtaggagccagtcctcccttggaggtagatcatccgggagggaactgaggagcagctcccacggtggcaggggcagacagcggcttcctcagtggtactgctggtagttggggtaacctggggccggagctccctctttaggggttagctggttggggtcctccaagaatgggggtgcattgcggaactgctgggcagtatagcgggtgagaagtatgccaacaccctcaatgagggccaacaggatgccccccatcatcgcagagcccaccatggccagcggaccactgcgggcagccaacacggctccggtcaatgctccactggtgatggagttccaggggtcttctttgccccgcagccggaccag

SEQ ID NO: 1148 - DNA, 486 bp, Rattus norvegicus
  Genbank Accession No. AI009026
aaagaaatttgaagtctttattgaaccaattgcatgttaggttacaaagctatttcacttttccaaaatgctgtttctctttgtagaccaatctggccacaaaaggctacctggctaagtattagccagaaacttctaaatcccagtgtgatcttcttgtggcatttttccaacaaataatgcagaccaaatcacaagatggccacctcactggtcacatggtccttaggttaatgagcagaggctgacaggctgtctcctcactcttccaagaaccgcccccaagtgcacactgcagaaggaaagtttgttttgaataccacaggacagaaggacaggcagctcataactccagtggaaaaacatataggagagctgagtggcaacagcaggcactgtgataacctgggctgtcaaagtctctccgttactctggcatgcagttggagatcccatggctatgagcagccacagccccctcgtgcc

SEQ ID NO: 1149 - DNA, 557 bp, Rattus norvegicus
  Genbank Accession No. AI009079
gcactgcgtctggtttcgggttttattttagaatttataaaattccagtgtcatccatattcatgagcctttacacatgtttgcatataatctccaaattccaaagttaaggccaagggacggatgtagctatggaaacacaggacatggaagacattcaacaaggaggaaaagacactccccacccctgccctaggctcctcaatgtcttggaggctgcagagaggtgacctgggtacagtcaatttcatagtccttattaacaatcagagaaaaggagtgagaccctgaacagcttaggatagggctaacatctacagacttagcaataaaaggagatgtacaagatcctgtggtgagaatttaaactttaccttctggtgaagggagagactggatgttgtaggatgacaatgaagatgaagagggggctggaggggcatgagggaagcaaggtgtccccaatctcatgcagatgagagaagagccagctgcaggtaaaggcaggagccctctccccgcctcacccacctgctccagctgccagcctactgagc

SEQ ID NO: 1150 - DNA, 549 bp, Rattus norvegicus
  Genbank Accession No. AI009098
agaaaagaatattttattgaaacagtttctcaattaacaatggaacaaagtacaatttgattcaaacctgtccaaccagcctgaactgctaatgaaagaactcaaacacacaggggggaactgtgtaggacctttaagtctctctgccaatgtggcaaaaaaaaaaaaaaaaaaggtggagaggggtgggggtggggtagaaaagacaaaacaactgacatcaggtttgctttgcccctgcactggggtggccctacctcctgctacaggtgcaatactggaggacaggcactctaggcatggttatagtgggcaaggggctctccttcctggcaaaggacactgtcaagttgaaccctgacccctctttctttacccacaaagcttgcctgagagtgaggtggcatttttacattcacaccatgatctctgtcccacagggtcttgggaaaggggctcacagtagatagcacatttttggtcagcccagggggaagaaggaaagagcctgaagggtagattttacaggaactggggatgaccaggatg

SEQ ID NO: 1151 - DNA, 564 bp, Rattus norvegicus
  Genbank Accession No. AI009131
aagggttacaaatattcagattttattataaataaaatactgttttctttttaaacataaaaaacgccaagtgttgcgctttattaacctccctgtggggaagactgtaaagttaaggcaaacagctaaggtgaaggcacatttaaaagggccacagttagagggaaattccatggaggtgggggtaggataaaaacaatctcttctgggtgacacccggcattccacagcagccatcctgtccattttattacataaaatacagattattggaactatacaatagaataatgaatggctgtgtcgcaggagtgtagtaaggtatcatcttgtaaataactttcatttttaaaaataaaattctttttaaaaatataccaacaacgatggagaagacaaaccaaaacaccccacccaccagcgctggagtagagctgacccaaaggatgctggtggcctgtcagccattttcttgcaactgtgaccagaatgttaaagtggtgacctcataatagaggaactagccaatcagcactgagcttggtgaggccctcgtgccgaatt

SEQ ID NO: 1152 - DNA, 486 bp, Rattus norvegicus
  Genbank Accession No. AI009132
cctctcagtactttaatgctgtgaacatcagacctcggcagaggcaactacgagaagcacatccgtggttcctgcacggcgccctgcgtcacagcaagcccagcttatactccaccatcatgtgtggctcgcccatcagttcactttgtgatggatcattaagaatatcctcaaaaccaatggtctcgtcgttgcccctcaaaatatccagtgagaggtttgagctcggaagaaacggaagacgctgaacctgctgcacagccttgaactccatctgtaacttcaggggagcaaacaggccctggatattcctcagggtggaaaagttcatcttgtcctggttgagctggaaatttttttctgataattcaagagggtgactgggcaaaagttcatttttcacacaagaaaaccctttccggagaagatcatgactctcgaaaggcccactggctgagagttctgtaactggaatactgtccttca

SEQ ID NO: 1153 - DNA, 320 bp, Rattus norvegicus
  Genbank Accession No. AI009141
cagctttgaaccctgaaactgcttgtggcaggttcagttactgacagcacaaattccattgagtctattcaaggattgaatgacttcacaagccctggtctcaggagattaactttcatattggggtagtggttcacttgagaatacaaaatcttcagattaactgatgtccaaaatactgtcttaaatcatgagatccatcaatttttagtattgtctagacctgcaaatagaattacattgtaaaatctttttcagcatgtgttaagatgtatgtgaaatttttttgtttaagtgtaaacttcataccatactgtcag

SEQ ID NO: 1154 - DNA, 587 bp, Rattus norvegicus
  Genbank Accession No. AI009167
cagcgaaatggattcttttaatcactgaagacagtacaaactgatacaacttataaaaatttagaaatatgtttctaggccatgaaaatgtctatatcctttggcccgatgaacccattcatggaattttaaacaaagaagaccaagaacagtaaagctcaaccgacataggtatgttgtagtcatagcgacagatcgaaaccaccagctgtccagagaagtggtcgggtgagtgctcctgccacacatgtgggctcaaggcagtcagcactggagggatgccgggcagggtacagggtgggggcggagcttcacagtggtaaaacgaaggcgggctcctcgcatgttgtcatgcttccacacacagctagaaatacatgttacaagatgcatagagaaacagatgcccaaaacgtggagaacatgcagggtgaagttctgatgcgtttatccttctaggcacactgtgtggcgtaactgcacccctccagggactgggtgctgtcctcacactgtggggtgagttcactgccccagggactgggtgctctgttcgcactggtgtgagtgcagtgctccagcgttgg

SEQ ID NO: 1155 - DNA, 540 bp, Rattus norvegicus
  Genbank Accession No. AI009178
gggtatagaagtttaatccatttctcttacaaggaggtaacagtaaatagtagaggggtgatcatgtattatggcttcaagggacctcatgcacagggcagcagatgaccagccccagaacctgcccacccacccccaaagctaccacagtggttccggtgaattgagtgctgaaaacagacacctcccagtaaacactgccagggttgaggaaagtgaggcgttttcctgcccatcccgaaccagatacagcaatgcaaggtggtgaatctctggaaggagttttatgtagttctctgacaaccctactctgccctcagggaggagcatggctcctgtagtgggtgggcttaaccgctctttctcactcagttatgtggaggattctgggggctcagctccacctcctccctcctcatcctctggggatgatgatgggttgaagctgtggggaccatctctgcccatccgtgctatgaactctgaaagagttcttctgtaagaaaccaagaggatgccacatacttcttccttatccag

SEQ ID NO: 1156 - DNA, 487 bp, Rattus norvegicus
  Genbank Accession No. AI009341
aaggaatcacagaaaatgcattactttattgcaccaagatcttggcactatctgggcacccccacagaggaaggggaagagtacagggagtcctgcacacacacagacgcagccacacaggatgttggacagaaacagcccctaacaggcaggtgagcaagaacagaaacaccagggaggtggccctctgcaagtgggcctaagccacatctactgccaagcacaaagttcaaactgatttgatccaacagcatgactacttttagaaaagcttcatttatgtcagtacatgtcaccgagaactcattccgcctatggcctgttcctaatggcttctaaggaagaaaaggacttgccttcagtgacagcaacacaagctgccattagtcaggatggcgtcctgactgatggctgaaggctcaccatcccaggtcaaaatggtctgggcttgcactccccaagttgaactgctcttgggcctttgcat

SEQ ID NO: 1157 - DNA, 437 bp, Rattus norvegicus
  Genbank Accession No. AI009344
caagaaggaaaaccgagttttattggaggtctgagcagcaaggggtgtccgaagaagcagggctgatgcaggggacgctggaggtggtcacaggcgagcagctgggtggggagaggtgtcaggtgccaagggggctctggctgagtttcctggagccaggtggaggttctaccgcctgcgggtggacagacggcggatggagctgcggaaagttccctcctcttcgtcgggttccccagttctctgctgttggttgaatttgcaccggcatcttttgccgtaggtgaatggatctggttcctgcggagcttctgcactggccatggagaggagacacacacagacaatcatgatgtggccgggagatgccattgccctgcccctacacacctcagccagtggtctctccgtactcaggcagtcccagttctcctgcc

SEQ ID NO: 1158 - DNA, 437 bp, Rattus norvegicus
  Genbank Accession No. AI009362
gaaaggaaaactaacatttattgagcgcctatgggtatgtgtatatatgtgtatacatacatacacacccttatacaatgtatgcctggtcttgtgcaaggagttctcatctacaacattccgtttgatcctcaccccaaccctgtgaggtaggtattatcctcacgtgtcaggtgaggactacgaggctcaaaaaggttaggtagtttgttcagggacactgaactagagaccagtgagctgagactgagttttaagtctccggcagttctatcctatcccggttctttcctacccccttgagccctgtagcccatggctccccaaaaagaagcctgccccatcctgctctgcaaggatgcagtcagttgaggattaagacataaataaaataaatagcagggtcaggttcccaaaagtgaggacgtttccatact

SEQ ID NO: 1159 - DNA, 533 bp, Rattus norvegicus
  Genbank Accession No. AI009371
acacaagactgaattttatttaaagtatagtaacaatgaagaaaaggtagctatccatcaagtggtcctcaggatcaagttctagtgagagcctttagctgctccatatgtttctttgtgaacaaaaggcagaaaaagatacatttatcttctagataacacccataagttttctttcctaatgtagtaaaaagtaaaaaattggatgttttattatttaaggcttaatggaatgttaccacaaaaagtaaacagaatcaaagtttggaactgccctaatttataagggacagagattatgtctggtaattaagccttctaggataaaatggggtcatgagaagcttcctttataaaaagctttcttcaggagtgacatttacatcgacataaagacactgactagatctgagaatactgggaccggactcattaacctagtgagagaagcactgaaagagcccgtgtcaagccaggccgtgagacctcagggtctagccttggaagtggggcaaaggtgcacagtgtggctg

SEQ ID NO: 1160 - DNA, 472 bp, Rattus norvegicus
  Genbank Accession No. AI009390
acatacttgatgaaggtgcttcccttaaacattctctccagcggaaaacagagcatggagagcagcttctagctgctctgctcagggcctgggctcctccttgcccaaatggtgaggcggaggggtgtacttcccctctttcatcagcttctcccgctgtttcttgatttcatgcatccgccttatcgttttgaaccgaagaaagcattcttcaaagtcttcatactctatcttgcactcttttttagcccgggtagcaccgatcccatgtgcgcattctatccactccttttcaaatgcgtggcatcgagcggcattcttgtaaggctgctcagcacttaggaatataaagtgtcgatctaggctaatgcccagccttttctgcacatgaaggaaaggcatgacttcttggctgaccggacacagcaagcgcctaccgcacctcagcaatgcccttctcaagtccctgggc

SEQ ID NO: 1161 - DNA, 471 bp, Rattus norvegicus
  Genbank Accession No. AI009411
ctttgttcaagattttattaaacgtctttacaagacaacatccagcctccaaatgcagctgccaagaccctgttatgctgtaggcactggctgaggcatggcgggtggctctggcttcccacccttctgttctgagatgggggtggtgggcaagatttcatctttaggttccacaatgctcacatgatcaggcagaggcttcttgggaccaatcttaccacttgggtcccagggcagcatgatcttaactttgatgcccagcacgccctgtctgaggagcacatggcgcacagcagtgtcaacatagtggttaacaggggctccgctgggaatcatcagaccatccacaaacttcatggacttggccctctgccctcggagcttcccagagaccacaaccttacagcccttggccccactttccataatgaaccgaagcacaccatagcaggcccttcaaactgcaagccc

SEQ ID NO: 1162 - DNA, 209 bp, Rattus norvegicus
  Genbank Accession No. AI009415
aggcccaccccaggcaggcgttcactgcatttattgaatatccaacataaaaaaggtacccattggagctttccctttttgaaaagagctgaaaaaaaaaaattttaggtccacatggttttgggtcatttaaaaaccattttaaaacaaagcgtatggctggtgatgtcctcacacgggcgggcttgttgctggtaaagttcttcctt

SEQ ID NO: 1163 - DNA, 448 bp, Rattus norvegicus
  Genbank Accession No. AI009426
gagtgtgaaaaatagacctttatttcggtgttcacatgtgcttcgaaagcatgcctactgcctgaagcttgcacagatcaaaagaaatggaaccgtgtggggacagggcagatacaagactcacggtgcgattctctgcataaagcggaacgtgttaaatgcagcagtgtgattcttcccaagttcttctctgggatttcaggggatcccagagtctctgacctcaccccctagaaacccctccacactgcagccttccagcttgagggcccagccacagaggggtaggagtaggctaactcggatgatgacccataggcttctgtgcttttctagagacaaatgctgtgtctaggtgtgcttaccaaggaggaggggcatggaagggtggccctggtgggtagggaccagcatggacatttaaggctccttctgtgaaatccttgtt

SEQ ID NO: 1164 - DNA, 501 bp, Rattus norvegicus
  Genbank Accession No. AI009438
gccaagctgtgactgtttattaaccgaccagattataaaaataccacgggcaataccttagttcatccgtctaataagcctgtttatctggtcttccctgttgccagcgtctccaccttctacaaagtgagttgtctttttcttcattccacctcgtggggaagacagtttgaagggccacaggaagttatttgcttccttaaagcgttttccaactgtatagatctcatgaattagatcctccatgcagatgatgccaaatttaccaagagatcgagcaaccaaggagttatctgtcaaggcaatgcgctttttattgattttgccatagcctcgtttgtagatgagctcgtttactgacttcaggttggggtacccccatgcaatgtagggctccacgatcctcagcatgttcactgaagccttgttgagcttcacaaaggtgccattgaagatctgccggaaacggagcagctgcaacaccttgcgcacctttgggct

SEQ ID NO: 1165 - DNA, 532 bp, Rattus norvegicus
  Genbank Accession No. AI009444
acaggatttgtcaacaataaacatctttagtgcaaatagtgcagaaacttttctcaaaacaaatatagcaatcattctaatctatacaaaatcagtctcaggtgcatatatactctataggcatctggatgtcagccatggtcatgaaaggccaattcctaagtcataaatagaaaataatgtgcttaggtttgtgtcacatttctttcttgatagttcatgttttcaggaaaatctagagaggagcatggaactggctgtgcatggctatcacctggtgaagcttctcttctttagctcttctacagtggcaaattgttctcttttccttgaagctattgagaaaatcatctatttcagtttttccctccaggaaatcttcggcaatattatcagactcctcctcagcctcatgtgcggctactttcaatcttgcctgtagggcacttgcactacaactctcgctgagttcatgctgcctttgcatcttcttttaaaggtagatttcatttgtataagtaattcatactta

SEQ ID NO: 1166 - DNA, 459 bp, Rattus norvegicus
  Genbank Accession No. AI009450
ggagaaaggaaaccttttattaataaacttacacagcagtaatacaggctcagtaaagataagtccaacggttgtggccaaagaaaatgcagattatttaaggtgaatttgcttctttttcatctgattcctcatcatccatcacctgctccacgccttccacttctggaatataaaactgcagcatgttctgaatcccgctcttcagggtgatgatagagctggggcagctggtgcaggagccctggagcttcagccgcacgatgccatcttcaaagcctctgtagatcacgtcacccccatcctcctgcacagtcggccgtattctagtatctaacagttctttaatcattgccacaacttcgtcatcttcctcaaaacctgcttttcctggaggcgtctcctcagtcactagaggtaatccatatgcaaagaagtccataattgttgcataaatgt

SEQ ID NO: 1167 - DNA, 478 bp, Rattus norvegicus
  Genbank Accession No. AI009460
gggtgggaaagagaactaggaggtggttgtacataggacttccaccctcccagaaccaaagaagacatgctctgccaccaaataactccctctgcccaagtgaaagcccaaaggcaggtgaacacagcgcagggcaagggcgactgcagtgaatagtggctagagtgactcagggaagggagggtccagggcacaggaaggaaaatggggcttcttggggataagacaggtatggggatgctcattgccatgggagcttctggctggcaaagtggcaagctcagggcaccataatgcggtatgggctgcctgggatatgctcatcaccccacttgaccaccaatgtgtattcccctttgtctttgagcaggtaggagacactattaaggcgactgcccatgtgtttcaccaggatctcttcacaaggtgtccttgggccatgcacgcccaccagcaacatgttgttacctgctttgct

SEQ ID NO: 1168 - DNA, 531 bp, Rattus norvegicus
  Genbank Accession No. AI009467
aagcaaggaaacatttatttactacactcacacagtaatcatcaagcatcctgatgtttgcccaggtagcttaaaatagcaaatattcagtccccgcagaagaactgtcttcggttttaagccaagtcaaagaacagaaaggaaaactcatcactgctgagcactggcgctcaggctccactctcggatctgggacgaagaaacacaatcccaagtcagcttcctttctactcggcgtcactcagttaccagtcacggaacacaagctaaggtcctagcagcttatctgagacaagtttaactaactctaagatcacatgacttgacaagaaatgtacaaatgtttgctaagaacttaccgttctgtcaatcattttaaagagtccatgaaatatacatagcagtatttttgtaaccagaaactacactaattagacacatcatttagtttgttaagttctacctgaaaacatgccattttaagtaaaatcctaaacacataactcttaagttctatggtttaacaatcaa

SEQ ID NO: 1169 - DNA, 511 bp, Rattus norvegicus
  Genbank Accession No. AI009492
ccataatctcttatatacacatgaatttcacagtgtggttgccagtccttttttgtgaatgctatagacaaggtccaatggtgagactctacaatgagatgtggtcaggaggaagtgatgattttcaatcatctttctttccttcaagtttaatatcctttaattggggagagaaagaagtccattttcatcagctgtatctagaattttacagattactggagattcaaccccaagaatatactggcaggagtgaggctcaagcatatatacagtaacagcatgaggagaatctgattctttacactttagttttacagtcacctgtctgggtttgtcagttatatcacaaatatccccatttccataaaaatgtgacaccatcctgactgtctgggtgccatcgtcttgaagatgataagctctagcagtgtttttcttagcccactcaacatgctcttcttggttccatgtccccacaactacagaagttttcccattatctttggcc

SEQ ID NO: 1170 - DNA, 413 bp, Rattus norvegicus
  Genbank Accession No. AI009493
gttcacaaatgtcttagtagctttattcaaaatattcccacactagaaataacccaaatatctatcaagagatacacagattagccaatagtagtatattacttagtataataagtatatcataataggaatactgctcacccagaaaaaggaacaagctattgataaatacaacagcacacatgtcgaaacatgttaagctaaataaaacttcaacacaggagtgtacctcatctgacacagtcctgaacttcaatgaaataacagaacagacaaaattaatcctgagagatagagtagatgaatgactacctggggtgcatgaggggggagggggtgacccactgactgcagaaggagacagtgcatgtgctggtggacaatctgatctggcttgactgggactgatgttg

SEQ ID NO: 1171 - DNA, 510 bp, Rattus norvegicus
  Genbank Accession No. AI009501
ggctcttttcagtttattgcatgaaggagttacactagtccaagttaaaagcggaccccaaatgattacattatacaagctgtgaggtttttaaacttgtgacaagggacagaagggaaattctactcattgcaaggaaatcctcacttaagcttcagagagccacaagcacttaaaacccatgaaccttcagctgatcgtccttagccagtccaatctctatcaggaactggcatatgttcttgcgctggtcaccctgtagctgaattacttctccatattctggatgctcaattacagtaccattgcaggcaaatttcttcttaaacgccttcactagtttctttttatcgtaatcatcagcgatcccttggacagttgtaagggtcttcctgccgtttctctgttgaattcttatatggatataatcctcagtgccagcaggaagcaggtcatcacccttacttgcatcaacaaaggggtcgaaagaatggaggttctggatagcgg

SEQ ID NO: 1172 - DNA, 583 bp, Rattus norvegicus
  Genbank Accession No. AI009589
ccaggatgaagtaacagtttaaataattaccagaattacgtataaatgaaacattcattcagacaaaacatcactgttcacaagtagctaagaaatattttgcaatttatataataaatatatctgtgtttaggttaacaggcaccatcttgataacagcaaagttttttaaaaccaataaataaacattcaagaaaacaaggtgtttatatttgaaatatgatacagccttaaatgcttttcttcatatagcacccaaatttccaaactgtctagaaagtttctgaaaatataactcctaccttaaatcattaaaatagcgcccaagaaaaaggttaattaaagacagaatttataatctatattcgtaattctccattcaataaaatatcaattaccaacgtattaaaagtcaatggactgtatatatgcatctgttaatggtgaaagcctgtaatacatacatttaaaagtcactctcctgacaggacttaagacactgcctctctggtgcagacctgaaaaccaccaagcatgtctgctgctctggctgtgtcttccaccacactcctatcccccaacc

SEQ ID NO: 1173 - DNA, 523 bp, Rattus norvegicus
  Genbank Accession No. AI009601
aaagaaagaatgcatttataaaaagaaaaaagacaagcaggtctgatacattctttctcttcttcctccccccacatttattattttaattctgaatttaattaacttaatatacatgtgggaaccctggcaaattatgacaggctcataaaactagttacaagtagtccagacaagttagccaaaacaggcttcacataaaaattatatataatatagcaatcattccttacctatgcatcctgaaaaaccggttttccttgtaatgctttatctctttgagttcaatgcaaatattcctaaagtatggacatctttatacacaaagagacaatgtggtaggacaagtgacctcctctattttaacttttcttatgggaaatcatgaaaaatgtgctttaaacttgttctggaattcaaaatagggcctaatttgcaaagtaaaaaaattccaccaaattcctgggttgagctaagttgtttggaaagagtaaaggatttcctgtgcctcccaagctctgcc

SEQ ID NO: 1174 - DNA, 646 bp, Rattus norvegicus
  Genbank Accession No. AI009605
attttttttctattttttttttttattatggtttacagctactttatttacaactatacatttaacacaatgagataaacactgatagactgaaggactaaggtttgcagctactttatttacaagtatacatttaacacaaggagataaacactgatagactgaagcctaactaatagtactgtaacgtgtaccattttgatgactacattattttaaacaacaaactacactgaaaaattaatgccgataaaattcttggtcataatattaagaaatacaatatataaattgaaaatatgattgtttaaaatttgaaaatggaagtgaactcatttggacagagtcagacgttaacataatctgagaggggaggacctctgacccaaatgacatcgttcaggttaacagaacaaaacagaagcctagttttatcttcaaggatgacaggcagcttgcttcctcaggtggaatacactcaggctctgcatcacgcgcgtcacatcaccgagcacgaagacttcccttgtgaagccgctccgtcaatcttttctgcttccaaaattatccttcgaaaaacatccacagcagtctgattttcttttgcagaagattccaaaaaagctgcattccaagattctgccaa

SEQ ID NO: 1175 - DNA, 649 bp, Rattus norvegicus
  Genbank Accession No. AI009608
acaaaccaagaatatagcattttattcattttcagattatgtgtattacacaacatatacatatatttagataatatataaaagaaataaactatacgaagaaatattggtctgaatctgccttgtaggacgtctttaattcttccgtttgttgagtgtgtctctcacatgccagggcaggcagcacaggaaaccccagcacgtgtgtgtcactcaaagctctgcttttctccactgaacttagaatgcaaggaacacaactgtggcatggtcactggtgtccacgacaaggacacagtagtcagtgagccatagctcagtggattgtttaaatattttagcttcctttttaaacgaagactcagcgtccagagtctgtcccctcagctgctgtccagttattgtttggccttgttctgaactggtagatatagtttgaactctgctggcagctcatcctctgagtagagtctgtctgagaagtaaacccttcggatacgacagtttgcatggatctgcactctcagggtctcgatgtagtttgtaccatatgcccgccgggtgaagtcagataggttgaactgaatctggtttcagccatcatccagccgcatgggcatggtacagatgaagggcttgactcgagtgg

SEQ ID NO: 1176 - DNA, 597 bp, Rattus norvegicus
  Genbank Accession No. AI009614
aaaaaggaaatgtttattgttgtgttacaaggtgattataaactcctctaaaaaaagcaaagatggatttaaaatatcaatatacatattcatctaaaaagcaaaagagaaaaaaaaaaaccgaaaccctgcaaaatgcggggtcgccgtaattaaacatacacagagcttgtatactgcaagacaggtcacacaccaaggatccttcaaacacaaacgctcctccccttcttggttggtttcaggtttttgtgtgtgtggtttgggacttgatgaaggaggggtgtgcacacagaggtatttacagtgtccatagggacaggggtatcaggttccagtgggactgtgaggggccttctctaaggtgccttcctggcttacgtctgcatcttggagagagaaactgggctggcacctgttcgactgcttgctagagcattgccccgtccagaggggcggggctggaatgctgtcggccatggtagtgacaccctgtgatagagaaagccccttcctgtgcggagggggcacatgctgctttctcctcatgctttgccatggtctgcatagctttcctctcatgctacttcctgcata

SEQ ID NO: 1177 - DNA, 493 bp, Rattus norvegicus
  Genbank Accession No. AI009616
gtcacaaatacatatatatacacgtgcacacgccatgggccaccaccatactggggatggatgcccaggtaaggaggggcaggagaaatggggtctgaagacaggaaggcctaggaagcttaaaggaggccaagaagagttggacaaggcaaagtacctggctgatgacagggcagggtgacaccagggaaggggtcacaggaggtgcatacagacacaaggtggcaacgcaatcagagtcaacgcacttagtgtcccagggcaagagaagcaggtccctgccactgcctcccaggatgttctctggcttgggtgtcctggggtagctacacggaggggcataacggctccagtccatgggtccccatgtgacactgggtttggcggtttgatgggatctcggcctcctgctcaactgtgtccaatatggcttgggcaatggtaccaagtagcaaatgtccatctggctgaaggtccccacgtccctgtccca

SEQ ID NO: 1178 - DNA, 585 bp, Rattus norvegicus
  Genbank Accession No. AI009623
cttgcggccgctaccattttttttttattttttttttttttccattttcatgtttgttttattggaagcaatactccagcaggactcaggggaggaagcatggcaagtttcctcctgggtcccgtctctgccaccatgcaacaggggtgagggtggggggaagctaaaaggaatatgctagggtgtgggtgggcagaacagggtccagacattttcaacttggtcaccctcaaggaaacagcttcacagctcctgctctcagttaacaacaaggacggtttttaaagcctcaactgtcagcctccatgcacactgggtgcttttaacgtctgggtccccaagaaagctcaagagtcccactacccaccaggcttccctaaaaaagatggcctagaaaaggtgtgggtggtgttctgtggcttctggcaacatgtcccacaaagttttcctcggacttcaagaatcctctcttgtaattcttgagctccctctcctgtcgccttgggatccgcgttgtcattttgaggaccaatattcaggaacatgggccccttaaaacccaggtaggaagggtgcatgtggatg

SEQ ID NO: 1179 - DNA, 565 bp, Rattus norvegicus
  Genbank Accession No. AI009656
aacatgggactgtagtcttttattgactcttacagtttcctggacttttggccccaaatgggaaagaaaaaaaaagcaaattagaaacaacattggcagtaggatgtgacaatgcccctggggagggaagctgagtagaacgtggcaggccagcgaggggtccaagttttggaggtcatgagcctcatcagatatggccaagatggcagaatgcccaagcttcttgctcaggcaaagcttcaggaaaattaatgttaagatacaaggcttgagggagctgaagaatcccaggctctggtcccagcaaatctccctcccgctcagtctgactccactgtgcagaaactgggctcttctgacctggtggtcagtgagagatgacaggtaggccagccaaggagcacttagcactggcatcagggagaaggggggaaggccagaggccaggacagctgaccagacactaacccattgctactctagggcccctactccagggccatgccactccacagcccaggatagccaacctctgtccttcctagctcaggccaggaaacacttt

SEQ ID NO: 1180 - DNA, 573 bp, Rattus norvegicus
  Genbank Accession No. AI009710
aaaacattgcagatgtcataattgttaacataacaatttaccaaactgtagttaactggtgcagtttgctgagcatgttttataaagaaaaggaaatgccaaaaccctgttaaaagtttttccattgcagcctagaagaacaagatttgtttctcagacacttgaatcaggcaaacagaaacagagttccctcccccatttgaagtcctccatcaaaagaaacaggctgataagtaactagacagtcaatgcactggtgagtccacacttgcactgtaataatggagaagtttaccttcttcagcttcaaagtcggagggttttggtcattaaaatcttaagtatcaaactagtacttttcagccacagtatcttcactctgagataaacattcttcttcacaacaagtttttaatatcctgacctcaattttaagacaaagcaattttaatactaggtgcatcccacatgcccttgctgcaaactgcttttcttgacaagttatgaagttgttcaaggaggtatggttaaagctggattactgaatggtgctggtaaatactacactttttt

SEQ ID NO: 1181 - DNA, 314 bp, Rattus norvegicus
  Genbank Accession No. AI009794
aaatcccggaagacatttttattttactctaaattccaccatttcccacccagttttttcctttaccaacatgcaagttcttttccctttttgccagccaggccagcaggggggcgggaaaggcggggggaggccttcctgggcagtagttctgattctttgatgtgaaaggggccgcccagtcatttaaacttgatccaacctttttgcattttacgaagttaaaccgctaaaagaagtaaaattagaaggcaatgctcggggaatgtccagggcatattgggggggctcgcctaattacgattcgccagctt

SEQ ID NO: 1182 - DNA, 622 bp, Rattus norvegicus
  Genbank Accession No. AI009796
aaaatgtgtaaactgaatattattggtaacattttaaaattcaaataagttaatgtgtcgtgtctgtgactccggacagaaggctgggtagaagtaagagtagctcggacagggaattaacccacagaggtaacctcatcatcatcactgccgtcagggactgcatctgtcccaaagtaccggtcaccaaagttcccaatgcctgggatgatacggaaaaggtcattgacacgcttgtccacggctgtggtgatgattctcacacgtgggaatgcataggccacagaatgtacgcccatctctgccataagcagggatatcaaaaagatcttgtcctcaggcacatcatggtccaggagtacacgtacagccatcatggctgcagcacccgtagatactgtgcagtccatcaggatcacatggtcatcactaatatccttgggaagtctcaggtaatggagctcaggctcccctgtgagctggttggtctggatgaggatggtgccgatacgcacgtccttgcacacagcacgcagcgcaggctccatggtttctcccgcacgcagaatggacacgccggtgatctgttttccagcgtagcactttcccacgtagtcctgcg

SEQ ID NO: 1183 - DNA, 558 bp, Rattus norvegicus
  Genbank Accession No. AI009801
ggtctcaaaccatttatttctcccgaccggaaggtggccatcattacgggtggataaacacagaacggggcgtgcagcaagactcgaagaacagcggtgcaggtaagtgaggcccgggctcaagcgaaggtggaaccgttccagcccacgttggctgcgttcatgtcgtaatagttgatgtagacccggtccgggctgatgtgcaggcgatcggacagcaggccgcacagcagcttgctgtagttgcggttctgggcgccaccgatcttgccgatgctgtgcaggctgcagagggcgcaggggtcgctcgtgccgctaaaagtcatgagctggtccgggaccacgtgcactgcgatgtactgtgccggcttgccggtggcctgcgccagctgctgggtgagctcggagagaaacccctctggcacggaggcgcggggaaaattggtgttcacgatgaacataggcatggtggcggagagactgcgagcgacggccggaggacggtgtaaagcgcggtgtgacccaagtctgggacctgagctacgtgacccagctcag

SEQ ID NO: 1184 - DNA, 601 bp, Rattus norvegicus
  Genbank Accession No. AI009806
acatctccaacagatttattttaaaggaatgacctaagggagaaaaaaatgggggtacagaagtatggactagaaaataaatacaaatgtaagctgttttactaattttataaccacaaacgtgtacagagaatggtgccctgtacaaaacacaacagattcaaacgaggtgttcccttagcaaggctgaagattcagtctctggtatttggaatttaggatgcagtccttgtttttggatggatcactgggtgtttggcacagtccatgctattaaccagatttgaacaggagaatggccacctgacccaggtagaagtagatgaagtgtttggtctcgtgtgtcacgtagctaccgaagttccggcccacgatgcagtgccaggtggggttgtacttcttgtcaaactccttcttgatatgggccgcgatatccttctctatgttgtacttctccaacgcctgagtagcgcactccaccgagtcctgttgcatctcttccgacatgtctgcatttttgatcaccgccttccggtcgcacatggttaccgtggagcaggggccagccggctgctgcgagctcctagggaaggtgctggcg

SEQ ID NO: 1185 - DNA, 383 bp, Rattus norvegicus
  Genbank Accession No. AI009825
gccttcataagaatttttattattatttagaaatgcagttatatacatagaacaattaaaattaaattaaactttgtacaaatattaaaatactatcttcatacccactgcaatgtacaggataccaaaaaatatatatataaaataaaataaagcaaacccagattgacatcctgcacagtcaattaagcatgtgttgttttaaaccatgacgagtaccattctgcaaaggatcccatagtggtgcacagcctcaagaagccaggccagtatggatacagccatgcaaccctcaactacttcctctccctactccgcattccccacggtgagctctgctactgggagaggacagggtagggtgtgtgtgtgtgggggggggg

SEQ ID NO: 1186 - DNA, 516 bp, Rattus norvegicus
  Genbank Accession No. AI009928
caagtgatatgcaaaccatgttcctaagtgaatgttactccagagccagacaaacaagtcaatcttttactgaaggggcagcctctcatgtataatattcaaatatactaacacatgaaagataacatcgtcttgtttatggatacatttaatatcccttacccttcccaactttcaaaacaatagtatacaaaatataaaatatcttaaatatttataaaaatcgcaagaaaaaatagatcgtatgaaaatatctttatctgagttctccctcactgctgaaaggcagcttggtctgccttgagtccgtagctgttgaggggtaggagtatgccctgcctaggactattctgtcccgcaggagcttaaataaaacatagtagttgcagaaaagaacgagtgccatggaaagcgtgtggttccacttttccgagcgcagcagcgagtacagctggtagatgatgacactgccctcgatgaggatgagcaggttcaacactcgtaacgggcgatgga

SEQ ID NO: 1187 - DNA, 527 bp, Rattus norvegicus
  Genbank Accession No. AI009936
caggactaactacatggcctttatttcttccagatcaaggattttgggtataatcatataaagatgaagaatcaagttttgcaacctaaaaatatttacttcttaaatctatattaactttagtgaactatacaaaacagataaggagacacacatgtacatttatagaactgcacatcagtcaggccagatcctgcagagggagttcccagcatgacctcattcttctgtgaggacacagagcagtccttgtttggacatacaccatcttctcctcatgagccgctcctcacctcttgatggttcccttctaggcgtgtatgtctagttgtctgcttctcagagcagacgtttaccttcctaatccaccggccattggaggagggctggggccacgaaggtgactgatccgacccattcttcgtggagggtttcctggtggccctcttccgtcatcatatctggaatcagaggagcccccgtagcctgttcttttcttcacatcttgctgaagccgagttttgaaa

SEQ ID NO: 1188 - DNA, 186 bp, Rattus norvegicus
  Genbank Accession No. AI009939
aaaggggaaacggttttattaatcatagtcgggaggcagcaacaatgtgtgaaatcccttggggaaaccaagggaaaaaaacaacccccccgttaagtccagaggtcattacagggcaaaccgatgctgcataaagttccaaacaggccaggctgtaaaaaaacctgtgtaggttgagggtggaaa

SEQ ID NO: 1189 - DNA, 104 bp, Rattus norvegicus
  Genbank Accession No. AI009950
ggcaatgcacacctttaatcccaggtcttggcataggtaatgagtctgaagccagcctggtcaacacagtaagttctaggacagccagagctatatggtgagac

SEQ ID NO: 1190 - DNA, 244 bp, Rattus norvegicus
  Genbank Accession No. AI010025
catgtgaaagatttattggggtaggtagtgggtggaagagaaaaagagccgtcttccaagacctgggcaggataagggtgcactcctttggccacaggtgatgatgcggcttctgaccctgagggcctgagagcaggctggttctggaacgtgggtggctgttggttacaaacatccctccctcttatttactggctacggtgagaaattcggatggggtgatccatgaggccacacaggatca

SEQ ID NO: 1191 - DNA, 491 bp, Rattus norvegicus
  Genbank Accession No. AI010083
cacagaattcacgtttaatagatacttaaaaaaaaaaaaaaaagagagagagaattaacaggttggtttctgtgactgatataagatggtctgccccttaccaatagtggaagaaaggctaaccacccctagcccttgtaggaaaggcttatctggaatcacaccacgtcatgtgtagagtacaaatttcttctggctgctcaaagctgtctgccagaaaactggtccagtgctcacttctgcttagagaaatactctttactcttattgacatcaggcttgatggtatcactgccaggtttccagccagctgggcacacttcaccatgtttgtcagtgaactggaaggcctggactagtctcagaatctcatccacagagcggcccacaggaagatcatttattggtatctggcgaaggatacctttatcatcaataataaagaggcccctgaaagagataccttcatcagcttttaagactccataatc

SEQ ID NO: 1192 - DNA, 565 bp, Rattus norvegicus
  Genbank Accession No. AI010104
gaagttttcctaaattttattggcactgaaatagaacacagattgagcataaacccctccaaaacaattatttaaaaaacaaaaatacacaaaaaacctgaatataaaccctaaccttctccccagcctctgtgggagttggttattgcccttaatgcagctagattgcccccacaattccaggtttgaatttagccaatataggacagctcaccgagtgtcaatataattcacagcaatgcatataagattccccaaggttaagtaaaaggggtatgggctgagggaggctctaggctagggatactgcatggaggaacaagataaccttttgggaactaaaccctggggaaaaggcagacaggaacaataaaaccaaatactaagtacattttaagtggattgtatgacctatagtaacaggtaaatcactaatactgaaatcttcttacataatgtttttggcaaaatatcatttttaatatagtatattcttctcagatgtggggtgagggtagtaaaaaattatgaagcttaaatgatcctgtcccaagactaatatctt

SEQ ID NO: 1193 - DNA, 484 bp, Rattus norvegicus
  Genbank Accession No. AI010110
atagaaagagatatttaatacttttaaaaaaaaaaaaaattaggagtaaagtccacttcacaggctggaggacagtgttgcccatctagggggcatgggtgtggccccacgtaccagggacaagccacgggttgtggggcagctgtagagaagagtgtaactgagtccagccaaagcctccctcatgatgcagagccgcggctgtggccagcctcgcatgctggttgaaaagggacctgccaactgcctgtggccagctgtagagtcacatgagcaggtagcagtggagctggctcaggggaaggtgccagggacctgggaatgtccactcttcagggcctttgtgcttggtcttcaacagggctgagctgggtctgtggtcccatgggaagtgtacacgttcatgccttgtgcacttctgcatgagcagcaggtgccaggtgtctccatatgctgagctggctgtgcttgcagcctcgtgccg

SEQ ID NO: 1194 - DNA, 273 bp, Rattus norvegicus
  Genbank Accession No. AI010123
gccaagactcaaagaaaaaaatttatttacaatagagaattttatttgaaacatgcattctttttaaaaaaatcaaaccagcaaatgtgggtcaattgtacactccttaaggcaagagtcccgatgcaggctgcatgtgttcacgtcacttcagatgctgctcgccaaaaggcaaggccaaggtcagcaattcgtattctattagagagtctgatgatcctcctggtacaggaactccgaggtcaacttgctacgaattatactagaaaatgc

SEQ ID NO: 1195 - DNA, 450 bp, Rattus norvegicus
  Genbank Accession No. AI010196
gatcctgggcatcctttattttttgcataggcataaattagagtctggagaggtttgatttgttttgttttgaaagaatcaacagtgcagcatttgtgacaggagagcgcaaaacaagccctgagggcagggctgtacaggttgccagttcaccagaacacttaatgggcctctgcttgcagctcctcctggcccttccatagaccaggcaggaccgagctcctttcagagccaggaactagaaactgggtaacagctggtgcccctcagaatggggctagaaatcaagcctgtagctttttcagttaaaaacaaaacaacaacaaaaacagaccttgagaattctatataatacaacagggcaattcaatctaaaagcctcttcctcctccccacacaaggtaacttttgccaaacggtaccaggtggtgccaacccaccagtagagaa

SEQ ID NO: 1196 - DNA, 738 bp, Rattus norvegicus
  Genbank Accession No. AI010238
gaagccattactgtgactttattacaatagttacaaacaatagttttgtggtatacaatcatcacaattactcaaattatatacaaatagatctttttacaagtctacataaaaaaagacccccaatcacattatcaacaagatttttctctaaaagttatggccaaggagaaaaaaattcacagttactctgcaaatactttaaatgcagcaatcatattgcacataaaacaatcataaattttaatgagcagatgtatatcttttaatttagtttttctacaaaatgtacatttcatgcaatactttactgtatgcagaatggtagagctagaataaacagattaacttacaaactgtttcaataatggccacaaaattagaattattttgaagtaccatttaaagttatgctgaaaaaattgcagtgccagaacttaacggacagagtcaggtacttcacagatggagttactattctagtgttcttctttgtcttttcctttcttctccttctcatcctgcagggcagtcccgagttttttgatgagaacggatagcaccttatccagtgggtccatcactcctctctgaagccatttgggaatagtagtcctggcatggtgaaagcccaatttttgaagaatgtaatcaacacctactggatcaatctttcttccagtccaagaaattaatctaagagtaggctccagatgccatgtgttacacataaagtct

SEQ ID NO: 1197 - DNA, 572 bp, Rattus norvegicus
  Genbank Accession No. AI010256
gaataaacaagtttatttgtaaatttagtcaacatacataattgacctaaaaacttcaataggatacttttaaaaaccacttgaaggccatctctataaaagggatttttttgccaggatagtaaccaggtgtaacctaacccatcttcattggcagagtccaataagctcaagctgtactcttacccccatgtttataaactccacaaggaaaagcaaaccttgtacagttttcccccttaaagattaaaaacaaaaccaaactcagtctaggtgtaagaccaaacacaatgaaaagctcactaactagattaggaacagatgatgctggtgtgaatagcttgttgttttactctagagcccttaaagaaaatccccgttagtgttttgtgttaccagccagagggtcaggggttagtgaacatgtggtagaatgaggacttatgcaaggtttaatacgcatagcattcttctactttgttaaaaacaaatgcagtctagtcagaaataccaactggactaaattacacacaccttaatgacaagactccccaccacttgtgaatgtaaaa

SEQ ID NO: 1198 - DNA, 247 bp, Rattus norvegicus
  Genbank Accession No. AI010260
ggccccggtcccggggctgagctgttgaaacctgccacaggggtggctcgcttaccacagaggctggagttcccatcacaggtgctctggttgtcttggctgcccgaggcgggcggaacgcagcggggagcctggccgggccacctggatcacagccacagttcctaagagaaagcgctccgagccccttccacagccaatcctccgtcatagccttccagcgagcagccgagccaacttcaccaaa

SEQ ID NO: 1199 - DNA, 651 bp, Rattus norvegicus
  Genbank Accession No. AI010275
cccggggagcccggcggttccatctgttctgtgtttttttttttttttttatgccaataacttaatagtttattagtcagtcaacaatattacaaatatttaaaaatgacttaatataaatagttggcagcaaactattccattacagagttaaattaccagtacaacagacagactggagatttagacacctggaagataacaataaaataaactaaattatttaacaaaaattttaagctgaaggcgttttacctagtgtccataaaagcatgggttctctttttatttagaaaaaaataaaaaacggctttaacaccccattaggaatataaaataaaatcaactgaaaatattaatttgcatatcaaagaaccatttatagttacaatccaaacactccataaaccacttgtgcgattctatacagaaactgggaattagaaactagttgctttaatattacaaagatttcagctccaaaaataattcaacataaaataaactttagcaattagtgtcataaaattatatattttcacataaaaatacaaaataatattaatgacaagaatatgaaaaattattccaagtattttactactattaaaataaaataaaacccataaaaacaaaatagaaatatgcatg

SEQ ID NO: 1200 - DNA, 561 bp, Rattus norvegicus
  Genbank Accession No. AI010277
atatacatatatttatcaaatataacaaggtcatacaaaagcataatataattcacacatacaaaaggctgctgtatttgttgtcccttttacatcctatcttagacaaacaatggtgcagagaatgacaggtttgcacaacattctgaaaactaggttgttggtttttgtttttaacaaaacagacctggtcatctacaccttctctcaaacttctgaaaagaggcttactggggtgtaccctttggatcaacttaaataaatcttcactccatctgaaagaactatacattttcagtggttgaaagtcaggtagaaaaagaatttaaaatgacccataagtcaaaacatttcttataaaagaaagtttaaacaaacccaggtagcaaaaaggggaaatgtactgaatttaaaaacttctgaaaatagcatctttcctggaccactgtacaaaatgtgttcagaactgttggaaacagtttatacagacaagactacgggattaaaaaaacaaaacaaaactcccaacccctaccaaatgtattaaatccatttaaagtc

SEQ ID NO: 1201 - DNA, 515 bp, Rattus norvegicus
  Genbank Accession No. AI010339
  misc_feature (1)..(515): n = a or c or g or t
aaagtaaactctttttaattgaacatttctgtctcctgttattctgcggggtgagaactgtccttccttacgcacaaggaccgtctcttcgccatcaaactgtcggtgaggggttaggctacgagcaagcccacagcctcttcagggtagggagctcagaccgtgattgtatttgcactgtttgagggcctcgctgaagccctcacacagggttaggtcgctctgagtggtggagcagtccaggaactgcttgatctcataggcgcagggccccatctgcagggggtgagaggcaggacgggcaggggcctgctggaccgcaggctgggcaggctctgagcttcccccactaaaggcactggtcagggcgctacccatgacatgccctacagctgagcccacagctacgcccgcggcggtggatgccatctgagccataagacccggctgtcccnaggtggcaggtgcggnggcggnggctgaaggtggtgggtgcgcangaggatgggctgggc

SEQ ID NO: 1202 - DNA, 459 bp, Rattus norvegicus
  Genbank Accession No. AI010341
cagggatttattaaggcattgagcacagtgtggtttttagccaactaaaatgagggcaagggaagagaggaggacctgagggatgtgcttttaaagttaatgatgcagaggaatggagacctcataagttaggagtgcggtgctcctacccatgcaacagacattctcctgcttcctcagtcctaagacttagattcaggctgaagaacttcagagggtgtctagaaggttgcatcctttggagcccaagcacatggcaaaatgacaactggtggccaggccacatggctgtaggtctttccataaatagagcaactgatgtagtgtgtgcacagcacagagtgcaggagcaagaagcaggcaggggcagacccaaaaggctctaatgctatgggtacaggaggcaggtcctccaggtaaccaagtgcagggaggaagaggttgccctgtcctagggaa

SEQ ID NO: 1203 - DNA, 632 bp, Rattus norvegicus
  Genbank Accession No. AI010351
acagctttaacgaagtctttattattgactcaaaatgtacaaagtttaggaaattatatgtggcactctaaaaataacccagtgactacgagaaacagcaaccttcagtggtggcttcaatgactaagattcagatacaatcacaatgaattccccatacaaaccagtgggtaaattaaaactcatcattatctgcgaaacagcaacaggccttatctctgcggcttgtctctaatgtaacccatcactgcttgcttaatctgacgtcaggagctttagtgaatgacgacacaggacgacagctgaggcaggaaggtctcccaaaggaaggtggctccaggcagtctgtgttccaaagcgcttgcagatggacagacttctgtgccagcaaaaggggaaagctacatttaagttttgttttcttcagtagaaatgttgatttatttctcccagactctcaaatatcatacatctccattaggtaggctttaggcaccaagccaatggctccctgcatttctcctacccaccagccatatctattgtattccttgctaagaatgtaaatcacatcaccacgcttaaaggacaactcatcagaaagagatccagtgcagtcccacaagccctgg

SEQ ID NO: 1204 - DNA, 620 bp, Rattus norvegicus
  Genbank Accession No. AI010357
gttattgggcaaaaccgttttattaactgacccaagcacttcattttttttctgatttgaggtaaaaccattaaacacagctcacaagaaaatacaatgactatttaactacaattacaagagtctgaaacctcactagttgttcagataatacttttacaaatgtatacaactgcagagtctacttaagctaggtttagtattaaccaagagtattatccaagacctagacacctgactactatttttgaagcgactacgagttttgtaacaacagaaggatttaactgttaccttaggaatgtattttcctttcaaaatcacccagctagtgccatgtagtgttttctcattcttcagagatgtcagtggaagcttttgaaaagcgcacacctgttcctgtcctgtatattgctctcaaattttacatttggccaataaccacataaccattgccctgctacaagcaacagatttttcttttgcaaagttctaccttgaattttcagattctgttgtagttccaactgccaattaccaggtgtgtgagagttactgtgtgtgggagtgtccacgtggggacagggatgataaatcagtccatgaacacaggcaatgtg

SEQ ID NO: 1205 - DNA, 612 bp, Rattus norvegicus
  Genbank Accession No. AI010453
  misc_feature (1)..(612): n = a or c or g or t
gcagaagcatcaggccaggccagcctgagtttaatattattaggaaggggacccgatccagaagggatgtgacttctgaggacagtgattaacgtgtgggatctatcacttttcccacaaagagggggctctgagtttctgattcaactatcatgaaaatgaaagggtggtcgaacttcacttgagggggcagagacatggggacggcctccaccacagtggctcctgcagcctctgttcccctctcatctaaggtcagcacagccttatgcacagcctggctaagcttcaggggggcatcctctgtgattccagagagatcagcatcattgttgaagacccgggtgatgcccagtgagctcaggagtgtcttcaagttataggttccagagatggacagtttggggaagtagagaatggctgaccttgtttgcctgtttagcaggaaccgggaaatgagatccttggngagagtttgctccagatgctgcatcttgccatcatcgggcaggaggaagatggcagtggcgttgcccaggtaatccatcatcagcacccagctggacagtgtgctgcaatagggcatgtcaaacatgcccaggcggttcatca

SEQ ID NO: 1206 - DNA, 152 bp, Rattus norvegicus
  Genbank Accession No. AI010461
aaacttgccaaggaactgaattatatttattttcaaaacagtaccacatattgaagaaagactataatttctcccttttaactaaaaatccaatgattcagatgaggcttttttccctggctataggagactggaatgaaataattttaagt

SEQ ID NO: 1207 - DNA, 439 bp, Rattus norvegicus
  Genbank Accession No. AI010470
aaaatatgcaatatatttcgatatcgtatacaatttaaatatggcgtgatagcacatgtcttgttaatttagaatatagcttttgaggggcaaagtctatagttgatcacatttaggagctttggaatcctggctcctggatggaactggtgatggaggaagcccctgagctgagggactggtcttgttgcagggaaatgagctgtacaaccatcttcatttttagaatgttcttgaaaacaccttattttcctggctactccttggtagatatttggaataaagtagtcatgctgattaacagtgtatagagtatgttccaggtcatcctgtagctctgagacgatgcttgatttggtaaaacagtgtaggtagttaccatccccgcatgaatatggtcagtcacatggcagtggagtaaccaggttcccctcgtgcc

SEQ ID NO: 1208 - DNA, 590 bp, Rattus norvegicus
  Genbank Accession No. AI010480
gaaaaagaaaatcagactgttttattgtcattatcaacagcccatagtttggaagggatgctgatgctgacacaacaccctccaacaagcaaattagactctcaagtagttcaatgacatgatgctgaataagttaggatgctgctgctgctgctgctgctggaggctcgaggctcacactcacttcatgttcttcacaaagtcctcgcctttcttgatggaggctttcagctcagggatggcctcggcaatcattttctcctcaaaaggagtgattttgccaatgcctaggttcttctccaggccttttttccccaacagcaagggtgtagagaaataagtgcactctgtctctttggactgaacaaaagagcactcgatgactccttccttcccattcatggcgtccaccagggagaagacaaagcgggctccagcataagccatggacagagtggcagagcctgctccagccttggccttcacgacttcagtgccagcctcctggatcctcccggtgagtgtggccagctggtcttggggaaagtcaaccttgggggtacactgagagatcagggggatgatcgtct

SEQ ID NO: 1209 - DNA, 492 bp, Rattus norvegicus
  Genbank Accession No. AI010483
aaaatgggtagaaacattgttttattggggaaacatgtaatttactttcagtttttaagaatacctagcaagcatccaagaagaaagcacacatagtttcaaaggaacaaggacagacaaatgggctggtggccaccccagggacactgccttgaaaagtaagtaaggtgagtgtcataaataagactttcttactttataagaaggaaaaatcaagatcctgttttgatgtgtattaaatacaaaatataaaatactctctgacccagacgaggggtggaaaatcatccatccaacacctctaggctcatgcaataaaatccagaggtctgttgaatccgccttttcgattcatgtactgcctgtatttcctcttctgagacacgttgatggcataggcatttacagagccgtctaccttctttccctttgtggagtcaaaagaggcaaatcccattaatttcatcatttctatttcctcctccgttttac

SEQ ID NO: 1210 - DNA, 427 bp, Rattus norvegicus
  Genbank Accession No. AI010499
aaatagtaagaaaaaattcacagacagaaaaatttttgttaccaggtggccataaagaggtttcttgcccacagtgaactgatagctgtgacccacgtgtggttcctatggcgtcttggaagtacctccaaccctgtgaaagtgcattcctcacacagggctgtctcagaacagtcagaagaccctcgccttacaggacaagtgccacaagcgtgacccccagtgagaagctgctgggtgaggccttgcatatacctgcccccctaatacagtgcctccctagtcacaggaccctgaaggcactggggttcaaagtgtgtacatcccacatgttaagatgacctgaagtcctgaaagctaagagcattctctgatctcagcacgagtcgctccctgaagaaaatgtcagatgtgcacccagcccttg

SEQ ID NO: 1211 - DNA, 497 bp, Rattus norvegicus
  Genbank Accession No. AI010581
agagtaacaaatgtacttttaattgatttcaggtaaaaactccaaaggaaggaggagcagtaattaactctggccctaacatatcagagccatgtcatctacattagaaaaaaaaaaaaacaccaaggcattatgtcctcacaggtattatgtcacacatgtggctggccaccaaatctggtcgtttatattccatatttcttctttagctcttctaccttttccacataggtcttcatggcattttccttggaagttcctttcagcttgttccacgagtcccacttggctttgcccttgaggtccaacagccccggccgatctgtgtttacatcgcccacagtagcttgtttgaagtggctgtagatgaacagcatctcttcatcagttggctgagtcttgaggcgcttcacctcctcagcggctttgtcaaaatcagcctgagacatactggcgaggtgacctggatgctgaaagcgcgggagcaagctcagaag

SEQ ID NO: 1212 - DNA, 442 bp, Rattus norvegicus
  Genbank Accession No. AI010593
acagaaaagctatctgatatttattaaacttagtttctccagctatggtttggcattatacaaagcatcataatgacacagtagagttaaaaagagttttacaaattgaaatgtgatacccttgtctccaaatattttaattgccataaatttgtttaaaaatacacattaaacgcatgtttgacactctaaactctctataatctcgataccacaaaatacatataatatactatacagatgtggaaaatctagttagtatgtaatactttgctcaccattaacagctcgttatgtgaatgcacatactgacttagaaaccctagcttttgagccccaaagtacctctgaaatttaacatattgcaacaaataaaaatcacagtatacaattgaaattttggttcaaagtgtcagatgcctagatattttggataaaagaa

SEQ ID NO: 1213 - DNA, 464 bp, Rattus norvegicus
  Genbank Accession No. AI010618
aagaacatcagctcctttattatgaacattattatttactcttatcttccccctaaacaacagctcaattcacacaatgaagacacccccacccccacatacacaataccactagcctgcgtgccaggctgtctgacctttgcttggttcctggtggagctgcctgaagacagctctctgtaaaaacctgacttggacacaggggacacaataaaggggaccttagccggagaattaactgaggggctcccagagtccttggtggtgatggtttgagagccatggggtcatgctgcgaaaaatccagactgtgttttatgtggataaatcccatatggggatataagacctatctataacctcttctagacagagagtttagaaacacactgaggtaagccaatgagtcccatcaaccaagccacatataaggagggcccagagcaggggatctgggtggtggg

SEQ ID NO: 1214 - DNA, 417 bp, Rattus norvegicus
  Genbank Accession No. AI010660
cacatacacattagccattcaatggagaagccgaagagtcaggcaaagatggtataacagaagcgcagtgacgggggtggggtggggcggggcgggcggagaggggacagacgggctggctgcctacttgcattccgctaggacactgaaaacccagaaaacaaaacagacagtaaactacccttgtttcttatgtatctcagtgcagagacgggggagggggttggagggcagagaagggagaccaggctgaaagaggagcagagggaagggacgctaaggggaagcacaccaaatccattagtactatatatatagagatactcgtatatactgcgtttcttagcctaagaagaaacttgtttgacgggacgggcggcctttgcggtccgcgatgctggtgctggtggggcgcac

SEQ ID NO: 1215 - DNA, 380 bp, Rattus norvegicus
  Genbank Accession No. AI010755
ggttgtgcaaaactattgtatttacaaaaatggcacaaaagtgaatgcaatagtcagtgcacatgcacgcccattcacatcttcaacagagaaagctgtccccacacactgcagaaccgaggaagaacactagcttcagtgacagctggtaagcactggagtcacacaagtcacaccagagcgggcaaatatcgcccagataagatgctcttgttaaagctggaacagcaggtttaaggccgtcaagtccaagccatcaaatcttttgcagcccatttacttgtgtttggattatgtgtcttgtcttccaacttgtggtcttaaacttctgtcttacaaaattcaaaaggaagatgcagaagaaatcaacacaacagagg

SEQ ID NO: 1216 - DNA, 382 bp, Rattus norvegicus
  Genbank Accession No. AI010758
cagccctccattaaggtctttattagatttccccgtctctcaaaggcttaaagaaatgaacattcaataaccagtcaggcttttatttgtaaagaactgaagttacaactggtctacaatatattatcgtaatataaacgacataaatagaagatcctgtaggcccaacactagtcgtccgcccagacccactcgaagccatgttacaatactgtctgtgaacgtgtgcagtaacaaaggtgcaatccaagcgaggctaagcagcagagaaagtgcttccattagcagttaacatcgccagcaaacatctgacgctcctttaattccactgactagacacacataggaagtctaaaattcacacacatgctacttaatatga

SEQ ID NO: 1217 - DNA, 206 bp, Rattus norvegicus
  Genbank Accession No. AI010862
aaaagggccaaattaaaaaccttttattaacaaaaagcaaaaccgacaaccgggggccggccaaagcaacagtaaaaggcattggaaaagtgcaggcccagctgccccggggaaaggggggtgtgtgtgcgccccccccccccaggttcaactttgggccccggccccgccccacttagggcaaaggaaaggcccgccccctcccg

SEQ ID NO: 1218 - DNA, 501 bp, Rattus norvegicus
  Genbank Accession No. AI010944
gacataattcacctaaatagaatagatttggatataggtagtgttggccaggtttatttaaataatgcccttcagttgctttaactttatttcctgaatggtataatcctagaaatatatactattcacttatatttgcaaatgaaatgcaaattggacatatacattaaagggatctagcacatgacaggctcatcaaataaatagtgcaaatacaccgaatgctattatttttttctgctcaaactgcttattttactctttaatattttcaaaatttacaaatcagtatcttagacaagctaaagaaaattgaaaggagcaaagtccttttacaattacactgccttgcctctgtcttgtgcttaccaaaccagcttctggaacattcatcatttagagcagcgatgcttttttcctgttccatagccattcccattatttcacttgtgtaatcttttcctatcaatgacatatatccaacaggataatcactgggac

SEQ ID NO: 1219 - DNA, 546 bp, Rattus norvegicus
  Genbank Accession No. AI010958
gagtaagacatctttgggcattccacttgtggaattttgcataaacaagccactttaaaaagaagttctaggctttcgaagtttaataaatgaaaggctcttgccattatcagtcatgattcaaacagtgtgtgctcacaagtacagcagagtctgagccagggagttaaaatgtaataaaacccaggagaatttgaatgaggtcccaacaaacaataaagtgcactgctttcccaactcaaacctacggcataaccttcatgcagacagactagggagcaggtaaacacaacaatcatcttcaaaagagttttagaaaacataatttgattttattcactggcatcctctgatcatcccacacactgggggagagaactgaaccagaggtcactctgcttttggagttgaaggagaaacctatgaccctttaagtccaaacaactgagaaatgggaagagtccatcatgtgcttgattttagtaaaaactgtagttgttctggcaatgctttactgaaaaagacagtaactgagtaacagcatca

SEQ ID NO: 1220 - DNA, 519 bp, Rattus norvegicus
  Genbank Accession No. AI010962
  misc_feature (1)..(519): n = a or c or g or t
acagaatataaagatttccctcattaatctctcatgtgaaggggattacaggccagaaggaagacacattctgcacacaaagtacacctcgtatgtgtggcactggagacaaatggtgtcgtgctcctgcacataaattaggaccaagtggtgacatcacacatcaggggtggggagaaatatcctagtcaatcagattcaagaagcacacgacacagaaactgcaaattcgagcaagtcggcagctttagtcagaacactgcaggtctacagggctgaggctacagtgcacacggagggacacggtgggaagggctacttagaaaggctggagaagtgagggagtttccactaaagcanatgaacgtcttgccaaacagacagaatgaaagggagcgtgagtgttagtacatccagggcgtgcgcgtttgttacagcagtgtctgcagcatgctaagttagttacaacgtcttcattggtacggacgaatcattcatgggcttggggtttgcctcttc

SEQ ID NO: 1221 - DNA, 517 bp, Rattus norvegicus
  Genbank Accession No. AI011148
aagggttggactagagtttattatgcagaagggaagaaaggggatccccctagtcatagtttccctttttccttagcacacaagttgccaagcctttgtgcctcaggtgggggtcaggaaggaggtggtaagcacaagcccagctccaacaagcacagtagaagatgatgtccccccgccataggccccagaggcagtcctcttctccagccagtgccttttatagctcagacatcaataggctcccgacctcggttctgcctcttgaccacaaacaccctctgtcctgacacagtcaccagcagcgtgtgttcaccaaagaccacagacaggcgcttgaaagggatgttcgtgccatggtgcagccggaagccacaggctgtgctgaccagctctgagatggcgctggctgcctgctcatcgttctcaagatccccagatgacttcgctcagcaccaggtagccaagctggtctgggattcgttccagcccttgggtcagtgcggaagtcatggca

SEQ ID NO: 1222 - DNA, 501 bp, Rattus norvegicus
  Genbank Accession No. AI011156
agagaattcagacccttcccaggtaatttaaaatatctgtttctctcaggttatacataatgaccatagacaagatggtcaaacagtgtaaacgctgggataagagtatcagatggtcaatgggccgaaatcagtggaatttagaaaacacgttaactcagacagacagacagacagacatacacacagacagacagaaagttttaaagtatagcacagtctaatcatcatcagaatcggaatcgtatttctttcctcggatagttttcttttccagctttgtgaagtttgtcccaaatttcttttggctctgaaatggtggctccattaaatttccactataattgataacatcagaacaaccgagtctccattctaaagtttctgtagtgaagtcatctgtatttcccaggtcggtgaatcccacaatataatcttgtgtcttgccgtctctcaggagagctaatgtggggataactttgatccgcagtctctcacaga

SEQ ID NO: 1223 - DNA, 196 bp, Rattus norvegicus
  Genbank Accession No. AI011177
aaccctcactaaagggaataagcttgcggccgctcacttttttttttttttttttgttttagggctttttatggagttggtagtgttctacttgtttagtttgaataataaggtggagttagttgattttgatagtctaggcgattgattaatgtatgagattgatgatgttggggttatgttggagggggggatt

SEQ ID NO: 1224 - DNA, 378 bp, Rattus norvegicus
  Genbank Accession No. AI011230
agtcaaagaatatgtttaataaaaaataattaaacttccatttgctctatagaacatcatagaaagtaatttaataaattacaaatgactttttaagacgtttgctccactacagaaagcaaatgtcgactacacaaaacacaactggtaaatattgcaaatgtccaaaagaaacattggactaagactgagtcgtgagacctgaaccaaggggtaaaatacaaggcaagaccagctataactttttcggtcactaccaacacgcactgggatagccttccgcctgctgcttaagtgttgtgtaactccattgactcatttcccataacctaactttacatttccataactgcatggttttcttagctgacacctgga

SEQ ID NO: 1225 - DNA, 436 bp, Rattus norvegicus
  Genbank Accession No. AI011270
ccacagcaagaactgttagcactttccataagtgttaatgctccccgtctttggtgcaggggaggaaactgaggcacagggtatagcattgccaagagaagaggacgggaggtgatcctgagccaccctgtgcatgggaacctgtctctctccgggtgatctgagcacctgccaagctgccccatgggattatggggcagatactggttcctggcacctggggcaggggtgttccaggaactggagataagggtcccacctgggcctcttatcttccaacattccaggctggttactcattacctcgtgtggcccccctctcctagctggaggggggttgctggaagggggtcctcaactttccaaactcccaggaggataaagttcacctcggcaggggccaaggcctgcctccttgggcagacatatcttacca

SEQ ID NO: 1226 - DNA, 494 bp, Rattus norvegicus
  Genbank Accession No. AI011344
aggcttcaaatgtattttaataaggtgatgctgcattactgctccatttctcagaaaaattttcaaattgaaggtatcaggaacaaatcttagtacaccaataaaaatgcacagcgcaactacctaagataggcaagactaagagctactgtcagaccttcaacacacagcaaccctgttcccaagattgtactaggcctatcaagaaaagctgtggacagcaacagcagacgcacgaaagtgtagtccttacccaagaagaagatggaggcaagttaacacaagatttaagatatactaaaatgaaaacctctaagagaaaatgtcttccttacgacatgaaggggtcatatatgagatataacagaaccgtatgtatgctgtgacctctgtggacattgtctgaattctcacctgggagtgaatggacgaattgggctgggtcattggagcatgtttaggttttgtggtatacatggcaatgtctctggggt

SEQ ID NO: 1227 - DNA, 532 bp, Rattus norvegicus
  Genbank Accession No. AI011480
cacctgcaaactgtagcaaaacatgatcagctttagccgcagacaggtgtcctccacatccttaaagaacttagccatgtacgaatagaagagctcttcagaaggaaaaattcaagaacgaatagaaccttccaatctgaattttccagaagcaatgtttcaaatgattttaatcattcatttcaagctagatgacagcaccttaaaagtggctgatctatttccccagtaacatttctcacataacaatgtgttaaagttacaaatactgatatgcacaaatagctaatttctaagaaaaatatgtacagtgctggtggggagactgtactgagcaggagtgccaaatcctgctggcatactcatagatgcagtgccaaaggttgccgctgttgctcctctggcattggtctgaaatggatttgtagatgacgctgcagacggaccagtagcagcaacaaatggattcgtagaaggcgtagctccaaatggagcaggcccacttgaagcaggctgtgtctgaggagaggca

SEQ ID NO: 1228 - DNA, 689 bp, Rattus norvegicus
  Genbank Accession No. AI011510
aaaaatttaagagctcatttatttaaactttactctcattcaaggcaccttccacaatggttgaccaggtctctgggtactgtggcccagcaaagctgacacataagatcagcacacagggttgagaaacaaacaggtgacatttccaatcgtttatctgaaatccacagggattagctcaatgatcctccgggtacatgagggaatcgtcaccattttagacatgaaaggttagagaatttacatggtttttttgggtgaccaccttggggggtgggggagacaaaaagccatttaaacccaaccactgggcaccggagtcactactccctccagtggcatcacacagaaccatgcgacaagtcgctggcagttcgttagattaggaatgagaatccagtgcgcccggcacctccctccgtggccactttgagtaggtatctggcattttctcaggtggcagtaaatgcgcctcacagtatagaaccagcagaatcgggacatttgcagtctagccctgctccctgggaagcaacatggaccctgaaaggaagcaggacagagccggcctggtactggtgcctgcccctgagagtgatgagggtagcccttggtgacagctataccaacttcatgcggacccctggcaaatgtccttgaaaggaaaccccacatgctctcaagccact

SEQ ID NO: 1229 - DNA, 199 bp, Rattus norvegicus
  Genbank Accession No. AI011560
acaaactccaaatccagcatttatttcgggggaaaaacaaaaagggggctcaacccaggttaggtcattcccaaacagaaacagctgggcaggaacccctgggaatgcctatctacccaactatgagtttggaaggaagaaaaaaggctaattctggatctgctaccaacacagctgccacagccagaagctgggaaac

SEQ ID NO: 1230 - DNA, 412 bp, Rattus norvegicus
  Genbank Accession No. AI011571
agaattagtggcagtttattgccttatacaaatttaaccaacatggcaaccatgccgaaggaattaaaacattttcaggacgtatgtacacactgtacattttaaaaacaaacaaaaatgcaagaacaatctgtgcattatgtgtcaactcaactgggtggaaacatcaatgctcaatgggattacaaaggcacttcctacacaaaagaaaacagcctacagggagctcagagtgcataactactgcacaacctcaactgggggggggggggaagcagaatttaatcgacatttataggattcaatgtgatccaattttacaaaatctttacacagtctcatctttggctgtatgttctttgtcttggctttctggctctacactctggcttctatgatgatcctgtatgtc

SEQ ID NO: 1231 - DNA, 471 bp, Rattus norvegicus
  Genbank Accession No. AI011598
caaacaagtcactttaattccatacccacaattttacagatctcagtactgaaagctgtcgggcaagagggacaaagtataaatatgtctgttccgcagtgtaaaccagaaatgacttgttaatcacaaaaagtgtacgcaaacactaggtctgggaacctcaatgccagcgtagcgggaagacactggggttggcctgcctctgggtcagtgcctttccctgcttggaaattgctagggttcctgaggggcatccgctcatccccactgctccctggatgcgtgcagaagcagtcatgttgacaggggccccgttgaacagcagcttcctcagacatcctcggtaggcagggggctctggccaggcagcttcaaacttgggcgggctcccaaggtgcaaaagcgctggagaatcagccaaggtctctggcaaacggcctgtggtgtggttgctgtgtgtgtcgacttcta

SEQ ID NO: 1232 - DNA, 396 bp, Rattus norvegicus
  Genbank Accession No. AI011634
acagttgacacacttgagtttaatttatggttgattcacaaggaagcatagttgtgggtttaaagctgatgaagtcgctcagctgctgttactgctcttcgtttttctttcaggatcaaggtgggtgctttcatataaaatcttgttttttattccttctctggcaattctttcctggatcctctgcttagcaaaattatacctacagtggaaccagcatcctaaagtcaccaggataaatcctcctactccaacatcacaggatcttctaattctgctggtcaccaagaaatgtccaagtccagtcacaatagatcctagtgagccatacagtatagattctcgagcgcatggagtgttctcaacatctaaaatacctaggagcttgaagggctt

SEQ ID NO: 1233 - DNA, 426 bp, Rattus norvegicus
  Genbank Accession No. AI011678
cggcacgacagactttattttggcacttaaacaaatttgctttacagcagtgacaaaatatttgccagtattttttccctggcatagatattccaagcaagtcattctacaattagggtttcactgttttgcacagttagaggtataaccactacattctcagcctccgtgattgagggcattgtgcagctttggaagggcccatcatttcctcttaattctaaataaggtgaattacggctataattggacagaaattaaggccattaaggattcagacacaacactgttccaagtgttactttagttttgtttgaatgagttctgtgacaagcccagggaaggtgctcaaagtagtcaaacttttatcgaaagttgactgtatgttggaaaagttgcggttcttgctgtcttctttctacttcc

SEQ ID NO: 1234 - DNA, 351 bp, Rattus norvegicus
  Genbank Accession No. AI011706
gaagtctcaaacaaaactttaatttcctgtacatactcctgtcaaatgaagttatttcctgtacaccacttttgccaactggtcttctatttcctttcatttgacctagatcggctacgagacctagagaaggatcgagacggcttgtgatttctctcacgagacagagacctttctcttctcctatctctagaaagagacctgctccggcttcgcgaaaagcttctccttcttggggattagttttgggtttcaacaagaagaaatggtgaggtgaggctgccggactgacggccaggaagaatttgctgaaaaggttttgccagatgttgcgttggatttagttggttg

SEQ ID NO: 1235 - DNA, 616 bp, Rattus norvegicus
  Genbank Accession No. AI011709
gagagaaacaacaccacaaatgagtggctgactttattcatccagctcttggcagatccttttggtatggacagatgttgctgcagcttccggcatgggcctcgagtgcagggggtagtttggggaaagtccagagggcacggcagacaaacgccatgcttactgggctcttcttgcaaacgaatgtggaagattagaattatgttctcacaccaccagcttggcttaaatacttctctgacaaaaataataataataaattatcttcaactcagaaaataaattgtgttcagcagggtgacaggagggtccattcgtcgcattgcaccacagggctaccaggagaggacagacaggcaggataccaacacaggggtcacagggcacagggcccgcctgaagtgggtaaacatgtgcctttgtctccaggcaggtggcagccctggctgtgtcatccacaggagacggggcctccttcctcctcacgtgcgcctggtcttctgattcttggtttgtctcttcatgtcttctgggccactgctgtcagaggccgcctggccaaaggctctgactccctgaagacgactcgtcagttgcagcagcaaagggatgagct

SEQ ID NO: 1236 - DNA, 474 bp, Rattus norvegicus
  Genbank Accession No. AI011731
ggtggcacacacctttaatcacagcacttgggaggggaggcaaaggcaggtggatttctgagttcaaggcctacagagtgagttctgaaacagccagggctgcatactgggtccttgtcttgaaaaaccaagccaaatcaagcaaacaaacacacagtaagaaaagagatgtgctggcacatgcctgtcatccctgaacaggggggtagaggtggggggaccggcagttcaaggctagcctcctaaatgacaagtttgagactagcctgggctacatgaaacaaactaggaaacaaaagccccagagccacatagagcagcattcatctcagccttctgcccctcgctgtcagtgcttgtgtcctggacatccccgcctgccccatgacggtccaaatcatgactttcacgggtgtgagcttccgggggacaatggcgagctccttctagggtcttccccccacagcgccgggc

SEQ ID NO: 1237 - DNA, 643 bp, Rattus norvegicus
  Genbank Accession No. AI011738
actaaaagtttgctttatttatttttttttgtgaagtcaagtgctagctattaattacagttagattttgttttcgttcttttcaaatgttatcagaatattagcatcaccttatcagtaatcaaatacactaggtttcaatgtttctgtccacatctagaatgttcaggtgatcaggaactctcttactggattcctttagatttgagttcttgattatatttccagatccgaaacagctgagaggctcctgctgaccccacaaagaaattaacagcgaacaaactccaattttttggtataattacaagtgagtaccttgaccaaataaaccctgtagccatcagcacagtggattgagctgtgctgagtttctctgcaggtctggccatgtcagctaatccagcacataccaatccccacttcattatcggagcccagaaaaaaactgttctggggcctgccgggtggttgtatagcggcctcaatttctttggcagcaacaactccactttatccatgagtcggtggtaggtggcccgcaggccttgggcgccggcagctgccatctcggcggcctaaggatccactgcagctgggtgggaacgccgctgtgtccgcgttcctggctgacaatgaaagg

SEQ ID NO: 1238 - DNA, 383 bp, Rattus norvegicus
  Genbank Accession No. AI011770
acatccaggagagcttttatttgtacggaacagttttaaaaatacagaataaaatagcttttctctactgttattcacaacatctggtccaaatattacatagttttaaaatacttaaacgtttaatgaagccatgttagaaaaacaatatgaaaattctttttaaaaactccatgaaagaattacacatctcaaaaaacaaccccaccccaataccctcagtatgcaaaataaaaattaaacacaaaaaaaaccccaggaagatacataggcaaagtcagtcacaaaacccaaataaaacagaggcgtctctgctgtcttaaggacagtcagaaaattttcaatgtgtccaatcaaagttgttaggaacggacagaaaaggg

SEQ ID NO: 1239 - DNA, 542 bp, Rattus norvegicus
  Genbank Accession No. AI011799
ctgacagcttttcctctttattctcaccccgctgacatgcaaacagaaccgaaacagtgctgctcaaaaaaaataacaaaatgttttatacacatttccatatatacaaccgaacaacattttacaggttatcttttgcacagcaaaagaaatataaacattcggctccaagaacacagatatatgtacaaaaaaaacaagtcaaaaatacttcacaacggtgcaaaaatattttacatagcatcatggagtaggagctttggggcatgaggaaggtgtgtatttctaaaggaaaattccttttgtgtgtgtgtgtgtgtcttagatattagatttctttaactgtaaacaaaacacaactttcataccccgccctccgccccccataaaagagttatctgagaaatttggcatactttcaagagtttgagtctgacgtaaacagcccaagctctcatatccaaatgaactgggggcaggtaagcggcattaaagcccaacattatgaaagtgactttgttaatgagatattgaagacagat

SEQ ID NO: 1240 - DNA, 517 bp, Rattus norvegicus
  Genbank Accession No. AI011806
tattcaagtatctgaaaacatcctacaatggaacttagtagatggctgcttgtattgtaccatggaccacgcacatggtgttttcagaagacttgagatgcagtgatgtttaaaaactgtacacctgacggagaaccaaggaagacaatgtttcatccggatccagaggcgcatcagattcaacagcagctccacttggcaaacagctgttacatgatggtatccaaggacagattgttgacaatggacaaactcagaaatgcttccccaaaggtggatggttctttaaaaagtttcacaacccttgcaggaaaacactgatgcccaacacgctgattctaagtccaggagactgggtcttctcggttccacacagcaggagtgccccaataagcatgtatctgtgctgtaataaaagggtcctttggactggacagaagggacgggagcaaatgccatcagtcatagtggatggcagtgtaaaagatgatccaaatgacctacgggagacacaagc

SEQ ID NO: 1241 - DNA, 399 bp, Rattus norvegicus
  Genbank Accession No. AI011808
aattcaacaacaaagtttattggtgtgcactccaggctagagagggctgaggagggtacacagaaaaccagattcagtccatgcctgaaggtcagcctggggagtgtgggcaggacacatatatacaaaatacacacacagacctggcatctggtagcagggtacagagtttcacaaaggggtactctgggtataggaactcaggaaaagcttcttagaaacaccaagggcaggacaagaaagcttggctagtcggcacagatcctgcagctgattccaggaagatttacagcacacactgcaacctgaggtcagagccttaatcaatgctcattgcactttgcaaaagaaaagacaatagcttcctagctcagtggggtgcgttgactaagggaggca

SEQ ID NO: 1242 - DNA, 373 bp, Rattus norvegicus
  Genbank Accession No. AI011809
actgtctgactccagtgacactgacatacccgcggggcctgtgagcctcccggagagtcggccctgtccagtaagatacagtacaaggagtggacggcacgcgcatgcatccacactgagctacagtgactggggcctggtgtccacagaaaccttaagagggtactggacagttaatgctggtagagactcgaggccagaccagggccaacagacaggcctatacttctctgcctaaaaatgtggaaggttgcatgtgtacagttctccaagttcgaaactacatctggtgctacccatcactgctaagggttactccatcttggccgggacgagcgcctcggggtcagaactcaggaatgtctggttcagt

SEQ ID NO: 1243 - DNA, 384 bp, Rattus norvegicus
  Genbank Accession No. AI011843
gacttgctcactccagagaggaatcaagggggagagggcctcaacgtcacccactctcccggatgtcacgagcttccaagcacacaggataaggtacagtggctttctcttaagagggacatgctggatggtgtggtgaaaacagggtccccccgcccccacgctggctgactaatggggtaacagttactttcccaagccagagtgaggcaagacgagcctgctgattgtgaaatggacttctgttttctctgccagaagacaaggatccaagagtcgccggcatcagcccgcctccctcctcgaaggtcacaggtcatcaccaccctgggctggcacagaaggatttaaccagagcagatcatacagtgactgaggctggag

SEQ ID NO: 1244 - DNA, 465 bp, Rattus norvegicus
  Genbank Accession No. AI011930
aagagaaaaaaaataattgccagtttcagacttgggggaataattccgcttagagtaaaaataagtctccactcaaatgtggggtgttccgatctgtggtttgactccttgtactcccttgccagcaaagggatacaaagaaatagctagtgtaaaggagttactagcaaacttaatctctagaaaacgggatactccttgagcatgttcatctgcgttctgcttgcagaaggggccattcagtagacggagttacagtaagtgatcccattggtactcttcattcactaaaacacaagaacagttctcagacatcaatatatatctgcaatgcaacttttctccctaaagattagtcaccaacactggtgacaatctgcttagaaaatgactcaaagatgtgagggaagaaatactcagattcatggctgagattgcatactgaatctgatggttacaagttct

SEQ ID NO: 1245 - DNA, 501 bp, Rattus norvegicus
  Genbank Accession No. AI011970
acaggtgaggagacacagctttattgtctaaaagccgggccaggaggtttaaaatagggacgtacaagcgcacacaaagtctccagttcatatgtaagccctctccagagttacccacatacatctcaacttcaaatgtgcttgtcctcttcatagcagtcatttccttttagggtctgccactgtcacaaaacagaaccctttccagaacacacaccaccacatacccctagacaccactccctaagtctgacttccgcagtctcgagttctaagcactctgggatccggtctgctcagtggaggcttctgctggtgctgtagagggcatctcaggcattgactcatgtggggggccacttgcttccaggagatttccttgatagagccggcgaaagcgagagagctctctctctggtggctgttgccagctgtaccacgggtaccaaggttcacccgacaacaacgtgggggctggtggagtcacactgacagctccat

SEQ ID NO: 1246 - DNA, 454 bp, Rattus norvegicus
  Genbank Accession No. AI011982
gaaaggataagtctttatttcaccttccagtatttttgacagtttctctgatgccggatcttcaatcttaggagtccaaatatacagcgctcagacttcagctctccagagcaaagtacccagatcagtcctcagggaatttttaggtgggaaaaatgacaatgacagatttctctgtaacaatccatgtcaatcttctcgcttcactgaaacacttttaatttaagtactccatcatccctaaaactgtgaaatctaggacaggaaagcactcatctctcatacacaacacaaaagaaggaacacagggtgagcgagcgcgaactccaagggccaaattgattcacccagaaagtggatttgattccatttaacaggcattcgtacaaaactgttctgtcttctcaaggtagtctggctagacttttgtatatgggaagtaattcccatatag

SEQ ID NO: 1247 - DNA, 405 bp, Rattus norvegicus
  Genbank Accession No. AI011991
cactggagacaggaggttttattgatgctgatgggggtaggaaaggcccccaggagcatggggcctgagtcagtcagcaggcgcataagtcctgggcacatggggcaggttagggcacatttttcttctgaggattctgtggctcctcccttgggagagggagagaacatcttggagagcttactccaagagctaaggcagagagaggttagagcccctatcttgaggaggcatcacatcaggcagcaacaactttgtggaaagctggatgaactggtcagtaccaggaaatggaggggagcactgggttagcctcttagaaaggtcaacccgtttgaggtgaactcatggaatacttggtattcccaagcagagtggggtggggcccaaagcccctctccctgt

SEQ ID NO: 1248 - DNA, 495 bp, Rattus norvegicus
  Genbank Accession No. AI011998
  misc_feature (1)..(495): n = a or c or g or t
cactcacacacaatattgtatgagacattactagttttcatatgcatccataggattaatactcatatggagtataacatggaaaagtgcagaactaaagaaataactctaacaacaaaagaagcacacgtttcttaaaatttaaaaatattgcacatagtaaggttgcacagaaattactggctgcttttacaaaaagaatgaggtattagtcaatctctagataaagataagtgcaacagagtaactacacacacacacaccaaaaacaaaaaacaaattcatacgaagacctagaaagtcaacanacaaaaatattcaaaaagaagtttacaaagctatgattttgatcatacaaaatcattagcccattactaaaacacaatttcttggcaatagtttataaattttaaactttcttcagcttaactacgtgcaatacaatcatccccatcacaccaattctcctgtagaagaggaatctttctgtgatag

SEQ ID NO: 1249 - DNA, 501 bp, Rattus norvegicus
  Genbank Accession No. AI012143
cacagtctctacattttattttttaaaagaaaggcagtcagtcagttgttttgctgacagaatcagggcagcactgggaggaaaaagtcaaacaaaagtgacctcggtacagccctgtacaacaaagagatgctttacagcaaaaataagatcattctggttttttgaaaacttttatttaatatttaagtaagattagaaacaacaagattttttttgaggctgatgagtgcaaagagaaacgctaaacatcagttatcacctgattagctcgcttaagtgctcggggctcagactactcagtgacataccaattactgtgtggcttgagaatcttgcagcaaaaagtgtcctaaatgaaacgctgggctagagggctgtgaagtctgagtaggaagtggcggtggcggcggcagccttggcttcttttaggctgagcagctggttaccctattgattagacaaggacctagcatccagctacttcatgttctgactttt

SEQ ID NO: 1250 - DNA, 418 bp, Rattus norvegicus
  Genbank Accession No. AI012145
ggtacccatgtagacacagccaatggcggcggtcccgtagctgtgagttcgtgctcccagtgtcaggcctcccgcacaacctccaatgaagtagttcagggggtcatctggcttctctcggacctgggcactgacacaggtggtaaggccaaacatagctccaatagcagctggaattaccgcggctgctggcaccagacttgccctccaatggatcctcgttaaaggatttaaagtggactcattccaattacagggcctcgaaagagtcctgtattgttatttttcgtcactacctccccgggtcgggagtgggtaatttgcgcgcctgctgccttccttggatgtggtagccgtttctcaagctccctctccggaatcgaaccctgattccccgtcacccgtggtcaccatggta

SEQ ID NO: 1251 - DNA, 628 bp, Rattus norvegicus
  Genbank Accession No. AI012222
attttataaatgtattttcattttattcttttaaatttcccttccctcctccctcccccatctccctaccctttcctctcagattcctggaggcttcccatggatatcaactcccccttgacatatcaagttagtatagagtctttaaaaagaacaagagagagaagaaaggatagagagatcaagagatgctctttagtctgctatttcgtcctttttgggactcatcagtatggggtagctaactctgtaagattttaaatattttttaaagacccaataatgtacacactagtgtaaaattaaatattaaatgcttagggatttaactcacatttgatggaaataagtccaataaaatggtaaaattaaaaggacatttgtttataaaatgtattatccttagagcagaataattaagtaattataattatacttagaacagtatagttggaaacaggaatattgcaaactaaggtaaagaaacatttcgccaatatgcctcatgttttaaattgcagagtataaagtgaaccttaaattttcacacttttaaaattcttctgcatgttggtttgaattttgaaaagcaggtataatgtgtttctccaaattatgggctgctaca

SEQ ID NO: 1252 - DNA, 624 bp, Rattus norvegicus
  Genbank Accession No. AI012264
aaaaaatactgctatacacatagagactgaaaacagggttaaagatgagaaacaggtactgggatcgtgacattagaacttaaacatactggtgctttttagagacaatgttgctatccatgacagaaccaaggtcaaagcagaatagagggctccctcaaaggcatctgcaatgaagtaaacacactaacgggattggagatgggcacacagctgaggtgagcgacaccacatgatttcagggttgtcctttccgtgttgtgttgtcacacaggaagtcacggtgagttcacgtccttcattcgatattctcagatagtaaactcttcctatgcactgaatagtaactttcagacaacctcctatatgggtttacaccgtggaacagagggctcccagaaaaaaaagcaaagcaaaacaaaaaaacggaaaaaagaaaaaaagaaagaaagaaacctatcaaagcagagaactcaagaattcttttgaaaaccattcccaatgaaaataaatataaaacaaagctaaaaaaatgtgcattacctgaccaactgttttccggctgacaatatttacttatgaaaactttcagctgactaccttttatacccacaccaagtcctg

SEQ ID NO: 1253 - DNA, 424 bp, Rattus norvegicus
  Genbank Accession No. AI012335
aaaagggggcagcctggtcgacttttattacactttctgggaaatggccaattgggttcactgtctgagggggctccttattagtcttttggactaaaggggcaaaaagatcacatgtgtcatccaacgtggccaaaagctcatttggcatggtttccaggtcatccattcaaaacaaagcatcgaagtcaaactttttcaggtccattttctccaacatccaatctgtcccggaaaaggcatcctccttgccggtgtctgaggcactgaccaacccatccatagccagccattctgaggagcccgccttgtcgctggaaaacccatgaggtttgaagtgcttggccacctccagatagtcatttaaaagacctaggcttttttcagcccccaaacccgactggtcaaagggggcctcgtgcca

SEQ ID NO: 1254 - DNA, 544 bp, Rattus norvegicus
  Genbank Accession No. AI012337
  misc_feature (1)..(544): n = a or c or g or t
gatggtgaaaaacaaccctgttcagacaaagataaaaatacaaaatcagatgtagcacaatataatagaaactggctgaaaacagtacacgctaacagacatgatacacaaactcagggagggaggagataggagagggcagaggccacggcctacaccaggagccgctcaatagactgctgaatggattggatctgctgctttagttgagagccttctttgatggttacagaacaggcgatgaccggcctggagactccacaggcccgtcctaaagcctgcttggagcgtacaaatacataggggacattcttgtcttcacacagcagagggaggtgcaggatgatctccaagggctcagcgtctgctgccatcacaatgaactcagagatgcctctgttgagggttttggtggcttcattggctcctttccgaagctgcttgtagttacacgactgctgaacaaggtccagcagcttcttggtgaggtgggcatctgcgaggggataggcctttgggttcacatcagcctncgcctcgtgcc

SEQ ID NO: 1255 - DNA, 512 bp, Rattus norvegicus
  Genbank Accession No. AI012340
aaaaaagaatgggaggtgcttgctgatctctgggccgggaggaagcttccctccacgcactgcgtttctctgatacccatttcacctctgcccattacaccaacctctggctccataaagtttattgcaaacaaagaagggacttcactcatcgtagaattttggcagctcgtctcccaggatgacgcgatggtccacaccatcagctgtaatggtgaccaggtagatgacacccccactggagccatctcggttcatggccagagtgatggcgtctgtggtgaaacgccggcactcctcgggggtcatgcctggtttataagctgcgtccacataaccgtaaatataggtgcttccggaaccgccgatcgcaaagggctgtcgaattagcatccctcccatggttccatacacctggcccccctcacgttggtcccaaccagctaccatgagatgcgctaacaagtccttgcggtacttgtaggagatgttcttcactattgtttgcagca

SEQ ID NO: 1256 - DNA, 532 bp, Rattus norvegicus
  Genbank Accession No. AI012354
ttgttttacatgacttatttattatatatacatcatatatatccacacatcacaaatacttaaaagttttcttttgctaggagcattttaattttgctaagagtattttattttcctactcatgtgtgtcgttttatcatgaatttctacagtgaacatttttatagaatttctagtcagatgcttatcggttgttccttgagttttgaaaacatggcggctaatctgctagtatcagccatttccactgtctcgtttgtcagaggatacagcatccagcaccgacgactggtagaaacgatgtcaggtctactcctcttggcacgattacttggagctggtgtacttggtgaccgccttggtgccctcggaaacggcgtgcttggccaattcaccgggcagtagcaggcgcacggccgtctggatctcccgggacgtgatggtcgagcgcttgttgtaatgcgccaagcgcgacgcctcgcccgctatgcgctcaaagatgtcgttcacgaacgagttcatgcctcgtgcc

SEQ ID NO: 1257 - DNA, 636 bp, Rattus norvegicus
  Genbank Accession No. AI012356
ggatgttaaagtagttacagcaatatacaaaaacaaacaacaacataaaacaacccacaataatataaatttttacactagaaagtatacattggaatttgagtgcagtgaccaggacagaataaaagccactgtactgggaggccaagcaaactgcaggcatggctgggtgaggttggggacaagtggggccaaggggaggggaagtgggccgttccaagggctcactatgggtgattaacccagatacagacttcccagaacccctgaggtacaacacctgccccagagaagccctcaccttgttcctgggtccccaggattggaagccatcaacatgcccacgccttgccttcctaaataccctttcagtttatgagttcagcttattgtgtaactaaagaacctggccagggaagggagagcaatgactgcctcgaagcagaaggctggggtggtcaaggcaagcagtttgtcttggagacaatgtcctcactgcccttaattcagacactggttaactggagaaaaacaattccacagacagatcagctgagtaaggtggctttgagtcactgaatctagccatgcccctgtatcaagggaggcttgccttgaaccactcagtgttcaagt

SEQ ID NO: 1258 - DNA, 681 bp, Rattus norvegicus
  Genbank Accession No. AI012389
ttttttttttttttttttttttagacattgttataatcttttattatgtatcaaattgtcttcaatataacttacaacctgattttatctgatagatacttttatctatttaaaggcaaaaaaattctctttatgtacaacatcttatgtctagagtctggcaaatacagtacctttcattgcaggattttttgcttaacataacaagcaaaaataaacaaccaaaaaaaaaaaatcaaaatgaaccgaacccccggatccctctactacaaatgtcaataatgaataaagcattaaaaagacaaacacagaataactgttgtttagaaatgcgtaatgaatactaatattagtggcaaaaaaaacaaatggcccgactgtcctcagagccactgttcctgctcggggttgggtcagactctagaccatttctcggctcctgcggatggcgcagcacagaatcatgctgaaaatcataccgaagatcatcaccacggcgataccgatgcccactgctccaatgatgtggaacttgctgtggaagacctcatcgatggcatccgggcaggacttaacctggaaggattccagaacctgctttttggggcagatgtccgagataaactgctccacaccaccagctatgccacagcaagttcaacgccatatggatggctttga

SEQ ID NO: 1259 - DNA, 627 bp, Rattus norvegicus
  Genbank Accession No. AI012410
  misc_feature (1)..(627): n = a or c or g or t
ttatgcatttaattttatttggtatacatccctatgaccttgttgtagctggaatccattacaggatgtttaaagttttgcaattagtcacctccacgaagacaataatactgctgtggaagaccaatgggggaagggtacatttatttacagttccttatgttataaacatctatcctagacactattacctaacttgtaatgagagctttacacagacgaggaaacgatgccgtttctattcatcttcagcaacagcgtgtcatagaacaccagagattctgattaatattatgctttctttagataattatttaaactgttcccaaaagaactaggtatttttaagagttatataactaaaactacttaagccaacatacttggctggtaatttcatcttcagaataatttaaagtgctataagcaacctggcagtcaacactttctataagaacaaaactatctttaaacatcaatttacaagatatacaacgtttgtgtggaacagctgaattttcagcacaaagtcactgtcacatgtataacagcaggactttnttttttttttttttttgcattacatgaagctctgaaatttaattgatgaattgttgccacatggct

SEQ ID NO: 1260 - DNA, 477 bp, Rattus norvegicus
  Genbank Accession No. AI012424
agtagcacacaggtcaaacatcaatcattcaaaacaatctctataaaagtggggaatgatactggccactctgtgaaaaactgactgtgtgcactcaatgctcactattctttaggtattaaatcttcttcttatgccgttcgatctgtttttgcaaaccctctatctccttcaaatgggggtcaatctcatcttcatggggcttcttcaaggcagccagctgctctctcatcttcatggggcttcttcaaggcagccagctgctctctagtcttctctcggaagtaccgatccttttcagccttctctcgtttcccgaaggccccaccagcttctcggatggagccagcgcccgaatccatgctctccgacaagtccgagccgaagcctcgggtttgcaggaccctcataccccaaacaccgagccgagcccgaaccgccaacgccgagcctgccattatcttcggcgttgccctc

SEQ ID NO: 1261 - DNA, 556 bp, Rattus norvegicus
  Genbank Accession No. AI012438
acaattgatgaagcaaaggaagcgcataaagagctattggcgatatgacaggataatgttttcctggagcccccaggaccccatgctggggccacacgtggcagtggactggtgtgcatgcctgcagtgcactgagcacacacctgatggcagagaaggccccacacagacagccctggctacagaggtcaagctcacgtgagaaccacccgctactaatgatgcactaggaacctggaatactgtgtaaaatgtgggtgagcctcctctgacatcctaccctgacagggtctgatcattatgtcagaccaagggcaagcaaaagcctaaaaaacaaaacccacttaattaacagtggctatttacataaggtttggggtcttcaaaaattcagggcagttttaattctgagctcaaggagactctctgaataggtagcagggtacgtgggagtgcctgagagatcactactgagactcctgaaggagagaacagttgggtttccccaggcaagcatgaacgcacacaccaactgacatgaatgaaaaaccaaaac

SEQ ID NO: 1262 - DNA, 496 bp, Rattus norvegicus
  Genbank Accession No. AI012474
aggcacttctgagttcatttataaaaaaaagaaccaaagtacagcagtgatttgtgactgaggccgtcagacggtgggggtggcaggctctgccctctggtgctatgtgaaccggcttccttgagactggaagaccaagttcctcctcttcatgatggcctgatacaggccactgcctggttcctgaatgtttgtcctgcatgatggggtgggccttgggtaatgcgttgcccattcctaggtgcctcgtggtcttgtgggtcagccctcttgctggattctggaggcacaggctcgagatgggaaattacatagggtcctgggtttaaggcctatgccagaaggggcttcctgattccaggccccagggagagccaggccagcacgggagcaggctatgatgatgcttggtaagtgggaggctgcggccttctgtccactcttcagcctctgcttcccattggtcttcccccagctcccctggtcctgtagcctg

SEQ ID NO: 1263 - DNA, 542 bp, Rattus norvegicus
  Genbank Accession No. AI012562
ggattcagaaaatatttattagaaaacccccaccccaacctggtgaggcagtcactcatgaaaatggactggagaaaacaggcttattgccacaaaagtctataaaacatataaaacagttctctgtaacttgcccttaatatcccaaagcattccaccgatggctataattgccaattttacagatgggaaaactgaggcaccaaggttgtgttgcaccagtggttacacagttcagtggttgttagttgatccaccccacccccaggtggaaggtggtgggaaactaaaaggacttgaaggcacaggaagacaggacagtctccagccaagtctctatggtttcttcagctctagagtgagggaagagggcagaaccacagcagtcagaaaagtctggaagggactaaggcaaggattgtggtgcctgcttttaaggagggtcgcaataaggcgtgtgcagccataggcgcacgtggagcctagcttagtcagacacctcactgtagtaatacttatgagcggcatgcctcggtcttcca

SEQ ID NO: 1264 - DNA, 572 bp, Rattus norvegicus
  Genbank Accession No. AI012567
agctgtcaaaattcaacttttattaactcggggtaggctgtcagtccagggagcccggggctccgccgctcagccggtgatgcgcacgtccgggcggcgccgcagccgccgagcccgagccgcctcgggtagaatggcctgcagctgctcctgcaccagcatctccacaatctgctccttggtgcggatgtccggccgcagccactggcgggacagttcccgcagctgccggaaggcttcccggggacccgccgcatcctggtagcgaaactgccggaagcgctggcgaaaggtctcggggccgggacgagaggcgccgggcctcggggcggcgtcagcctgaggcgctgtgttcaaagctgcgggcgcgccggggagctccggggcaggggagctcatggagtcgggctcccgggccgcacagtcgccagctccttcctcctgctcgggcggcgccgcggggctttgggcggcctggctgggctgcggcgccgccatgactacggctgtccgcgtcaccctttgtttcgcagttacgcgcgccttctgcgtctctaacagcgaagctcccc

SEQ ID NO: 1265 - DNA, 645 bp, Rattus norvegicus
  Genbank Accession No. AI012588
agaggcgaagaagtgaaggacttctatttttaattaacagaaaggtttaaaaaatagacattcaaatgaaaatacaaaatgcattctgaagtaaaattaaatttggatgatctattattttagattatcaacaccattttattaaacccaaagtatagaaaaattatgaaaacatattccactagttcgcattcccagatgttcttatattacagaatacaacaaaggaacaataaattgagagtaagacttattaacccctacactgtgggaattgagtcaatcgctgattgaaatcaatacttttctttcaagtgatactttcttagccctatggaaatatttgtaagataacagttatactgtctgcataataatgatttcgcaaagacacgtaagaattaaaaatggtaaaagctgccaatgaaggcactgatcaccgtggcttgcttcccaaagcagttctgaccaccaaccttctttcaaatgagtaggaggtaacatcaaaagatgaacggatccaatccacaaagactggacctcaaaaggcactgatcaaactactgatctgaaatgctcaaaatgcatcctctgtttgccgtccctcagtggtccactcagtgtttaatgacatttgatacagtc

SEQ ID NO: 1266 - DNA, 651 bp, Rattus norvegicus
  Genbank Accession No. AI012590
tttccacatttcaacatgggaaatttgtaaattggttttatggcaagactgttttttattgtgaaaccactagctactgtttacaatgaccaatgtcccaaggaaaggtatggggatttacaacttgatatcccgttaactaagggaacatacaaactatctcaggattccgcagaaaaaatatagacaataagaagtggttttaaacaagtgacttaaaactaaattttcaaatgcttacttttggcatctggcattaatactttttaaagttttacaataaaatatcaccgtttgggaaagttaccacatttcctaatgaccgactaatgacgttacctgaattaacactgatggaaagtacacaagcaatcaataacttaccaacagcatctcaacttcagaaacacaagagttaaatttagcatcttcagtgtttggcttcttgggccaacaaactacttctaaacaatgtatgtgcacacttattcagataagagggctcctttggcacctgagttgagtataatacaaaaggaaagaatatctaacataaagctgtttaaaggctatatcttatctatctatacatatatacacatacctgtacacatatatgcacacacatatacaagaagcatacattttttc

SEQ ID NO: 1267 - DNA, 613 bp, Rattus norvegicus
  Genbank Accession No. AI012595
gaggttacacagtggccttgatctttatttttctttacctggaattctacaaattctgaaattgatcaatagatttatcttgtttaataaacagcaccagtcgtgcccactgatacaattcaaacctgactttctcagttctcaagtttattatgaaaacactgcggtgacttgtgcagtacatcatcttacaggagggagacagttctgttcaaaacaactcaccaggttttctgacagtaacaaagaacaacgcggggccgagatttgagaagggagaaactgagtgcagagaaatcatacaattaaattaatagtatccctgaaagaacacaacaagaggggaggccttggtactcatttaaaaatgttcattaagctccaatgattgtttgctatcctcatctacagtcatgctgagtaagctacagctaagtggaagtcaactggactcacaggtgttaatgttacatcctagatctgcagtctctcaagaaagcaaaagtaactacaaatagcgctatgccagaaactggattcttgaccaacaatgtcgcgtcagcatgcaatgaactggttcattctaaagtggtcacggctgttgatgacaaga

SEQ ID NO: 1268 - DNA, 599 bp, Rattus norvegicus
  Genbank Accession No. AI012608
ccacaggtaatgtctacatttattttataccaaaaaagttatgtgcaacaaataaacattcttacatatttacatctgtttttatttaccagttagcaaaatggtatcctaaacctctgataaagaatatttctatctatattaaagagggaatcttcccagtgaactcctttttacacgaatgtttactcaggagctttcaaagcaggagtaatattttagatggtacatacttcacaggtcatacacacctacgatctaggccatgctcaatacagcctcgtaacacttcgcctttcctgggccagttagtttagaagggggaggggatgtttggtcatattgcctggaatcctactctgctcttttgactcagggttcttacaaaattaggattcatgaatgtactgcagaaaatgctagaaggtggagaggggcaggaacactgacggatgtgcactgggaggaaacaggagtgggtgaggttcacagccgcagacaggttcctggatatgacagtggggaacttcactgacattcttctgactttgaaggtcaggccacccaccacacctcccagtacccatcagaatcaactg

SEQ ID NO: 1269 - DNA, 390 bp, Rattus norvegicus
  Genbank Accession No. AI012632
atgaatgccattgattttataaacaaaagaaggatgcctaggccttcatgtcggagagtgtcctctctgctggaggctgtaaaaatgagcctccttcaagatgttgttaatatgcgagtaaggatcttggtcttggcacacttcatagtcctcctcttgggagaactcagggatattggagtctagttcagcagtgctctggtttaagctgttctctggcactctctcacggttaggattattgatgttggtttggttccttctattgtcactgcttgtcgactctatagcacaaggatcctgttcggtctggtccttccttgtcctcttggaatgagggggatgatggttgtcgtcctcattgtcatctggtcgtcgtttccctcacag

SEQ ID NO: 1270 - DNA, 572 bp, Rattus norvegicus
  Genbank Accession No. AI012635
ccctgtctggatctgaagtatatcttttaagcattgtttaaaagagaaatggaatcctgttcaacactttcaggagatgattcaagttgtccataaaaataccattcttgttacaaattgttagtggaacttaaggagaaatgacttatgctcactgcgggtcagcatgattctgaaaggtgacttatttacaaggccagagcaaaacattgtcttgcttactaataaatgtctagagttctggcaaatgatcttgaacaggaaagggagaggtatgaaaaccttaatttttaaatagcaaagttcttgtctggttattgtcggtgactcgcagacattctagagggaatctcaatcagatcaacacaaggaacaaagcaatgagcactggaacagccaggagcctgagaaaatgggaatacaagccaggtttctgaataccaccgacgtcacgggtcttcataggcttcagtgaccggtcccactgggttaggatggcgttcctggctcctgaccacttccctgggcctaccaaccggaactggtaggggctgcaagggccaaagaacact

SEQ ID NO: 1271 - DNA, 491 bp, Rattus norvegicus
  Genbank Accession No. AI012647
aacaattaagtcaatttatttaaacagttgacttaggcatctgcaatggtgacttcaacctccactccaggctcaatactgatggaagtaatctgcttaacaatctctgaaggactgtgtaagtcaatgagtcgcttgtggattctcatctggaaacgatcccacgtcttggaaccttcaccgcaaggggtttttctggtagtgattctcagtgtcttggtaggcatgcgcactggtcctttcactttcagattcttctcctttgcgcctctgatcaagtccgcacaaaccttttccagcgacttcacgttgcggctggtgagcgtgattcgaatccggtgaatcgccacttcgggctccacgggagtcttcccggtatctttaaatgccatggctgaggcgtagcttcctgaccgacttgttcctcagcaggagcgaacagcggtgagtcaggacagagcagacttgacaaggctccacagcacgcacca

SEQ ID NO: 1272 - DNA, 508 bp, Rattus norvegicus
  Genbank Accession No. AI012648
actcaaatgaaaactacttaagaaaacctgtaagttagctctgtgctagttccttttctgaaacctactttttttccttttaatcagaaggtttatgttttgtcacattgaatacatgaaaatattgttagaagaataaggaataccataaaaggttcagttttccgtggcaaattttacatgacaatcttgcataggaaattatttcttgtcaaggtgttcagtgtgctcgtctgatgttcccaaactctcagtccagctgaacagagtattcatcttcttccgcaactaccagagcacagccatcactgtaaggtgattgtggtgcaggagagaaagaggtgaagccagagcgtgcgctccttctatagaggaaccaaatgaccgctcccaaaactgccagagtcactgtgctagcgatcaccagagtcgatattaaaatgtggttatctgataaatacttcttgtcatatgggattgctgttttgcaaagtgttcccgtcacaga

SEQ ID NO: 1273 - DNA, 436 bp, Rattus norvegicus
  Genbank Accession No. AI012689
tttaatggaatagctttggcgcaggcaaaggcagctcctagatatctcagggcatgtggagccccaagaagtggggacgtttgctaggtttctgggttttatttcctggtgcacgaatggttggtccctggctccaggcctcgcgcatctgttcagccttcagtagcaaagccttgatctgtgcattagggatcagagctgctgcttatgcagaagccaggaggtgcgtgaagaccactggccggtcttcacagcgcaggaagttacgctctctgccacaaagcgagaggaaagggaaggaagcctcgtagcgcccgctgtggttgggtctcagacgggagaagaaagtgaccaggaattgcaggtctttgaagcaagtgataaagttctcattttggagtcatctaggaaaagctggccttggtgattcacatag

SEQ ID NO: 1274 - DNA, 412 bp, Rattus norvegicus
  Genbank Accession No. AI012729
cataccagctcaattttaattttaaagtgaaaaatgtacaggtgggaaagttaagcaacgccctgcagattcataacaaggagctgacctagttgtcccactacaagctgacagctctccagcagtgattgatttgtcacagcacagaaatgccaccctggacttgtcccagcaatgctgctctaagccccagcaatgctactccaagcctcagcagaggcaaggcctgactcgaagccgggcctccagtcttagcatcaccgtggagcatgccctggagagcttcagcttcctcaatgatgatgaagatgaagacaatgacagtcctggggacaggtgaggcggccaggcaaggcaagactgggaacggtgatagcactgcagtatgcacagtagatagccaattggatgt

SEQ ID NO: 1275 - DNA, 558 bp, Rattus norvegicus
  Genbank Accession No. AI012785
cagtgttaattgctttatgtgtacaacagttagcagggcatcaatggtcagaccaagccagactccaacagatatgtgaaacaaggccactttcccaaaattaaagctaccagtaagatccccaaacctcaaaccagactgagagcttggtcagcccgagtggtagagcagagcagcaggcactcacagcctgggccgggactgctccgcctgtgagtcccacagaccaatgaggcgatcagcttccctccagccagacaggagggctccgtgtgtggtagaataaaatgtccgatgtgtggcttccccagcaaagagtacctggagctgggtgccagttccatctgctgggagaggctgagccatcagatctaggtcatcgccagtgctgcccacagccacatagctgtaggaccctcgggtgtatggggcactgtgccatcgagaactcagcacgctcttggctgctggcaattgtgggtttcctgtcaccctccggagtacttgggttagagacagaagcacttcttcatctgacagagtctccataaactccga

SEQ ID NO: 1276 - DNA, 522 bp, Rattus norvegicus
  Genbank Accession No. AI012802
gggaataaatactttaaacctttttctcttataaatatgcattagaacatttgacaacacaagctaagggctttgaattaacttaaaattagactaagtcctgctttagcagcaggacagtcagttaaaagtccctgtccccgtgttcctcagtcccgaggcaccttaaactggtctttctccctgcggatggccctcatggtggtcacagggtcggtctctccagcgtgctgctgcacggtcttctccttcactctcatgaaggggttgtaagtgaactcctctgccagggtggatggcaccgtgggctccccgatggcattcttctccttggcccacgccagtttctcttgaacggcggtattgccgggctccacatggcgcgcaaacttaaggttgtttacggtgtattcatggccacagtagacttttgtgtctggaggaagccggcctaagacttcaagcagcgccttgtacatctcgtctgcggttccctcatagaacttcccacagccagcaaca

SEQ ID NO: 1277 - DNA, 532 bp, Rattus norvegicus
  Genbank Accession No. AI012805
  misc_feature (1)..(532): n = a or c or g or t
gaggcacaaacagtctttattgggttcacaccaagagtccattggtcttgaggacctctgtgaacttgcagattttcttctccacattcttttctgcctgtttccttagcctcaagagctgcttcttcttccggtaatggatctttgccttttccttccgtttctcctccagagtagctgtcactgcctggtacttccacccgacctcatgagccagacgccccaggtaagcaaactttctggtaggcttcagccgcacaaccttgagggcagcagggaccaccatccgctttttcttgtcatagggtggagggatcccatccaacaccttgaggcgttccagggcagcctggcctcttttggtcttgtgcggcagcatgcctcgcacagtgcgccaaaaaatgcggcttggggctcggaagtggtangggcctcgagacgggttggtgttcatccgctttcggagaaaggcagatactttaacttgtttctgtagaaatttccagaaatgttgatgccctcacagcgtaca

SEQ ID NO: 1278 - DNA, 511 bp, Rattus norvegicus
  Genbank Accession No. AI012807
ccagtctacagtttattgggtttataactggacaaagtcacacgtgtacaaaacgaagctcatactatcccaaagcagagtagggactaatgactggggatccgttactggccgttgggggagctctgaggtaagggtattcaaccttcccactgcagaggtgtggccacagggtagagagaagaggggaccacctggctttggtcacaaaactcagggcctggcactaagccaggacagacagacagaagcctcaaaaaccaccctcccaggaagctagggactgcctgaccagtcccactgtgatgtggccggttcagacctatactcaggggctattgggaagggaaggaggcagagcaggagggaggaacgacactggtgagcggtcactgggggtgcttggacctgtggaaagggtgggcaggatgtgggccaagcgcagcggggcagctagcagcgggtttcgtaaatgccacttcggccaatgtagcgcacccatttgatgaca

SEQ ID NO: 1279 - DNA, 372 bp, Rattus norvegicus
  Genbank Accession No. AI012932
ccagatcaacgtttataaatatgtacagatcagttacaggcacttgaaatgtctttggctggaataacccaacattgcaagatcgtgtattcacagagtggccaggccctggccgattcagcaggcaatgatcatggttcttggtctctcagaaaatggggagctgtgggattaggcatcagccaaagccaccttctcagggcaaaattcaggattgctctgccgcagtttgctgggtctgcctttgataactgcatagcagaacatcgttatcaccatcacgaaaaggaagtaactggtgtgcatgagatgcaggtttattaaggagcggtcgtcatctgggacaatgacggtgagcttgggatttaaagc

SEQ ID NO: 1280 - DNA, 513 bp, Rattus norvegicus
  Genbank Accession No. AI012945
caaagttaaaagcgcatcaaacacgcctagcatttattattttagtcaaacctacggacccctcagtaaaccctccttggggcctggccccagcagtttaaagctgaagaccttggatgtaggtggcatggatgggactagtaggtagggactggctctaaggactggctctgaaacagggttagtcccccagatggagaacggtgtggatgggacagaggtccggggtgacctagcttttgagtaggtgggttcaataaaaaaattcacaaacaaatgagcgatacaatatacttttgccaccattccttcaggtccctgccttttagggagatttctatttttccctggactgataaacagcctggacacgccctttctttaccattttctacaacttgaagggaagtattggggtacctagactgggtctacactaatccctatcatctcccccaaattggccctcaaggcagaaaaggcaagatcttctcaagggtgaggatctaagtc

SEQ ID NO: 1281 - DNA, 546 bp, Rattus norvegicus
  Genbank Accession No. AI012947
  misc_feature (1)..(546): n = a or c or g or t
aggcaagagttgaaaatttatttagaaaaaagcaacccctcacccagcccagcgaggcatttccggggccctgctcttcccaatcacgatcccttttccactccagcttccatcacactattatgaggctgctacttgggtgaggggttcctccaggtactgcaccaaggcctgggccttggccttgagcatcccgaagcctacagtctccttggcatacatacatagcagaaggttggccaccctggtaatggctacacggccctccatgcagtccatgaggataaatttgagactgtcttcattaaacgcttggttcccgttcctatcgtatgcggcccagatgttactggcgatggccgcggtgacccgggcatctgtgtccccataaccggagtaggccagcaacgatccctcattattcagcagcanggtactttggactcctccagtgttggcttggcttagcacctgcgtcaaagccttaggacgcagcatgcctgcgtctcttaaccctgacctgctcccacaaacactacagtcgca

SEQ ID NO: 1282 - DNA, 536 bp, Rattus norvegicus
  Genbank Accession No. AI012951
agatcagaaaatttttattatttagtttctttataaggttataaaaatttagacttttgtctgttcttataagtagttgttatcactcaatttttgaagacttcacgtcaactaactcagaactttaaaaagcattagtgatcccttctgaggcaacttgtgtgttctattgttcatcaaatttattgatccaataagcctggggactgagataagatggagccgacaactatctccacaatcttaaaagctaagtgaaacaaatgtcctcatggtccaagagacaatcaagtgtagccagatcacttgaccagcaactagcgtgtgactacataacttctagcagcagaacgcccgggacagccatgagcaaatgctttcattcaaccgcaaattaattcctctgtaagaaataattttaaaaatactctaaaatattgttcacctgcccgcaaacatgaaacacatcaaaggtcttgtttgtctccatttttccctgtagaatcaggtgtaccggcaacttattagtttcaaca

SEQ ID NO: 1283 - DNA, 473 bp, Rattus norvegicus
  Genbank Accession No. AI012979
accaacctttatgtatttattcacacacttgataaaaatgtcacagttatgagcaaactcattatgatgacacaagtaactgtacagagttaaattacaaaaccaagggcaaccataactacttagtacctgagccccagctcactcacacacacacacatgcttacaatcgctctcacactcacaggcattcaactacagatgttaaattcagatatatgaaagacattggggcttctcgatgcaactctctgccaacaactgaaaggacagaaacactgggggagttagttgtttccttggcacagaactcaataggcaacaagaaagttaaagggttatgttcaccttgggtttagtttcctttttcaacaccacaacagggtaggtagcaagcacgcacagaaaatttcagctatattaactccaggaaaagagagagaaggatgtaaaacttgatccctatttaccat

SEQ ID NO: 1284 - DNA, 447 bp, Rattus norvegicus
  Genbank Accession No. AI012995
ttgtttgtttgtttaatgtataagagtctgacatgtcttggggaggggaatcagcatgaaggaagatgatccgcagtgacaaaacaatcaaaactggcagcaactcccagttttttttctcctcctttcttgaagttataagacttcctgatgaatggctgcagcaccccccccaccagactacatttcctagaattccttgcaacagaaggctacgtagcctgaactgaccaatgggatgagtatatctacataatttccggttcctgccactcaaggactgggctggtacacccccttttctattctagtcatggcgaagttggcgtgacctgcttgtttcctgagggtgatggagtgtgggggcgttggcttgtgactcagctgtcaataactttattataaacaggaccttccctatgtgccccagcaacgcatccccccccc

SEQ ID NO: 1285 - DNA, 536 bp, Rattus norvegicus
  Genbank Accession No. AI013031
aaattaggtcacactctccccagaaggaatccaaggaggaaaagcagtcatgtggccctggaaacatagcaaggtagccaactcagggtcacaggtacggctggtcccttgacagctcccacctcttcatgggaggagcaggtgtcactgccctcttagtggctgccacagcagaactctcagctgtcttgcccgacaccagggccttttgtgaggacatgatgattgagggaggcacaacttcccggcggccatcacgagtacagtagtaattgttggacagcttgtgactggggcccacagggagcttcggaggtggctgggtccatgtagatcaagtaggccttgaactcacagaaatctgcctgcctgtttcctgagtgctgggattaagggttgtaccactatgaccagccttgaatctgggttaggtggaagaatgacaggatgagggcagcaagcagggcctgctcaccgcttggcgatctcctggtagcgcagctgcagcttcgcctgcaggtcttgcccagacgccc

SEQ ID NO: 1286 - DNA, 568 bp, Rattus norvegicus
  Genbank Accession No. AI013039
ccatagaaagaagaaaaataatttattccaaaagatgtagaagtaagaaattcatcctgaaaatagagtttggtgtacatctgctggggtagagcttctctcgagcaggcactcctgactgtcccactgagtctcatttgtcttgcagcaattcttaaacacatcgctgactctcatgttgtgagcaggcaagagccatattcaaagtggcaggcttcaagacaagagtaacagatttcccagaacagcaccttttctctcagtcgagtgcagagacacatctcaaagtcagctatgcaggcacataattcaaagtgtaaaaaaggtgaaggagaaaaaatactgtatgcagaggaaggccttcaagtgtaaggcaggtaatggccgaagtaggctgtcgaggaaggaggtcggtgtgcaggtgattctgtatctagaaggcttctagctgtgacctcagtgcctgcactgtgcagcatgccttcatcctcaaggccagtgatacttcagataccagatggtttcagttttcaactgtggtccaaacagaagattgagctgcgcccct

SEQ ID NO: 1287 - DNA, 602 bp, Rattus norvegicus
  Genbank Accession No. AI013044
atgtgttttttttttttttttttttcaattttaacactttattgcaattattcaagtctttcccactgtttacaaatgtttcatttttatgggacctttacaagtttgtcttcacaatgtggcctctgcccataggcctcacacaccacttgcctctgcctcgggacagaggaggggaatgtgcatgcacaggagcagggaccaggatacacgattcgttcttgggagtcatgtgatgtctgcaggctaacaggacatctacttgtccagagagccagtccctacccagggacaaaggcatacccaaccggtagatatgaaaacatagatgtgcacacataacaaaacaacaacaaaagccatcaagtccactctgtgccgcacatatgctcttgggtgtgtgggcatgcaatggagcccgatcaacctgccagtggctactcctgagagaaaactgactctccttcccctcagaagctatagctagctaatgagccattttcaataatttgttatctgttggcacctcggccaccagggggcgctctgcagtcagactgcctgaccctgggaatcatgtgacttatcttaatgcagcactc

SEQ ID NO: 1288 - DNA, 493 bp, Rattus norvegicus
  Genbank Accession No. AI013071
aaaagtgtcttcatagcagcatgtcagacgggttctttgctcgaacacttaagtctagcagttgttccttcacacagtcctggataccagagcaaagagagagggcacgggcctcacaatggaatgatggagctctttcctcagtcgccgaccactcctgaaatatgcaccttctcaaaaaacaaatttttgtttttttaaaaaaaaattaggtacaaagagaaggaaacagtcaacgaggctggaatcctgttactgcagctcggaggaacagcttcaggcccgcttcagcggctctgcaggctacaaacgagtacccccctgttggactgcacatctgaagctcttcttcctccaactgccccccccggggggggggctccaggatctgaggatgggctgcaggaagctggcccagagaggctgcagcgaggcctgtagtcagcaggccttgcagggctttccagctccatgtcatcatctgagggcccag

SEQ ID NO: 1289 - DNA, 556 bp, Rattus norvegicus
  Genbank Accession No. AI013075
agaacagccaagatatatttattactaaaaataaaagcaactgaggattaccctgggacgcaatgtcagctcaggaacatccatgacgaaatgtgtatcttccctgattctcagctggtgccttcttccagagtgagttttagtttacaactcataatgaggacaaggaagcgggctccatccctttcctgttcagtctgaagactgaattgggctacactgggatggagacttgaggtgctgcaggtcagtgtcaaccaagggttcatgtgtcaggaactcgggctggtaagacgacacgaaggcttcatgctgaagctcaggcaggtccagggagcctggcagaatggaatcctcatggtcatcatcaaacgtctgtgtcggaaaggcttcaaggctcatagctgcatcattctctggcagctcctgagagagctgccccttcctgggtttgcacgcatcgaatttcacccactggtaattgacgcagttctgagcttctggacaactctgaatcaggttgtggatggttggatgagaaaacccaaaggaagtc

SEQ ID NO: 1290 - DNA, 507 bp, Rattus norvegicus
  Genbank Accession No. AI013090
aaacaaatcaacacacttttacagtgccttgctggagatctgcctcagaactgaaccatcacttctggtgaggaagaaactatggcttcaggtacatagcttaagtttggccatgcaccatcataaatgcttcaacatctccagggactgaaagctcttatgaaaggtacttcttcaattcttcaaccatctcttgaggctcaggaaatttgagctttcgtggagggcccttcttaataccagtccagagttcaacacgactgttgtccgggcgcagcagcgtcacttcgaagctgcccctccgcggcttggaccggttcacttgcacagatatctctggggcctccagttgcagagcctggctcagggcagcagcatggcggccgtagacacgtcagctcgtacaatgctcaatgaccacggccgcgccctccgccagtttctcgcgcttgtccgccgactctataggcgcggccccggccttacgctttcttccgagaggggcca

SEQ ID NO: 1291 - DNA, 492 bp, Rattus norvegicus
  Genbank Accession No. AI013097
  misc_feature (1)..(492): n = a or c or g or t
acaaaagtcacctgtaattccagctccaggaatatctaatgccttctactcacgtgcacatactcgtagacatacccacccacatacaattaaaaacaagatctgtaaaagacacagagggacaaaacatcatcagggatttattggacagcagctcagagttgacgcctccacactctgagagcaggcgtctgatctacttcgcttctttgggcctttgcaggtgacatcgtgacaagaaagagcgcccttcatatgtacttgtacacgaccttggagggcacagtttgaaggtggagtcgcacaggacacttgtaaaagtgggacaacagagtctcactgtaacccacgagaaagtagaatttgtgtgctggcagctgcnctgaggacagggcacagatgtccacttggttggcccggcgcttcagaacaatctggtcagccaggcagcctgnaaaggtgcccagcataaactttcgaagggatacatcc

SEQ ID NO: 1292 - DNA, 447 bp, Rattus norvegicus
  Genbank Accession No. AI013132
gcaatcagcaagagggtttattggaaaacacaggtacctgcgggcacacagtctcttcggaggacttgcgcgcccagcagctccagcatggggcttttatagggattggggaagcagaagcgggtgtacagaagcagatgcatagttacggggattggtggattcaaacgaggcacatagacatgttcacatatgattggctatttcacatgatgaggtaataaggtatagctacacacattggcaggtttggggcatcctggatgttgggggctgggggcttatctcttcctgccaggtggcctgtgagtcagatccggtactcctggtctgttctgcattcctttccttttatggtctgttagttctagtggcatggcggggctgcctgagcttgcttttcacagtgtttagtcctgagttgaaacatactcttttaacttcata

SEQ ID NO: 1293 - DNA, 480 bp, Rattus norvegicus
  Genbank Accession No. AI013157
  misc_feature (1)..(480): n = a or c or g or t
gagtgctcaaacttggcttttattagcacagttctgcctccaggagacacagataaccaagggcacccactcactatttgggtcctggttgtatatctgcttccaggttagacctgctttcctcaggtatagagaggcctgtgaagggaaggcatgaactcagggttcctttctcctcgaggtggaagaagatacaagaatctaatgactgatgtatcatggagtagtggcaggaccctaagctgccctggaggcccgggtatttggcgttctccctcagactggatcactgccctcccatagtggccaatccctagtttgacccgtaaacatttttggccaatgttacacacacaatacaatcagattactgggctctgagcttcagctgctggagtgcaaggatcagatatgtgcacanacaacaaagtgtggcctttggtctccttgtagctctcccttcaccctgtgtcacactgc

SEQ ID NO: 1294 - DNA, 464 bp, Rattus norvegicus
  Genbank Accession No. AI013194
cctgtaccaatgtcactattctcaggtgggtttttgagaatgaatgtacagagtttatgatgtgtgtcaagcatgcctcggtacccacaggctttacaagaattacctattgtttgcttctttggattgacatgcagatctgtttcaggattctcacactcaggacagagaacaaattttttaatgaatccatccaacatgtcttgcagcttattcgcctcatgagatccattgacaatgtaacggtcattcttaacatcaaactgggtctgtgctcccagctcacaaccaaaatatttggtgggatacgttggaggccgattaagcgcctttgcaacgtcaaccatgttgactataactgtcttgattccatttcctttgccctcaaccttagcaatcaaacggggcatcttgtagcgatagaactggtctgacacgctgcggttgacgttgacagacatttt

SEQ ID NO: 1295 - DNA, 470 bp, Rattus norvegicus
  Genbank Accession No. AI013204
aatatctgtaatggtactgactttgcttgctttgaagtagcttttattttttgcagtaactgttagtttttaagtctcgtagtgttatgttctagtgaacctgctacagcaatttctgatttctaagaactgagtaatggtgtagaacactaattcataatcacgctaattgtaatctggagacgtgtaacattgtgtagccttttgtataaatagacagatagaaatggtccgattagtttcctttttaatatgcttaaaataagcaggtggatctatttcatgtttttgaacaagaactttattggggatacgtgcggtggggtaaatcagtaagaggtgttacttgagccttcttgttttggacagtataccagttgccttttcccaaagttgttgtaacctgccgtgatacaatgcttcaccagacgcggttataaaaatggttcagaattaaacttttaattcat

SEQ ID NO: 1296 - DNA, 475 bp, Rattus norvegicus
  Genbank Accession No. AI013247
caaaagagaatgagattttttattacttaaaatcagcaaactcatgttcctcaagccccagaccacggtgggcagctcttttacctctgtctcctccactccaccccttagccacaagtgagaggaatggaaagtaagaagccaaagggcctctgctaggagaagctgcccggatgtgtggtaagtatggtccagctgtggctggagtgacagccacaggcccctccctataaatgaagtgcctgcagccacagctgagggagaggcctacttgtagaaggaagggtcagttcagcaccgggccacagggcaggatctctgactcctagccaaggaatggactaaaaacagaggtcaggaaggcagaaaaatgctggaagaaggaggctttggtcacagggtttttgttggtccagttttgatggttgtgggggaaggaatgcattagtaagcccagagagagagagagagagac

SEQ ID NO: 1297 - DNA, 494 bp, Rattus norvegicus
  Genbank Accession No. AI013250
  misc_feature (1)..(494): n = a or c or g or t
gaccctatctttcccactttggttccaactctgcagttaggccacaccctcccccttaacagttgggcccctgggaggtgaagaggtaaaccacagagtttggggaaaggcaaggtcgtgcatacctctcaaacaaggaaataaaaaggggctgagtaaatgtacaaactgcatgtgacgtgagcaatctccccttggcagtagccaaatgcatagtctgtggcttcttgggctcaatcatagtccacagttcctatgccagtgatgctgtgagaccaccaggcatcattcaacatgtacgggggctccagcagtttcaggatggtccgtacagttagggtcctgatgctctctctctctctcaagagctcgggctcgggcatctttggcttcatcttccagctcatcaaggaactgttcctgggccactgagtanaaggtgtaaccataaatagctaacaccagggccccgatgcccgggggggggggggggg

SEQ ID NO: 1298 - DNA, 528 bp, Rattus norvegicus
  Genbank Accession No. AI013271
aggaataacaaacatttattgagaaatggaaagtaacaagcccctccatcccacaatgcctttctctcctaaacaagacacaaagaagtaatggaagggagcaggggacatgagggttggcccatcttcttttctgtttcccaagatgacattctgaaatgcaggaggggtaaacgccccactccccaaagtaccacatggccaggagggtgaggctgactcagttgagtgtaccatcactgcacgcctggctcaaggagagtaggggaaccaggaagggcctcagccatccctcctctatacaaagcaaaaagcatgccaactgttcccagtggcagaggagtgaggcccttttgtctgggggtgttctcttgggccaggaagggataaacaccgaggaatgtcttccagtttctgagaagattaagtttgtacccatttagaagggtttaagagaaggaggcttctttagatgtggacaccccagatgtcattcctggattcctctgctgggcaacctcagagctg

SEQ ID NO: 1299 - DNA, 487 bp, Rattus norvegicus
  Genbank Accession No. AI013297
aaaggtcacatttattaggagattaaggggtgcattatccatggactataaatagtgcacagctgacacttcagtcacagtcaagcagaaatgtagccagctccaacctattttgtagacactcttgttcttttgttccaagaaaagtttgcaccgtaagacttggacttgggtttcggaaccttcctcccttccacgtcatagctccatccatgcttttctgcaaaggcaaccgcatcttctttggcactgaaggtgagaaccatgttggagaggggatcggccgttgatgcccaacccatcaaaggattttcccatctctctctggtatcaaactccatcttccatttcttcgtgttgtttactccagactgcatgttattgcgagcaggaacaaagattctgacctttctggttttgatgtgctcttctggaacaccagttagaggagtaacatcctggatggaactctgcagacggaaaccgc

SEQ ID NO: 1300 - DNA, 476 bp, Rattus norvegicus
  Genbank Accession No. AI013387
cacagccaaagaaatttattttaaaatagaaacaaacatacattaagctttaaacaatcaaattttaaacaaaagggaaaaagagccatttgatcccagagttggtacagaatgacttttgtgtgtgtgaaatccacgtaaggagcacgtggacaagctgacatggaaatccatcatgcgtgctcaggtgtccactggctgccatcagacactcatacactaagagctacccttgactgactgcccactggcaccattcccaagacccaagttcatgtggggtatatggtcaagtgctacggttccttctgaacacgagaagagagggtgctcaacagggtcttctttccccgctgattccgccaagcccgttcccttggctgtggtttcgctggatagtaggtagggacagtgggaatctcgttcatccattcatgcgcgtcactaattagatgacgaggcatttgcctcgtgcc

SEQ ID NO: 1301 - DNA, 445 bp, Rattus norvegicus
  Genbank Accession No. AI013437
gcaggtaaaaattatacttttatttgagtcaccaggataaagattcactttgtggttcaagtcaatgttcaaaaatcataacaggccagaaagaattgatcccaagcacaaggccaggagggaggggaccaaacagaccaaagaaagatgacaatccgatataaaagatgagtggtggcttcacacgcgcacacacacacacacacacacacacacacacacacacacacacacacggatgaaatgttagacagaggtggacttcacagggtcacttctgtttctgtttaaatacaggctctgtggggtggttctttttgtcttgtgtccagctattaggaaatgaaatgttccctggagggacatgatgaggggacaggaagcagcatgggaagaactcatgctcctcaccacggcgcttcttgcgctacaggattggtccaca

SEQ ID NO: 1302 - DNA, 396 bp, Rattus norvegicus
  Genbank Accession No. AI013442
agtcactgaagtgaaacctgtattttctcaacagtatggataggctataactacaatctctttgctttaaagtctctgccatcctctccctcaattcaggtcaaagttcatagcagcaatgctcaagtcttcagccaggccagtgttgtctgctcctgggccagagttcacaggtcaggatcagtcagtccggagaatcatgggaggatgttcactatcttcatccaggcgtagagcgctggcttcatcctctaggcatgcgccacccacagcacccaggtcatcggtgtaggcttccaagttggcgtcctgtcctttaccaagtcttgttggggacgagggcacataggcacctttggcagctgctgtgccgtatgtctgcgttactaaggggca

SEQ ID NO: 1303 - DNA, 506 bp, Rattus norvegicus
  Genbank Accession No. AI013448
agaaaaaaattgtcactttttacaagctgaaaaccagatttgacttaatacattttcagggatcttggccaagtcttgcaatctttagcagaatgatatcatagtaccaggtgccagcagtagggttataaactctttaagtacacttatctacagttttacgaagaaacagccaaagtctagtccttaaggtatgagtcacccaatctcttgacctatgaaggacagaatcacctgagttttgtggtgggcaagctatggagaaaccagaggaagtttctcttttttgagacaggatctcaccaggtacccctggttgtcctaaaactctatagaccaggctggccttgaactcatagagatccacctggctctgcctcccaagtgctgggatcatgacgtgtcccaccatacccagcttcctggtttaaatattccaggttgctgtcaatttaataaaagcctatgacaagcggacccacagatatttggttttactggtgtat

SEQ ID NO: 1304 - DNA, 610 bp, Rattus norvegicus
  Genbank Accession No. AI013494
cagcacccactcctttattcctcccttgtaaaggagacttcagttcaggagcttcctttcctgccctcaagtccccatgagacaagggatcacaggcaccagatcttgggtgagacagtacaggtctcagacacttgcctccagccctgaggttctggctgtttatgtcagcgagtcagtagtacccttccaaaaggagggaccagggtcagttctgagtggcaaaagtctcgagacaagaggccaccttaattaggtctgaggggaacccaccacagcaaaggtcacctgtctgaatagagactaagccagtgtgggcaagccagctcagttacctcaagggaacacagtccttcagtgagaaggacacagttcacatggaaggatgctctcacacacatcaaggcaacacgccaccttcttggcccatgtggctgcagctggcagcagacacagcaggcttcttggtggataaagagatggcctagattccagccataggagcttgtcacagcaggcttccagaagaactcaatcccgaggtcggttgaccatgacttcacccagggcctccaacacctctcgcttgtagtcatcaaagcctcgtgcc

SEQ ID NO: 1305 - DNA, 571 bp, Rattus norvegicus
  Genbank Accession No. AI013512
cggacaggtaacatttattaaaacttgtcatacaaaaggacatggtctcttctataagaagaaaatattaaacagtaacattcaattaaaaccacgctgtacactgaagacagcaattctagagagaactatttaacttctaaaacacaggtggttcaccaagtatccatgatacgcacctaacaacaatctgcttaccatcccatggttctggggcctaagagtcacctgacctgcataaataaaataactttctggaagaaacattgggaacctcataaaaagaaaggaggcagcagcaactgagacgacacaggcttcaagcaacatttaaaaagaaaaacaaaatcacatttgcaaacggcgttccagcatcttcccacagggcactatcagtagaggtttgcaaaacagtacctttaaatatgtaaatagcagagagagagagagagaaacagaacaaaacaaaacaaaacaaaaaacaaaaaccaagaacaaaacccaaagcaactcaggattcactggataaagttagttaccagtcaaggcagcctagattccaggaggccta

SEQ ID NO: 1306 - DNA, 541 bp, Rattus norvegicus
  Genbank Accession No. AI013540
gggaaaacatttgacactttatataacaaaagcaaaaggtcaggatcatttcacaatgtcataagaagcatggatctgctagggttcccaaggcggactgcgccttccgtccacttctgtctccacatgatacaaaacatcagccagagtgtgttctaccacagcaccccagcccatgtcactcatagggtggtaactgacgtcctttggagggtatttgaaggatggtccaaagttaatggaaaccgtgcagctcttgtacagtgagatggctgggaagtaaacaccttcaaaaatatccttgtaagccacaccctgattgacaccatttttataaaatattatctcagaatgtggagtctgttttaggctcttctctgctttgtccacaaagtctttttcttcaaaatacaaataactcttgaactttatcaaagccttatctttgtacgtgtccggcagtgacttggctgtctctgtatcttcaggaagattgatataaaaccctaggacatctccttgtccatagccagacgagtag

SEQ ID NO: 1307 - DNA, 590 bp, Rattus norvegicus
  Genbank Accession No. AI013558
tgtgatttttttttttttttttttgtaagaattgaagtctttatttgtgatatccataaacgttgctattctatgtttctattcaggaaggcaattttctcctattatcagtgtttgttttttttttataaacaacaacttgaattctattgcatgaagggctacaaatacacgttaaccaagcagaatacagatatttgtttttacaacttgcacctaaaaccccagtacacacagctgcttcagtagctatcagagcagtttggggctactgcccaagctatgcatagcagtttacatattcaaatctcacgtagaaaagcgactgatcacgggctgttaactacactcctgggaagcccgtctcagctacaagtaaatgcggacctttcaagtctgcagacttctggtggcaaactgctaaatctgatgaaattggtttttttaaaccaactttcttgcagctatactgccactctaccagcagatggtgctacatcggttggacttaaaaggacaaagttcagacttagggaagaaacggttttttttaaacctgctctgaaaatacatcttaaaaaaaactcatt

SEQ ID NO: 1308 - DNA, 568 bp, Rattus norvegicus
  Genbank Accession No. AI013627
gagtggcagagaaatgttttttaatttggaaagtaagggttacactgaggggaggcagattctgtgttaacagacgcgcactgtggagttggtccaacagagcaaagggagttctctggacgccccacctcacgtccagcaagagtcatagctgagcacgagtctgaagaatccatgtacaacaagctgccagctcaagaattctgatccaggagacgtcaaagagtgagcactctgccagtctccaactccacggtaaggaaatgggagcggctcagccgacgaagttcatgacgacgaggtgcaggatagtgctggcaaagagaaaatcagcaaaggctcgctcaggagagatgccttggaaatccgccttgttctgggggttgatctgtattctcaagcaaaccgctaagatgaagctgcccacacaagagatgaagccagagaggaaagagttgaaggggaaggtgcccacgaggagacagtagccgaactgcagcgccccggtcagcaatatataaaggagataggcatccagcaacttcagccgctgtggagtggagctcaa

SEQ ID NO: 1309 - DNA, 498 bp, Rattus norvegicus
  Genbank Accession No. AI013697
caccacagacactaagatgctcgagtaaatgctggagaaaggccttttaataactgatgcgaagcggaaccctgggcatgtgctcgctccccccacccccccttcagcatgcagctatcgtcacatgggctgatcaagagtcacagtcgagtttcatgagtctgtctcctgtagcagaaacaatttcaccgagtgcacgcaactatggcagagtatcaccattctcggcgaccaggttggtacatctacaccatagtaaacattaaaatctgagtccgtaaagcattgttaaatcacacaaaccaggatttcgttttaaatgtatttatgaaatctgctgctgagtccaagcatgtaggacacacgaccacctgatgaagctggatatggaaggccttcagtaggtccaatggcggagtctttcactcgtcccaagtatctccatatttgtttactttgacttctttttggggccctctttcctgcataggcctgact

SEQ ID NO: 1310 - DNA, 493 bp, Rattus norvegicus
  Genbank Accession No. AI013718
cctactcaggctttattcaaagaccaagaggtataggtgcaagggagggaagaagggcctggtcagaaggcaagcccggcaggaggcggcttaacggtacttggaggtcagcacagtgctcacagaggcaaggaatttgtccagagaggcgtgcatggcgggtgtgaaatctccagggtggtggcaagccaaggtcaccagcaggcagtggctcaggaacttgaagttgacaggatccacacgcagtttgtgggcatgcaggtcgctattggagctggaattaccgcggctgctggcaccagacttgccctccaatggatcctcgttaaaggatttaaagtggactcattccaattacagggcctcgaaagagtcctgtattgttatttttcgtcactacctccccgggtcgggagtgggtaatttgcgcgcctgctgccttccttggatgtggtagccgtttctcaggctccctctccggaatcgaaccctg

SEQ ID NO: 1311 - DNA, 539 bp, Rattus norvegicus
  Genbank Accession No. AI013740
taagcctgcggccgcatgtgtttttttttttttttttttagactttgacaatactttttattgtttatttagcccttcacagctcaccccacacagagaaaggttcttatttgtagtgggtagctcattttgtagcttatgtggggaatatggttcaagcagaactcatgtctggctgctggtactgcagagcaaaggggaatctaggcacacccataaagtgggttgattggcaggctggaagacaaagctcccaaaaaaggcactttaacagggatgtagctcagtagagagtgcttgcccaggaggcacacagctctaggttcaatctcttgtaccataagcagtttccatggggtcagagaatggctggagagttgtggaaaccagaggaggtattgttttggagacaggacctcactgtgtagccctggcctcaaactcagagatccacctgcctctgcctcctgagtgcttggattaaaggcatgcaccaccaccgccgcctgacaggaggaagtttctgatggaggagctat

SEQ ID NO: 1312 - DNA, 422 bp, Rattus norvegicus
  Genbank Accession No. AI013750
gggcagaagatccaagtgcccttatttctggtagtaattcctccccacccattcaaacagtggtataaaatgagtagaaacaaaaatcaggccatgacatttttccaaggaacaccacccaccccctcaaatcaggacacacgattgatgtctaccccagtccttctgccaggccttccctgaagccatcactaaccagttcagagggagatggaccttggaggacccttgtgtggcatgctggtgctgggaaaacgtagactagggaccaccaggtaggctactgtctcccagccttcttcatggtcccatttatttctccaaaaccaacaacactgctgggctgtctcccacagcatggtccctctggcctctcatgctctgtgtgactctcatacctctaaggcctcaaataccaaaga

SEQ ID NO: 1313 - DNA, 475 bp, Rattus norvegicus
  Genbank Accession No. AI013755
agacgccagtccgttttattagataaacaatgccattttagcccatccacactagagttctgtcaccaatacccaggaaagcaggcagacactgtcctgtcttcttcttgttctggcccttgggtctcagctagcatctatgggtttctaagaagcgaagtccagcgtttcagaagaaaagaacactgtgaagcctaggggtcggcccctggctctcctattcacacgcagacacgcatctgtgcacaccatacagataaatatatatatactcttttttcttttacaaaaataacacagggtttgtgcagttctattaatttttaaaaatcacacaggcagaatttacactttagcataaccgttttttactttggattaaagtgggaattttaggtcccaaaataatttacaatcaccaaagagaggtcctgcagcaacaactgaatgcactctgaactgcacaaggacagtg

SEQ ID NO: 1314 - DNA, 540 bp, Rattus norvegicus
  Genbank Accession No. AI013756
gcggccgcatgtgatttttttttttttttatataacaacaacttaagcattttatttattcattaagcttcttagtatcacaatggaatgatgagaaaacaaggaacaaaaacccgagagtcttcgagaatctctgacaaagagcagagacttcaaggcaattggaggggcaggaggctcgacagaaacagttccaatgtggaatttctcctgggctggctgggccaggagaggtggagaggtggaatggtgagaaggtggcactgtcgtaagtggtccttggcgattctgactcaggactgacacacatgatctgcatgaaccactctgtggagtctctggtacttccctggcatccagccacagggccctctgcctgctccaaatgcatggaaactctaccagtgccaaatggactccaacacctgctgtgctggtggcagcaggagagggcagaggcaggcaacttgctcaaggcatgcccatccagagagtggccaaggcttgtcacagacttccgtggcacaggtgcaggtggtg

SEQ ID NO: 1315 - DNA, 325 bp, Rattus norvegicus
  Genbank Accession No. AI013774
agagttctttgcacagctgtattttgaggtttctactgctgtgagacctgagattcacggtgtctctccctcagtcccaaaagctccgttctgagttctccaggctttggtggaatttcaggtattgtcaggtcaggccggtagtaccagtgcaccacctgggctccggcgcacatggccaggaggctggaggagagcattttcaagtagaccgaccagggcacgcccccgggcatggtggagaactggcagagacggaaagggcacagcgttagagggcagggtagctttcagacagcctgaccactgaggcaccagggtgcta

SEQ ID NO: 1316 - DNA, 551 bp, Rattus norvegicus
  Genbank Accession No. AI013784
ctagtggctcaaatgctattgcttgaggagctctggcaggtataaaacgtagtaacatctgaggtttaaccacatgtgcaggagctgaaggccagatcacaggactagttcatccttggtcaagagaaactacaagcgcatgctgcaggagtgacctaatggactcatttggaccatattcctactctctgaggatcacaggaacacctgggtcaaaatgttctttttacacccaaaattctggcttaattaactctcccttcctaaaattatactcagttcagaaaacaatgtcttgaaaaactcaagaacttaggctactaaaaaaataaaagggaatttcactgtggtagacaatattagtaaagaccatgtgtattttcctgttgctaatgaagacatgatacattcatgacgatatgtgttaaattctacacagatgctcaccaggggaaaaaacacttcaacttctatctttctccgtcaggtgggtctcagcacataccaagagttcctctaacagccctgtcggctgctctggaagaggaaca

SEQ ID NO: 1317 - DNA, 583 bp, Rattus norvegicus
  Genbank Accession No. AI013790
aaaacaattgctttattaaaaatagcaaatctcacgagtacttattaaacatttgtcactggccattgggaaacacacctgcgtgtgtactgattgtctgacgtaaactgaagctggaccgctacaggacacctgtgcaccaccaccgtgtgaccggcactgggtcagtgcggccatggcaaggacgaatccttcagcccgacaacgtttagcacgatgcatttcaagtataacccttaaggcaacaaaagaaagcatagcagcacaactctgtgtcccacttcccgaggagacctacaggcgggccacggcctccctggcggtggagtacagcgagcacatggactggaagcggcgtgtggacatgatcactgcacttgcattctcgtgactcgagagtctgttgcgggagatgattctgccacaggactgggctggaagtaatgactgctgcttccctgcaagtctcagagcaggctgcaggctgcgggccgcattagctgctgggtgcactgggaacgtcctgcgcatcggccaaatgcagtttctgtatagaagaattcaattcttctaagtcagacag

SEQ ID NO: 1318 - DNA, 545 bp, Rattus norvegicus
  Genbank Accession No. AI013834
ggttgattttttttttattaagatacagatctatgaacagaacaattatttgctagctagattacagttccttgtaaaaataatatgtgaaaaattagtagaaaatgaaaatctgaaagttatctgaatctgaaaatgttaagcaatttctgctgcacattaccgtggatcgtttcaaagaaggctggagcatgactgcgtagacagaacgtaatgattctggttttattaaagcacgcagtgggtccttcagagcttggcatagtctttcagaatcatctgtagcttctggctcagcatgatgtttcctcgggccttcagtctgccactgaagaaggcattctgtgggttaagcttgcccaggaccacttccatgaaatcctcatcagaaattgtgatggtcgtgtcagcagagcctttggcagggccttggtaaacctctccagagccgttcttcaggtcaatggtccacttggctgcaacattcccatttttcgtgatatgccattcaaatacagcatttactttctttaccacctcacgtc

SEQ ID NO: 1319 - DNA, 463 bp, Rattus norvegicus
  Genbank Accession No. AI013853
ctggatatgaaaatttattattctgtttccattgtcaaaattttatgatcttggtctttccttcttgcctttgtacagagccaaaagagacacattggctactttaaccaccttaaagcggactccaggaatatcacccacggcatggcctttgcgaccaaatccagcaaccagaacttcatcattttcctcaatgaagttcaagcaaccgtcattgggcacgaacgctgtgatcttcttgccgttcttaatgagctgcaccctgacacacttccggatggcagaatttggctgtttggcttcaacccctactttttccagcacaattccctttgcgtgagaggcacccccaaacggattggccttcagggctgtgcccaagtgggctttcttgtactgtttatcatgccacttctggtcccgtcggtgactgcggagcttccgggcagtacggagaccacga

SEQ ID NO: 1320 - DNA, 481 bp, Rattus norvegicus
  Genbank Accession No. AI013858
ggtatctaaaacacctcagtttttacacatgcaacaataaaagagtaacaacaaaagcaagaggaagtaacaggataaccaggaaggtgtgatgagctgtcctgcccaccaaagttaggacacaagaatgaccacctcctcagagctgctgcacaaacactgccaccctacactttgtatatgaacagctttcccaagcctgtctacgtgttaaatgtttctgtagcaggtgtgaggcaggtgagcaatgtcagtgagttcaaggctcaagccagccaagacggcaaactaggaagccccctgagaaaactgagtgttgagtgtcaggaatgtgtgtccacagtgatctaatcaactttgaaaaacatccctatctctttcctcagcagactgtgggcacggagatactgagcgtgctttgatcctgtggtgaggaaagcattctggggacagtatgatagaaggaacagtaggacataag

SEQ ID NO: 1321 - DNA, 568 bp, Rattus norvegicus
  Genbank Accession No. AI013861
  misc_feature (1)..(568): n = a or c or g or t
atcaggatagaaatttatttaaatccaaaataatatgactatagttagaataatataataattatctaaaggaaatatcatcattggctctgaaacagtctaacggtgtcatttttctggagtcaaaaacatgtagtaaaaggatatacaggaagcaaaaatacagaagcaagccggctgagtgaggaagctgtaacaggagggtacactaagatactgtaacaatcgagacaggaagacaagtatagcaagctgtcttacctatcaacccctgcacagtaagtcagtaacccagaatgaaggaataatagcacgtggttaacaggacaaatttccctctaatttgtctttgtaactgatttctttccttttttaccatgggttccatctggttaacaaaacatttggttttatttgtaaagcagagtaaataaaatatcctgatcagagtgctcaattttgtttaaggtgctcaaggttcanacttaaaaaggtcaactgggctagtcagtgggaaccattgggtgtgtttgctaaacagatgaaagcagcagcatttaaaatggat

SEQ ID NO: 1322 - DNA, 505 bp, Rattus norvegicus
  Genbank Accession No. AI013865
ggcaagcactctaggcagaacccaagggatgaggagaatgggacgccagcctctgtgtggcaatacaacctagaagaacagtgtcaactccctcctaggctttgactctggttccatggtgaggtcctcaagagaccagacctcagcctcaagacccaaatgcagagttcgtcagcacccattccttactcttcagacagcagagagaccaccgtgggctccaactctccagagacagtgtgttctttggatgtgtttggccgctctcccaggccccacaccaccaggcatgggagaaaagggtgtaaggggaaaggagacaaaaggactgaaccaatattcaggtaaccaaggaacaggctgcccgacagaacaggcttaaggggaactgggcacacaggccagctgtgagtccaactttcacattgatgggtggaaggcgggtgggtgtgtgtgtgtgtgtgtgtgtgtgtgtgtgtgttaatgacacttgcctcgtgccgaa

SEQ ID NO: 1323 - DNA, 484 bp, Rattus norvegicus
  Genbank Accession No. AI013871
aaaatgtaaacttttaggaagaggggaagttcacaattttttcacagttggtggctcagccattcatctcagcacttagaggcagtcaggtctccatgaatccaaagccagcctggtctacatagccagttctagaccagccaatgttacatggtgagaccctgtctcaaaaaaaagaatgaaaaatctgaatgggcccaactatttgattggcagtgatcccatgcaaggccacaggataggtcacaacctgcttgggtacatctgtgtcagtaatcctactttgctagagcaggactggagaagggtctcagtgcaaacaaggttgcttccaggaagagataaataagggggcaggcaggctttatgagagacatttctatgtaccacccaggacacccagcatgggaacagctttatagatacctgagagaaagtgctggaaaaacatttccactgaccacctagcctgctctactggtca

SEQ ID NO: 1324 - DNA, 492 bp, Rattus norvegicus
  Genbank Accession No. AI013875
catgtgttttttttttttttttttcatacgtcggaagcgggagagatcagactaaagatgggtgggtatacctggtatttggatgagatgctctgtgggaggctcgcaggggattcgagggtggcttttataaaatggttttattttctagctgtatttaaaggggtgtttaacattacctacttcattaaaaaacaaaaacgcccctcaggaaatttagatacaattgcgctagtcatggttggcatctatgagagagagcaactgcattctgaatgagtaaaacggacgtgtgcattgtaatttacttttcctatgtccccttcgagaggggcaaagtaaaacaaagaaagcagtgcagttggctgaggagactgagcttgcaaagcaataggtctttctgtccaggcagctcctaccccttcagttccattccattttcccttgggactaaaagctctgctctgtctcatttaaagtcttgtcttccgg

SEQ ID NO: 1325 - DNA, 572 bp, Rattus norvegicus
  Genbank Accession No. AI013885
aaactgtttagaaaaaaatttattttgaacacatgaaaggaaaatttagatacccgccccctaataaaacccagatcctttccaaggtgacgggggtcccaacaggtgtccctgagcagtgcccagtgctgcataggaactgggtcttaccctctgcgttctgagctcatggagctgcagaaaacaggtgctggtggcagagacacttcacattcctgaggccggacaaacagacccacgggtggctacccaccagcactccctggtggtgtgcgtgagtgacagctgtcactggcttatttaaaaacacccacagccagcgctccctgcagagggcggagcccactccctttcatcatccaatctggatatttaatgtgaccaggtaggaggcaccccgtcaacagcaacttgggacatcagtaccaagatggttctgccagctggagggaccacccgctgcctcccaggggtccttgtccatggggccagcacgcccctctccaaaggcttccttggcccaggtgcaaggcacacagccgcttggcggcttggctgggagggccagccta

SEQ ID NO: 1326 - DNA, 652 bp, Rattus norvegicus
  Genbank Accession No. AI013888
tgttcttttttatttttttattttttttttttttttttttttgacacgggtaaaatttttattcactaatatggagaggtgtgacttctggatccagccagtcggtgacataaataaggtagcgcaaaaagatcgaagctagagtgtgtgtgtgtgtgcatttgtttatttgtgtgtgcgcgtaaggcttcttggagcagtgccacagacccggacgccagtgaagaggatcactgcggtccttggaaattaccatggagagcacaacgtgggtaattagatgaggatgctctaaagcgctctttccatcttgtgcacacacatgcccgccaaacatgaaatgttcgccttctcccttcccaagtgacggtggctgaacttatttttagtgtcatttgctaagccttcgtgctcacagagagacatcccactgacccggccgctgggcattgtctataccagttcacatcaaagcaggcgcgctttgtcaggtttccagtcgaatatccatttcgcatctgaagtacagtatcgaaagtgactggattatctgagctatttccttcagctgctaccgcttcctcccccaccgtgtttctgctcacgctaacataatttggcatccttgatgtgacacgatgttgatatttcc

SEQ ID NO: 1327 - DNA, 652 bp, Rattus norvegicus
  Genbank Accession No. AI013902
gctgtgaattttttttaatttgaaatccggattaaagtgaaagcagtgggagtgaagctttacaaatttacattactatgtcattgacatggcttttacactgattggatacagaaagaaagagactaacattagaattaaggcagtgacaacatgtgcaaacgcagcacaccccctgacaggcctcagtggaaaagcactctggtcagttggtgtctgacgtggctgcatgcaggtctcattgctcagaaagataggccctgaagagcttcattccttaaagggaaaaaaatccccgtcactggccaacgatggccaggagcagcttcctgtaatctccactggtgtcacttgcaatcatcgtgcttagagtcttctgatacatctgggtgaacatctgttttatctgaacgaggtcaatctcactccgagtgaccacaatcctgaccagggtggagtcatctgttccagcgcctttcatggaatagtagagtcgctcggcgaagaaggcagggcggttgagggcgcactgcaatatggtcttcaaaccgctttcaacgtatccggaaaattcccggctcacactgcttagcaaatctcgattagccatcctggaataagcctccatggtggctctcagctgagggaagct

SEQ ID NO: 1328 - DNA, 685 bp, Rattus norvegicus
  Genbank Accession No. AI013918
attagaattcttttaatagatataaaaaagtactaaaatacttgtgtggttctgctgtgttatttgccctaaaggaagtgaggggcagagtgaagaacccaagtgcagctgggtgggcctttccttaggctaaggcatgctcctcccatcatccagacttgtgagcccctgctgcccgagcccccaattcctgcagcaggaagccccagtggtctggctctggcactgggagtagaaggcacctgtagggctggctgggcaagtgaggacaggtgacctttaacacaaaatactactctggtatggggagcaggacatgtagctgaagcagctgtcgaggccctgcacctctatggcacacgtggatgttggatggccacttctccgggagcgaggaagcctagatcccaacaatactaaaacttgtttttggtacaaaataaatgcaaagaaggtagatgagggccaccatgaaagcacccatgttgccaatgaggctgaagaggcagctctctggggggtatgtgccacacttgctgatgagaggaacatcatccagggtgcagcaggtcttagggcccccttgttcagcagggtcaggagagcaggaatcattgtaggaccagttctccactgggcacacgtggcggttcatcacagccatggcatacacagtccatatgcc

SEQ ID NO: 1329 - DNA, 466 bp, Rattus norvegicus
  Genbank Accession No. AI013967
actttagatttatttttaataaaaaagtcttcccacaagtgctgccgcacacccggggttaccagtccccataactggccgctatttccactcagtggatgcacctgctgcagcccagaaccgtttccagtaccccaggcagaacacagtagccatgcagggagactgccctgggactagaaggctgtttccagcttcgagggctaacggcagagaaggagctctgtcctggtgctggaaagacaggttccaagacctcgctcacagagagtccgccatgttggagcgtcttgcactgctgactgcgggtcaccacacttggcacagccggatcacctccttcaaggccttcagcctctccatgttcttctccttcacagccatggccaggaggacggctctgtctcctgcttcttcagacacgaatgctaccaggttctttgcaaagacatggatgagaggctcg

SEQ ID NO: 1330 - DNA, 299 bp, Rattus norvegicus
  Genbank Accession No. AI014059
aagtacactgtagctgtcttcagacacaccagaagagggtatcagagcccattacagatggttgtgagccaccatgtggtgctgggatttgaactcaggacctctggaagagcagtcagtgctcttgaccgctgagccatctctccagcccccaaagacactttattgacaagcggcttgaaagcacagagaggtgtctgctaacatcaccacagcacctcttctagaggcctcttctgaagaagcatgttatggctaacgcttagcgtctaaagaggctggtgtcccaagggcggtgg

SEQ ID NO: 1331 - DNA, 470 bp, Rattus norvegicus
  Genbank Accession No. AI014072
aaatgccaccaaagtagtcaacctgcttggcagatgtaattgagattctctgacttgctgttctgtttggaaagtacttttgggttttaagcagccaggctacattgaaatgagatatttcagatctggagaaacaagcaggtgttgggaaatacgtgacttaacatgataagggctgggttccagaaaccaacagtgagatctgtgaaataaaacccttaccagtgtggcagcgcagcgttttggacagtaaacctgcaagtctagtgaggactcagagaaagctgtagcacagcacagacaacatggaagtcagtagtaggacagggctcatcagagaccaggttagattacactggcttaccctacagcagttttctccaggtttggctgagcctttatgcacaccattgccctctgctggtggcagccgagataagcaaggactgaaaatggatcctttcacaagg

SEQ ID NO: 1332 - DNA, 438 bp, Rattus norvegicus
  Genbank Accession No. AI014076
ccagagattaaagacacgagatctttaaccttgaagggcaggcaagaggtcggctatgctgtcaacatagaagtcagggaccattttcttcttgaacatgcagtcactttcctgattgctcttcacatcctcaagactggagactccggtgagggtcaggatagtcttcaggctacaggtggagcccaggaggatgtctgtgtccaggcggtctcccaccatgacggtgcgctccgggttgataccatactcctgggacacgcagtcgaagatgaagcggctaggcttcccgatgatgtccgcctggcgctgggcggccatctccacggctcgcaccagacagccggtacccgcaatgaaacgggcgttctctaacgggagccggttgtccatgttggtgcccacgagcagacagtcgggctgctgcaagtaccgcac

SEQ ID NO: 1333 - DNA, 399 bp, Rattus norvegicus
  Genbank Accession No. AI014087
accgtataacttcagttttaattttccatggtatttttctttctgtcttcatgaaatcacctctttacatgggctttggtggaggtcgtggtgcaacgccagcaggtctgaatcgtggtgggggtgttcggtccttccgggcctcacgagatcgattcctgacaaccttgctatgaatggcacagctcacgcagtagtgcagcttgacatagagcttgggaagcacgtaagcgtcgaagacgcttgcttcagatatgtccctgactgcagcggcttctacaatgttccgaatgacaaacttcttaatggccttatccttgggcacgcaccgggcgcagttcgtgcagcgaattggttgcacatggccgcgggcctttttggcacgaccgttgtttctcc

SEQ ID NO: 1334 - DNA, 480 bp, Rattus norvegicus
  Genbank Accession No. AI014116
gttgttacagttggatggatttatttcttaaaggcccagtacaaaaaatggttgaagaaagtgactttttaataaaatatacacccgtagaaaaaaaccttaatatactgatatttaagcagtaagaacttaagaaaacacttcaatatctaggcacaatcggtcaagtattaatgataatttctgtcattcctttaaagtttaagccagcttttcaacttgactgttgtttatgagtcagtctaacagagaaggcacctctcactcccctaaggaccttttgagagtaattatttataacactttaaagaacgcgaggttctataagttatgtataaacacagttatttacatatcccatttgagggtaaactaaattacaatataactatgattttcacttttacatcctaagatggacatgactttcgaagacaccagaagacaatcctccatataagcttttacatacaagattta

SEQ ID NO: 1335 - DNA, 410 bp, Rattus norvegicus
  Genbank Accession No. AI014135
agaacaacaaatcaaaatgtaaacttaaaatataaccaaaagagggacagctctttaggaaaaggaaaaaaccttaaatagtgaataaacaactacaaccacttaaccattgtaggcttaaaagcagccatcaataaagaaagcgttcaagctcaacatacatacttacacacactaattccacaaacctcaataaattcctatattacaaattgggctaatctatagacccatagatgaaatactgttaatatgagtaacaagaaccaattctcctagcacaagtgtatgacaacccggataaccattgtcaattatcgaatcataggtactaacccaacaataaaattacctatccctaactcgttagcccaacacaggcgtgctttaaggaaagattaacaaaaaaa

SEQ ID NO: 1336 - DNA, 474 bp, Rattus norvegicus
  Genbank Accession No. AI014163
atgaccaagcatcacaaacacttttatttgtggttatcagttatttttacagaataaagaactcattaatttgtaacactgtacattaaattaaaatataacccatccctacatcaaaaattatctaagttgaccaagataaaaaaagtctctaaaagcttatatacattagaagtagcaaaaataataataaaggaagaaattagaaaacagacatcaaagtcagacatctagaagaattctccaacatctgctctcttatctcggcatttgcttcgggcttttgttcgagctttgaaagctgcagagttatataaatgcctttcaaaacgaggaatcttcatggttttaagtgttgcagcatcgagcatcacagggggtcccagctcaaatacattgcgaaggaattcatttgtctgcaagtggtactgcatccctgatccaagagcctctttaaacgtgtcataagtgtgc

SEQ ID NO: 1337 - DNA, 508 bp, Rattus norvegicus
  Genbank Accession No. AI014169
gccattaaaaaactttattttgatttttttttttttacaaaggatagccccactttggggtgaaaatatatttggttaagtacaaaatatagtttttaatcatacaaaaagatacacaaaatacaaaaacaacaaagacgacacctccatcagctcacactttctggctgcacagttctcgggtggagtgcttagagtggagcttggagctctgacacaggacacggaacaaagtgctaaggcggagtaagttttggagtgctagaggccacggcgagagcagaactttctcctaacactggacaggaaatgggtctgggagcttccatggaaacctgcagttctcactgtgcctccatcactgttagggcatctcaatgtaagagtgtcaccagggtccagctgtcagcagcaacccttcatatgagtagtgtcagaatcacagaagtctgtgtgttgggggaaagcctccaaaagtaataaccaagctgggcctttaacctcagca

SEQ ID NO: 1338 - DNA, 449 bp, Rattus norvegicus
  Genbank Accession No. AI028925
tttttttttttttttttgctttttttaattttatttttttacgaaaagaaccagtgtcaacccacagaccctctgagaaacccggctggccgggccaagccagcagccctgtccctaggcccagaggttctaggtgaggggtggccctgccgagccttcaggacgatttctaagatggtgacgcacaaagttgtggccaggatggggcagcagggaacctttgatcctgtccaagacctgggaggtgtctacatcaaaaaagctctgatagtagtcaaacgtccagaatcttggctgtggcttttcatcctgtagaagtgatgttttgtcatcctcttcctctccttcggctccatagccaatgcctgaacccacaaccacagccacatgctcttgtgaggtcagcttatcactttggctcgtggttgctgcatctggggtttctgcca

SEQ ID NO: 1339 - DNA, 391 bp, Rattus norvegicus
  Genbank Accession No. AI029007
tttttttttttttttttgaacaaaaaggcctgtttattactttagccagcctatgactctgatgctgggaaaactgaaagagaccacagcggtgggttactggtggatacatgtcagctgggagcctggggaaggccatttttgagcaatgctgtgagaaagcttcccagctcctcatcttggtaagtccaggagaccagaagcactttagtaccaggatcctctgagtgggcagcagcttggataagaatggactccacggtcacagagccatccgggagatgctgtacacagtggtccttgagggtgctcttgagatggctgtacacacgtagggctgtttcttgttctttgcgtgtgtcctgcaggtgcacacgacaggtgaagcgca

SEQ ID NO: 1340 - DNA, 369 bp, Rattus norvegicus
  Genbank Accession No. AI029017
tttttttttttttttttgtggacgggttactttatttcatagaaaatcacactgaggaattgataagtcaagtatactcagcttggattcaccgccacggactccacactggagggtgagactgccagagcctacatgcccagacacatgtgcaaaggaacgcagagacaatctgaagccacgatgtccctctgcagggactcaggcttctcatgctgagctccccacagcccctgccccacagtgctgggtctcagcacagggctaccactttccttgttgagagaatgttgcagtggctagtttggctggaacaacaaaacctcagctccatgccctcaaacactaagttttcagtgaaataaaagc

SEQ ID NO: 1341 - DNA, 361 bp, Rattus norvegicus
  Genbank Accession No. AI029043
  misc_feature (1)..(361): n = a or c or g or t
tttttttttttttttttatatttaataaactctttattcaagttttaccaactaatatactaatatacaacagaaaagcctgggaggtttattatactatttctgaggggaaacttgaaacatctcagatacagcagtaacacagcacagcactttacaatccaccaagtgctttccacatacatcagctcatggaatcctcacaacaaccctgtgaggtaggtgtttctgctaatcacaaatgaggtaaaggaggctcacaggttccaggacctttaaagagatccatgtaaatcattacttgtanggactgtaatactgagtcaactttatttttcaatgcaaaataccatacaacatt

SEQ ID NO: 1342 - DNA, 392 bp, Rattus norvegicus
  Genbank Accession No. AI029053
  misc_feature (1)..(392): n = a or c or g or t
tttttttttttttttttgttcgtttgtttgttttatttcagcgacttgcaaggcagaagtaggacaatcacagactgcttagtgacaccatctaagaagtagtcgcatcctcctcctttttatttctgtttttcatcggtgtgttgatggaagttttgctttctgccttacggctggatctcgtggaagcatttccaggtgaagctcctttctgccgcgatgattctagcctgtgtcaagttcacatacaaaagcggccagtacagaacccaaaggtcgaagcctgactgaaagtgctgggactggttangggcaacgtgacaatcacattttatctgacacacatccaaagccccggtacaaacacaaattgggatgatgtagaaacgacc

SEQ ID NO: 1343 - DNA, 386 bp, Rattus norvegicus
  Genbank Accession No. AI029057
tttttttttttttttttctattacactcagtcatctttattagatacagcccaggttagtttttcttaaaacagcgatagtgccacatgaattattcatgcactcccaatacgtgtgtctcaatctcgttagcaggtgataaaaaagataacatcatctcaaaaaaataaaaatgtccttcagtgtcttgctttgctttaatgttctctataaaataattataatgaagagctaattctttttcattttgttcatgggggaaagaggaagagaaagcaccttgctgtgtagcccaggctgcacttgaactcacgatgctcctgtctcagattctcattgccatgcctcactcttgaagggttcttttttttcatttttcctcgtgc

SEQ ID NO: 1344 - DNA, 380 bp, Rattus norvegicus
  Genbank Accession No. AI029110
tttttttttttttttttacagtgtccatcattcaaactttatttacagtagatacgaacagtccttattggctgagacgttgcaggggccacctgtcatcaagcagtgcatggctgtcctctcatcagggcttctacctcactgggcggctgcacctcactcaagctgcttgctgccctctggcttctggtccagtctgctcctgttactcttcaccatgtagatgaaataggcaagcgtctctttctcattcactggtatgttcctgaagtgtcggctcacagtctctgctagctgggccttgttgaagccgggtctggtctgcagcttgtagtgccgtttgtagcgtcggagagtgttcacctgtagctggaacagat

SEQ ID NO: 1345 - DNA, 338 bp, Rattus norvegicus
  Genbank Accession No. AI029113
ttttttttttttctaaccaactcatcgtgcgtttgatagtgaattcatgaaacctgaagcttttccctgtaaatctcaatgtctttgcctttaaagagtgggtgacaaccatcgctagatcacagtagtgcctaatgaagggttgggagccacaggagaggctcttacattgtaaataaggaagcagatgacaacctttcattaactgctgtgtgcttcctgccttaagtgacaagtggcagcgtcgcttgagtcacctgtgtggtgttgtattgtgcttgccacaagtcagtgtgctccctgggtgcccaggagctagtatccttagcctcgtgccg

SEQ ID NO: 1346 - DNA, 508 bp, Rattus norvegicus
  Genbank Accession No. AI029132
tttttttttttttttttcacgttaaggcctttgtcacaaatctgaatctttattgttctgaaataaatgttaaaaacataacttgaaacaaaaatgtcaatattcagtctcagaagacatgtggctcaatgcccatcacatgtaacaagaaaacttcctttaaaaaaaaggaaaaagtactatgagaagtctttcgtgagtgaaaatgcactctgtgtattctccctcctctttgcattttcttcacaaggtttgcattgtcttcacaacagttcttgctatgatgtttgacggattttttgccactcaacaaactcatcaagaagaacaggccaagcgccgtcttcatcgtagttactaagatcggcatgaactgttctgctgaattctaatacattgtaccactgatctttgttcataacacgatactttgattgctccaagtactggtaaaatactgaaaaaagtggccacgtcctcccaagcagcagagctagcatagacttag

SEQ ID NO: 1347 - DNA, 308 bp, Rattus norvegicus
  Genbank Accession No. AI029156
tttttttttttttttttagggacatcttttatttcattggttatttcaaagctgtctttaaaacgaagcacacagaggaagaaagcctggaagcggactggctgtgtgttcacaaggattcaaacaccacacggcatgtgctagtagggctgctctgagacagttaccaagaattggaatcacaaaatcaagtggttatcttaggaagttctagaaaaatagattttttttatattcaaatgcaagtttaaatattttcccttccacagggctctcctataccctatcaaatcatggtcaataataaa

SEQ ID NO: 1348 - DNA, 454 bp, Rattus norvegicus
  Genbank Accession No. AI029264
tttttttttttttttttcggtagcacgggagtttattatcaagttgctgcctgagaagggatgcagggtggtgaaggcagaggagaactgagcaagtgctcttgtgagctgctgtggtgttgggtggggccaggccacagcgatggccctggtagtggggtagggtcttcttcctgcctgacgcttctttcaggcttcagaagggggactcccagagcaagaggaaagttggggctagatcacaactgcacccagcagtttcttctctgtttccgcctttgtgaagaatctcttccagaggtagacacatacagggatgagagaagccaggagcagcagcacccagacacccaagagcattgcctggaggcttatgagcagggtctttagcatgcttgtgtagtatttgcacagtcctatcctattagcttcttcgggaactggggtgatgctg

SEQ ID NO: 1349 - DNA, 448 bp, Rattus norvegicus
  Genbank Accession No. AI029285
tttttttttttttttttagacaagaatcatttattattctcttagaaaggaaatgtagctactacaatatgaaaacgaatcaggaggtacaaagttgacattctaacttcaagtagcagcaaggattttctgtgaagttagaggcagtatttctccaaggtggagcacagggctctcgctcggctgggcagaggcaggtgttgccctgcctcctgatggcacacatttcccaggagtatgaggagtcgtaaacacaataagcaaacaaattatgggaccaacacacagatgtgctaagatcagaaacaatgttatgcaaataatgtgtataagcccagatcacggccggaaacatcgcaggacccaagcgcatgcatcattttgcttggacccaccatgcaaccatttttagaaaaactgaaagccaagatatgctctggagttttta

SEQ ID NO: 1350 - DNA, 482 bp, Rattus norvegicus
  Genbank Accession No. AI029450
tttttttttttttttttacaattagttcatggtttttattaccctggctgtttacagaaaagtattttccactgttaatttgggcataagaatagctgtttattttgtgacctttttagaagttttaaaaaatgaaaaagaaaaactgtatctgagatcttagtatcattggttttaaaaaaaggacgggagaggcttctgtttcatccatcagtaactccgaccaaacaaggtgtagaacttggcaggattcttgccacagacacacatggctcctggctgcagctcacacagagggttgaaaggaatgcaaaggcttttggctcccatggatggagcaccaggttccacatcctgatccctggccgttgtcgttttgatccagtcttcacagtcaatttccccacagaatggaatctgtgcaaccttcccagaatctagcaccttctgaaagtcttccagtgtatccgatacaaccatgt

SEQ ID NO: 1351 - DNA, 360 bp, Rattus norvegicus
  Genbank Accession No. AI029530
  misc_feature (1)..(360): n = a or c or g or t
tttttttttttttttttattatatatcatgcttttaatacaaacttaaaaaaatctggaacaatataaactgtacagatttgatcaatcttttgaaactaaatctctaaacacaccaatgtctcattccaaaatattgcacaacgttctgaatacaaaatgtcttgattgcattcctccttcactagagaaaaagggtcatcgccctgctcccggctcctctctacggctgcttcagggcctgctcccatctctagggagagctagagactctacagcatcacaaaagagactgacagctgacattcttgacagatgatccaccttctgctttgctcctgngtgaggggatatagaggat

SEQ ID NO: 1352 - DNA, 408 bp, Rattus norvegicus
  Genbank Accession No. AI029554
tttttttttttttttgtatataaaggattaaaaaattccaatttaataattttgaaaaagcaaatgtaaaatgacttgggcttataaaaccagaatttacaattatctgcgaatagtcaaaaggtaaatcatagaaccattttgattacaaatctaaagtgattctaaggttggttacagagtcactgtcccgctccccaggaagagtccagcagctgactgtatgcacccccgccctactcaggcgccttcctctcctttccaaaccgtgcttctacacttcagccacacacacaaatactaggcacatctcccttctgcgaagctcagaaagatgacacacacccctggctcttaccaagcgccttcctttacaagggccggtggatctcggggagggggggatgg

SEQ ID NO: 1353 - DNA, 389 bp, Rattus norvegicus
  Genbank Accession No. AI029608
tttttttttttttttttcagttaccacagaattctttattaaaatgtgtcatcaataatgttagcatacatacaatatacacacatacatatgtacattctttgacacacctcacagattgccaacatcagtttagccaataaattaaaactaaaaacaagaggatgggggagggatactagaggcaaatttcattttttatctggtaagaaattgcaaatttctcagaactcccctgggggaaccctgaccagagaatctttgaaacaaaatacataaatccccaccctcccccaaaaaagattccaaaagatgcagttacaacagtgtgcttctcagagcaggggccttcactccacttcatactcttctggcttcaagacagtctg

SEQ ID NO: 1354 - DNA, 433 bp, Rattus norvegicus
  Genbank Accession No. AI029649
tttttttttttttttttagagtatagccttctgttcctcaaaagacttgatggtttaatgtttaaaaaaaataattattattataataaaggagaaagaaaagggtagagtgggaaacccaagcaaaagcttcacattgtgggaggtccagctgtcaggagatcaccacgacctgcaccctttgccatcctgtccgagacacgatgagactgtgggtcccgaaggatcgacctagtttaacaacacccaagacgtcagccctggagtttaagcagcacatgtgacctggtccattcgggtttcaagttcaaaagcatcaggtcggtcctgtgggttagcagctaacatgtctttcaagagctgcttgaccccctcagacatggaagtcctacgtttctgggggatatgcaacttcatctttgggttttctagc

SEQ ID NO: 1355 - DNA, 242 bp, Rattus norvegicus
  Genbank Accession No. AI029702
  misc_feature (1)..(242): n = a or c or g or t
tttttttttttttttttcagccttagaatgttttattttaaacttgctgttcaaacttttaaaaacacgcagcaaagaaacagcacacagcatccgccatgattgtgcctccgagttgcttcttctctatgatgtgattggttacatttcaacttcttacatccacggtgtctgtacaggcanggctgtcactcactactctgaaatggctctgggaacattacgaagctgcttaacacact

SEQ ID NO: 1356 - DNA, 240 bp, Rattus norvegicus
  Genbank Accession No. AI029709
ttttttttttttttcttgggtgagagtcggtgtctttattgcacaataccaatgtcaagttagaagtgaggcttaaagacctcgttttcaaagaaacattcaggtcactgggaacttggcttagccatcagacatatgaaagacagtattagccttggacatttcttggcacttgtttcagagtggtggcctggaccaacacctctaagttcacatgccaagggccagcaatctgtccaa

SEQ ID NO: 1357 - DNA, 550 bp, Rattus norvegicus
  Genbank Accession No. AI029737
cggccgcaaaggttttttttgtttttttttcacaattaaatttcatgtttaattatctcacaacggatagtgcagtagtagaaattaagtcctttttaaaaagtcgctctccccgaaacccaactcctcagctgccacaccacggctgaggagctgtgctaggcgagagggattaatagtctttgaaggagctgaaagtctccaagttagaattgccttgagagcagccaagagacctagaaggacaggcgcatccactcgagcactcactcttgcagaggacacggagaagacatggatggagggaggtggaaggtaccacggaggggcagtcacacgtgtgcactcaacatggcacagagttccagtctatccgcggctctctctgggagaatgcggtggcctgagcctggatgtccctgataaacaagccagcggagctgaggggccacagcagctctgcgtcaccacccgcatcagtggccctgggagggcagggcctactgtcccagagaagcagaccaaagaatatgcccagagctaggccctg

SEQ ID NO: 1358 - DNA, 484 bp, Rattus norvegicus
  Genbank Accession No. AI029795
  misc_feature (1)..(484): n = a or c or g or t
tttttttttttttttttaacccttctccagaacagctcgcgcggttaaaaaaaataataaatatttaagagaatacaaggctcagattggtttcatacacattgcacttgaagttgaagacccaatacttgcaaggtcccatgtgttctacgctgtccaacacacacaggacactgcgcaccgaacgcagtgacgtgcacactcaaccttttacaaggcaatcacagattgcaagctccatanggctgtggaaaagtcctctccactctggagtgacagagacacaatttcggctcattacgactgaaacagcagacagctattcactcttagatggtccagatcttggataaaacttcacttaaattgagatgaaaagtccagcatcgcaatgcagaatcctgactttgtgttgtcctgagctgtcagtaagattgtctacaaacctcctgtcagtaaacagcatagttcccacactgatgag

SEQ ID NO: 1359 - DNA, 485 bp, Rattus norvegicus
  Genbank Accession No. AI029847
tttttttttttttttttggtggcataaattgctttattggagcagctgagctgggctcaggtttctccagtggcctggaagtccatgtcttccaccaagtcctggaggcaggccttgtactggtcagaggtaagggagatcggctggctgttggagatgtgcaagtccacggttttcagtgatgaggctcccccttcccgggccatctctaacagctccttaagacatgtaggaacaaccttgaccatcacaagcctattgacccacggctggtcctggggccacgattcccccacacagaaccacagagtgtatcgtggggaatgtctgcttccttccatgaaggcaatgagatctgggaacccaagagtcaggtcagtaaagaaagggtcacagttacagcagccggttcctggacttggtgggtacaggcctgtctttgccacaaagcttaatagcatgctctgaattcaaccaaccaccat

SEQ ID NO: 1360 - DNA, 347 bp, Rattus norvegicus
  Genbank Accession No. AI029940
tttttttttttttttttggagagaaacacacgggcttttattagggacatgaaacaaactctttgagccccagcatcgctgcgggcgagtgtaattgccaggattaataaatcacagctgcgaaaggctgtccttggcaaccttccttattcagctcttctctctttgccggttcatttcagatttacggtctgcattatgtctggagcccgcactgcgcatgcgctcgtcttcctcctcggctgttctgcgcttgcgttgggcgtctgctcagcctccctggagcacggcgaggctgagtactacgtggctgccgtgtacgaacaccgatcggtcctgagcccaaa

SEQ ID NO: 1361 - DNA, 147 bp, Rattus norvegicus
  Genbank Accession No. AI029996
tttttttttttttttttacaaacagaatcccattttattagcagttagttcaagattgtacattaatggaggaaagttcccacatttaacacaacccaaaacggctggttcaagagccctcttcaggtgagctgggtagcatgccct

SEQ ID NO: 1362 - DNA, 359 bp, Rattus norvegicus
  Genbank Accession No. AI030067
tttttttttttttttttaacattgcttgtctgtaaatctgtgggatggccttggagggaaaggcgaggctgctgcaagcggctaatcataggctgtggggatgctctactgtattctattccccgggcaggagaccgtgaacgaggtgaatttcgaggcgactgcttaggagatggtcggggtgaattccgtggggatggagaaaacctattaacagcagggtacacggcatggtgcatgctgtcgtcttcatcatccaagctctgtgcatccagttcctgatcgctgaacgtgccccgcctcgtggagttgcaagatgagcctgagctgcgacgagaggtggtggctgcatactcttg

SEQ ID NO: 1363 - DNA, 322 bp, Rattus norvegicus
  Genbank Accession No. AI030091
tttttttttttttttttaagcttttttttttattaaaatactgtcatacccagtggaatgcttcggcaatcctggtacagagtggcgtgacaaaacagccatgtttgcaccttaaatattcatgataacttaaacacacagacacacgtcatggtctttggcagaaaacgttcacagcacaaaaaaaaaaaaaaaaaaaataccaaatattaatccaaaatatattaagttgttttttttctttcacgatattttttgtttttccctcctttttttttgttttttttttaaacttttatctttgtaaacaacgcacatgaac

SEQ ID NO: 1364 - DNA, 329 bp, Rattus norvegicus
  Genbank Accession No. AI030132
  misc_feature (1)..(329): n = a or c or g or t
nttttttttttttttttgaggatccttataaacatattaaatgcaaacaaatatgaaatcaaggaaagctatgagttaagtaaaaattttaacactttgggtgacgtggaagccaaaaaggtcaaaggatgtggacagaatggttcttgacaaatggttggaacttcacagtccagaccacgaatggtcactggctgtccgtctgctattaaagtttttgtagttttggtacgtttgagagcggtaactaacccgtggagatccctgctcagccggcaaaccattctgggaaacttggtctccttttgaagtgtcccattgctgggact

SEQ ID NO: 1365 - DNA, 486 bp, Rattus norvegicus
  Genbank Accession No. AI030147
tttttttttttttttttgttaaaatacatcttttaataaacgtgaggcagcagcacagcacacccactgaggtctctaccttgtggtttacagcacacgctatccatcacagggcgtatgtacacgcagagtgaacttgggatcttaggcttactcttctcccaaaggtgggtgacacagacttgctgcgccatctcacattcaaggttgtctgacacactggctccatggaaggccttcaaaaccaacagctttttagcaacaaaagacgttacccaccccatctgaagaacagccccggcagtgactcagaaggattgtaaatacatgctttcctttgatggctctaaaaagcactatttatgcccaatctggaacacttaaaagataattctgaaacagctgtttctcttcctgagcgaatttgtaataagcagtaattggaggctatggatggtaatgccaaaaaaattctattagaaagct

SEQ ID NO: 1366 - DNA, 365 bp, Rattus norvegicus
  Genbank Accession No. AI030172
tttttttttttttttttccattttatttgattttattttgtcatgtgctcacagcatttctctttctctcctctccctggcaggtcacagagataaattaaaaataaaatctacaaggaaaataatttataaaaagcactcccaggctccactttctatccctactgctcagttaggaaacccctcctccctgcacagggaggaggatcagtgcttcccacccctcacccctgctagtctggggcaggcagtactccagagctgatcaagattggggggcggcagtggcagtttagaaaaaaaaaaaaaaaaaaagacactgtggtccgggaaccatctggctgtcttggtgctgcccctcactg

SEQ ID NO: 1367 - DNA, 441 bp, Rattus norvegicus
  Genbank Accession No. AI030192
tttttttttttttttttggacacagtatttattcaatgatgttccatacttagtcaccacatggctctctacctgcatcgcagctccccaccttggattgtgagggccacaaggccagcccccacactgcccaaatcccaagcccagctctccctcctccccacaccccagtaacacacacgcacacgcacatacatgatcaacggacagattggcaatcaaggcctaacatcaggagagaactcttggcactctgcacgacattacaaggagtcccaaccagacagtaaaagaagcgctggcctaagcttgactgaagagtcttggttgagaagtcaggcggtgctcaagacggccaggtctggaaagtctttcacctctcctacttcactgaacggctgcccgccttggttgaaagtcagcttgtaccgcaaccggata

SEQ ID NO: 1368 - DNA, 491 bp, Rattus norvegicus
  Genbank Accession No. AI030248
tttttttttttttttttcaggattcctgcagctttattgacactcatgccagagctaccaagaggtttccagcagccacagcacaaaggccctgcagagtccccatccaataggcctcttctgtggagaccttgtcctcaccctgacccttgacttccatcatcacttgctcctgtgacctgggttccggtcgcccgtcatccgatggtctcaacaggacttcaaagcatgtctaccagtttgaaggttccctccggtttggcaggaaccacgtggacaaaagtcttgtagagcacagcacccttgggcagactagtgaccagattcacagcctccgagtttttgggattgggcacgtagacttctttcgtgtagcgaactatcccctcctccagggcatacaggcacttgttcttccccagtcccacatgggcgcctgggtgccatctgaactgccgctgagtgccaaggatgttgccggcatgaacgta

SEQ ID NO: 1369 - DNA, 372 bp, Rattus norvegicus
  Genbank Accession No. AI030259
tttttttttttttttttccctgcctccagtgtttatttggtcccagctacttccctcaccagactcatgacacagggctcgaggcctccagaaggtcaagggcaggcaggagatgggatagggagggtagaatatgttctttaggtacagcatctctcactgaggagtccagaggctccgcacctaccaccaggaagctgtgcatacccacagcccgagccccctggtaatcacagcggtaactatccccaacgtgagctgccgccgaaggctctacacaagcgagttgcaaagcctcacggaaaatccgaggatccggcttaggacagcccacagcctcagaagtcaaaacaaaatcaaaatgttctctca

SEQ ID NO: 1370 - DNA, 434 bp, Rattus norvegicus
  Genbank Accession No. AI030339
tttttttttttttttttaagatagctcttggctttatttacaagttcatcctcatgtttccatgggggtgagaaactgtcaaccaacagttcccaaagagggtttcagctgagattcacgtacaaaccactacatgaagggaacaatggggaacccaaacacccaaaccaaacctacccacccgcagccgactggcacgaaactgctgctctcccaccaggtaagctaagttctacttcgagatcaactcattttgcaagaaagcacaagtgacatggtgcactgggcagggtgatacatggacgtctccagccgagaccccacgtgtgtgggcgctgtgtggagacagccaggaccaggacacatggtaagtgtttcagaacttttctagcttcccaagatgaaaacaacagcacaacttcctacgtgaagtc

SEQ ID NO: 1371 - DNA, 220 bp, Rattus norvegicus
  Genbank Accession No. AI030369
tttttttttttttttttctgagacaagcattttaatatgagcaggcacatatcaatcttactttgaaagaaaaaaggtgccagagaaatctctcaaagagctcagcgaactaacaaccgtgctgcaggtttggagtgcgcaaagggctttccaataacgtctcgtaattagacctggcaacacactggcaggaggcttattacaatgcggcagtgctacg

SEQ ID NO: 1372 - DNA, 177 bp, Rattus norvegicus
  Genbank Accession No. AI030409
tttttttttttttttttgaagacacaaaacttaatttattagaaattttgtatgtagttcttacactctcagtgtgaactgtgctagaactggctgtcccacaaatggcccaatcctgggggcaccggataaatgggaagtgccccattcctcctcacttctgaggggacggaaggt

SEQ ID NO: 1373 - DNA, 357 bp, Rattus norvegicus
  Genbank Accession No. AI030524
tttttttttttttttttagcggcagagacgtttattggaatttttggccggaggttgttcatctgaggtgtggcttttcaatgaagccatctcaagtccaaacaggagtttaggaggcagagacttgattaatccactatactgcttgaccccatcccccacacaaggaaagtgtagtgcctagccatttcttgccagtgattacggataataacgtaataataataataatgataaaaaacaaaaacaaaaaaccccaaccccccacaaagcctctgttctgaccacccttcagtcttctgctggatcagaaacgtccaaactgtttaagtacatatgcagttttgttttagctca

SEQ ID NO: 1374 - DNA, 295 bp, Rattus norvegicus
  Genbank Accession No. AI030543
tttttttttttttttttaaaacatattttttatttttataatattaaaaaataagtctttgatatataaaaactggccagaaaaaatttttttacttgttacataagaactgtcattttacatgtccagactattattggatctttgtcttggggcacgagttagggatagggtcctgagtatgagtgacaggaggtgccagcccctgacaaagtactgaaaatcaagatcaagcgagcttttgcccttctgctccacgggaggtttctgtcctccctgagcctcgtgccgaatt

SEQ ID NO: 1375 - DNA, 203 bp, Rattus norvegicus
  Genbank Accession No. AI030575
tttttttttttttttttaaccatgccacagcactgtatttattggtggctcctcttcactaaggcccacgacaggagttcagaccccgcgagaaaagccacccgctattgatccttcgtcaggcctccggagcctggcggacattcatcaaggagccacagcatggggctacagctcgccttttctttcttcttgcttttttc

SEQ ID NO: 1376 - DNA, 447 bp, Rattus norvegicus
  Genbank Accession No. AI030668
tttttttttttttttttaagactgtgtcatatttttattttaagctataaaaacaaaattaggcaaacaaaacaacagaaaaactcaaaataggttcaaatgatgtatattcatcttttccaggaaagcagaaggtaggccctaccacaaagaaaagatgtcattaatggaggttaactttcaacgtacattaaatactatcaattaacgtctgaagagaacctagggtttgttcaccttgctataagcatgagttgacttttgttatgtcattgaaaacataaaaatgccttaaaaatctcagctattaagtatgatcttactggaaattcttaaccacaattttccttcctggaatgatgtcgtgcctgtgcatccctctaaacataacggaaagcacagctaatgcaggcgggcttcaacctgttctaccagctgaaacagctt

SEQ ID NO: 1377 - DNA, 296 bp, Rattus norvegicus
  Genbank Accession No. AI030695
tttttttttttttttatatgttcagttttatttctttccatgccaagaaatacagagtcactagtgtgtgtggtggggaggaggcaattcttgatgttcaccaggatgcccaggagaggctgagtcactccgctcagccactgggatcatacagccggcagctgaaccaagccagagttcagatggcagggccccgtccctctgagctccagtgggaactggggactgagagaactctcactcactctccttccaccccaatgtctctctcctcctgccctgtgctccgtctgtcc

SEQ ID NO: 1378 - DNA, 339 bp, Rattus norvegicus
  Genbank Accession No. AI030709
tttttttttttttttttgacagcccatgagagagggaaagacaaatcacagtggccccagacacacagggtgctttcagagaccaagcatgagttgacacagagagaggacagagtgcccccgttcaccaggaccttgtcttgttgctgggttttatgtgaaagcaacagagtcatggtttgcccagctacccacaggtctttagacgcctggggtgactgcagagtgtgctcttacaggaaggttcaccttttctgcacaggcctccagccccaagaccagagggaaagaaagttcttaccacatccttccttagcccgttgctggtcaccaacatat

SEQ ID NO: 1379 - DNA, 456 bp, Rattus norvegicus
  Genbank Accession No. AI030774
tttttttttttttttttatgaagaattttctttagcatttattctagcatttccactcatatgaacactgcccaaacataggttctttgctccttggagaacactttcctcctcacatgcatcttgcagcaggcttttctcaggatctccctccacattaggcagatgtatagaagtacctgggctttgcattgcccagaaggtcatcctcgtagttggggaggcagcagaagaagaaagagcaaccaatcaagatgatcgtggctgcccatccgaagccataggcccagttgtagatgtaattaacagcgggattatcatgaagcctgaaggtttgtgtgtacttcacgggatagataaccagggagatgatctggaatacagcagccagtgcgagaaggcctccaatcactctcaggaaaacaagcatctggggtcccctcgtgccgaattctt

SEQ ID NO: 1380 - DNA, 288 bp, Rattus norvegicus
  Genbank Accession No. AI030790
ttttttcttttttttttcagacaagcattttttggtttaatcaaggcctcttgaagaatttcgagacccaaatgagtggcagatcaggcaggcttagactcgatgtgggacaacagagccgaaagacagcccagaggccattgacactggcctccccttaaggttaccttgagtagagccctggaaggctctcctagtcccattccccaggctgaacattgaaggccatctggtttgactttggagcagagtctttagctggcttcactctttccctcgtgccgaatt

SEQ ID NO: 1381 - DNA, 518 bp, Rattus norvegicus
  Genbank Accession No. AI030797
tttttttttttttttttaacattaatactcacttctattttctggaaaacatgcatgaaaaaaaagtattcagttcaattgcaaaaggagaaacaatcagcttaaagtgaatactgtacaagtcaggaacaggagctccctgctgcctctcctctgtggttactgctgtacttgacgcgagcccagaatttccctaggaaataagtcagatccttgtaaatactgtccagagagaaaaacaacaaaaaaacaaaacccaacaaaaacacagctgtctgcaggtatcattcgtgactgctttcaaaaccgcaggtgagaccccaagtccatcgaagggttgtttgttcaaagcaaaaagcaaatcccttcaccccaaaagttgttcctcattaagcagggagtcaaaatacccacttccaatcataagtctgaacagcattgggaaaatcagaattttcattcttcttcaatttcatgtaacttaatataagcttcagcttactcgggcctacagcagt

SEQ ID NO: 1382 - DNA, 398 bp, Rattus norvegicus
  Genbank Accession No. AI030835
tttttttttttttttttatggtgagacctaggaattttattttaaaaatattccctgcaaagtaaataaacatagtcacagtgaaggaaaactcatggaatgcctagtacattgagcatgttaaagagaagttataagttcatggtactttccaaggatctgccgttaacatgggctcacacggaagtcctctggtagcacctgatgtgttcactgttctttctcgttgcctggtggttctgttgactgctgctctgtgacctttaattcatgatgctttgtccattgcatgataccaatcatcacctttgtctcattctcttgtgtggggaagaaccaaacttgttctggtgaccagacatctgagctagttgttcttcaactgccatcagtttgat

SEQ ID NO: 1383 - DNA, 310 bp, Rattus norvegicus
  Genbank Accession No. AI030877
ttttttttttttttcatgtttaatgtgaaaacagtgactggagtttacggagcaaagatgaagcatcgcttcacgttaacttcgaaggttacatgaagtcatcaagaagtagtataactgatgttacaagctatgctttccaaaaacgctgtgaaacataaatgacgtgaattcatctacagtgctgaggagtggggcctaaatccaactatttacagaagttttgttttttttttgttttttttttcagagctggggaccgaacccagggccttgcacttgctaggcaagcgcctcgtgccgaattctt

SEQ ID NO: 1384 - DNA, 488 bp, Rattus norvegicus
  Genbank Accession No. AI030892
tttttttttttttttttcctataatctttttattaattgacaccgagggaatgtagcacctttcattgaaagaactgaaggtgctttacaaacattagcatttaaaaaacaatgacatttaaaaatttggattcttagagataaatcttgtagttaaatctctccaactctgtacataattttctggaagctgacaaaagtgcttctacttctgacagcggcaggctttcacagtacaggcattttccaacacctggagctggggttacagagcaaacacacgcacacacacagatcttaaatgcaacaaacattttgaaccttatttcaaaagcaaaagtcagcatttaagatgtcaaaatctcccaacagctctagacatccaggtggaacaggagctggtccaggttgcataatagatgtagtcaaggcttgatagtctcgccatcagcttccatcactgacagttactggaaaatggagacaaa

SEQ ID NO: 1385 - DNA, 254 bp, Rattus norvegicus
  Genbank Accession No. AI030929
  misc_feature (1)..(254): n = a or c or g or t
tttttttttttttttttgatagctaaaagcagatttattattatagctcagtctcaaaaaaataaaaattaaaaaaattatccagtggttatgaggagtctaggaaaacctggcctagcagggccagtttagaagtgaagggctggctttcaggtgaggagagtgtgcctggccctgccgggggctcccagggcctggcaggctgcttctccctgggctggttttcagctcatcgtanggaaaggcattttcca

SEQ ID NO: 1386 - DNA, 451 bp, Rattus norvegicus
  Genbank Accession No. AI030932
tttttttttttttttgtattcaaactagctgcttttctaatctaatcaggttaatttcaatacaaaaaaataaaaaataaaaaataaaaggtgccacctggtcagcaacatcatacactggtgacaagagcaggtttactgagttgtgagctcagactgctggaccttcaggctggccttgtccacctcggtagactgaggataaaagggacctaccagccagttgagaggcgtgttgttaacaaggtaatccataacttcatctaaggactccttcattttctgcagctgccccttgctagaagtgaggacgccatcagacacttccttgaaggaggtaacattgcggaacgccgagtagatgtcacctgccatcacccccaagtgtttggcctggtcttgaatgttctgtggtaacccttggacgttgaacaggaacgtctggcatgta

SEQ ID NO: 1387 - DNA, 317 bp, Rattus norvegicus
  Genbank Accession No. AI030969
tttttttttttttttttaaaacaatctcatttaattcagaacaaatgcgccatgccaaagtgcaacaaatattgtgcgacactcaatggacactgacggataacagctgcatgggggttactgagtccacctgcaaagcaactctgcacagactgcattgcatgcaaaagtcgcttccatgtacgtggagccgcaccttgctgtcagtctctcagcgcagccacagtttaagtcgcagtgcgtcaactccatttaaatagtatctgaacagcctcttatctcgaacataaccaagattttcataaagtttcaaagca

SEQ ID NO: 1388 - DNA, 510 bp, Rattus norvegicus
  Genbank Accession No. AI031019
tttttttttttttttttcaggttttaaacatgtttagagtaaactcgcatcttttacagacaacattctgtgacagtgccatgtgaatggctcctgcattggtgttttttctatctggctggatcctgctgagggcatggagccagatgccgtcagctacagtgtctgctgtcttgtgaggcactgaaggtgtgtactcagccgatgtcaccgcatctctcagtgatgcagcacggctggggggtccctgctcctgtgccatctctcctcagctttgcagtctgtaattaacttgttcttccggagactgagtctctaaaaaccacaaggttgcttcaccttgcttctagaactgggaccaggcttcagatgtgacagcaagagtaaaaggattcttcaaggcctctgaaatgagcccttggcatacaggtctgaaagtcccattgttggcccctggctggctggagtggaaaggctgctcaccctgcacaagatgtgctccctgcatgt

SEQ ID NO: 1389 - DNA, 366 bp, Rattus norvegicus
  Genbank Accession No. AI031035
  misc_feature (1)..(366): n = a or c or g or t
ttttttttttttttgttagtggtgttttattttttgcttcataatcaggttcaaagaatgtggatgataaaaaccaggagggctgtgtgcctcctttcccaacccaagtcaagtcctacccaccccaaggcagacagacatccctgatgcaggtttccttctatggagaacatggaatttatctagtcagtggaatctggctgtcacaggttgcaagttagatgaagactggcaacttcaaagttgcctgccttgctgtcagcactgccagactgagtctgaacagccgaggtgccgcagtgcatcactggagctgaactgtatgtagcactgcttttcctgngctggctcaagacccaccatact

SEQ ID NO: 1390 - DNA, 495 bp, Rattus norvegicus
  Genbank Accession No. AI031043
tttttttttttttttttacaatttgaaataataggtttactttttatttttataatacattgtgcagtaagacatctcaaaacgagtgcagagacaagacaaagggagatcaacaacaaatgtcagagtggctaccttcattaaggataaatccctggtttatattttccacacattcgaaaaaattacattcaaatcattcctcatcaatatttactccttagtccatgagagaaggaaaacaatccacacactagattttcatagaaagcaatctagaccagtctaaatattaacatcctatttattctgaagtaagaacctctaagaaatgaaggtccttccttgtttggatttccagaggacatgtcattagctggtatgacctactttgtttttgagacagggtctcatgtagctgatgataaccttgacctgcagatcctcctctttccaatttccaagtgctgggttacacccatgaacacccatgct

SEQ ID NO: 1391 - DNA, 444 bp, Rattus norvegicus
  Genbank Accession No. AI043642
tttttttttttttttttccctttttgtaaataaagctttattaggatagacatttatttacatgttatctgcagctgcttttgttaccacaggatggaacaactgccccagaagctataataaggcttattaaagcctatgcagatgctgcctggtcttttggttaaaaaaagtgtatcatttcctgttttacattaaagatagaattaaatgagaagtctgcttgagatgttttagtttttactattattaaggtttgggtgacttaaccaaaatcataaaaaaaaaggaatactattgttttgtgaacagtgcctgtatattttaagaatatacaagggaaatgtatttaaaaagaaaagagatgaaaaaacaaaagtatacttttctaacattagaacaaaatgaaaatcccgcccatgtaacaaacttggtttctgaggt

SEQ ID NO: 1392 - DNA, 407 bp, Rattus norvegicus
  Genbank Accession No. AI043660
tttttttttttttttctctataaaaagttgagtttttattagagtatcacattcatacacactgtatggtgatagcagtctttataaccatagtcagagtctaaagggggttggggaaggaaggacctcccatagctctaggcaggggagtcactgttgtccgtgtagcggtgatctccatcaaaggaacaggcttcaccggaggcaggcactcccgcatacaagtaaaatgacagaaaaaccaccagggctggaggttttacatcattttattttccagattgtaatttttttttcttttttaaataaaatgccaaggctggcctagaacttattgttgtgtactctaaaggctggccttgctttttcagtactgttcttggctcccaaactctccaatgctggaa

SEQ ID NO: 1393 - DNA, 368 bp, Rattus norvegicus
  Genbank Accession No. AI043678
tttttttttttttttttgcttttccgtgggtgttgtccttgtgcctttataatgaacacattgcccctacagtagccctctgggatggactagccctgctcaggaatggagagaagtgggtgggtgaaagatggactgtggtgttcccagggtgagggggccacaagccagaggccctggagctggcacgaaggggttctgctgcccgtgttcctcagcggaggctccagaggcgacttcaggtcccatgagtctctgggacactcaggatgtcatctcctttccatgagtcaagcttgacacagggtggggagtggtgactaaactgtcactgacacaactcagagatcctccaggagcacgggcca

SEQ ID NO: 1394 - DNA, 370 bp, Rattus norvegicus
  Genbank Accession No. AI043724
tttttttttttttttttaagttttcaaaaaggaatttaatccatcacagcaagacattctcagcctataaaaacatccgaacaagggtttcaaagcagttcccacccccaaagcaacacacacaggacaggcctgagatcagttcattcaaataatctttgtacgcagagcatcccagagtatcaccccagcctaacctggagaaacgtcaccgacaagtgcagcagtcagggtcagcaaaataaatagagttaatatatatgtgtgctatccttgaatatacagtgaagaccgggcccggtgccatagcacagagctccttacaagtgtcctagtggctggacagtgggcaccccaggaacccaagcaa

SEQ ID NO: 1395 - DNA, 478 bp, Rattus norvegicus
  Genbank Accession No. AI043753
tttgattttttttttttcatgtttaatgtgaaaacagtgactggagtttacggagcaaagatgaagcatcgcttcacgttaacttcgaaggttacatgaagtcatcaagaagtagtataactgatgttacaagctatgctttccaaaaacgctgtgaaacataaatgacgtgaattcatctacagtgctgaggagtggggctgctctgaagctttacatacagctgataagccatgttctttccacattaaaataatgactattagaggacatgggtaacaggctctgagacctaaatccaactatttacagaagttttgttttttttttgttttttttttcagagctggggaccgaacccagggccttgcacttgctaggcaagcgctctaacactgagctaaatccccaacccctatttacagaagtttaataatgttccagacagaacttaaaaaaaaacctcgtgccgaattct

SEQ ID NO: 1396 - DNA, 389 bp, Rattus norvegicus
  Genbank Accession No. AI043768
tttttttttttttttttggggctgtgtggttcatttattggggccatgtccagccatgccgcagccacctgagcaggagcccagtgcccccaaaaggcaggtgggggaagggaggaagtgcagaaggctcagtgccccagggttccaccccagtcctgtcttggtccttgaagagaggcggttctcaggtgagcgaggtgtcgtcatcgctgccctctcctgctccacccgcccgctcctcccggctctctgtcacggcgctctcgtcgatgttctccagtgagtctgcgtgttgcaccgacagctctgacagcgccaggctgggtaacgggctctgctccgggtgcagccatggcttgaaatgtggctggtgtttctgcttccactca

SEQ ID NO: 1397 - DNA, 391 bp, Rattus norvegicus
  Genbank Accession No. AI043819
tttttttttttttttttaatactcaaaacctttattattcaccccaaacaatggggcacaaaggccttcaaggtcccctgacccacaattcccagtctctgccagagttgaggcccacacatccctactacagagagcccacactgtcccacctggactgggcaagtgaggaggtagagcgatggcactgcagtcaaactgagggtcctctctcagaccctggcccctccgggttactatccctgttccggaagtggtctctgctccgcttcttgctgccatggaaaccaacagttttcatacctatggggcctgatgaggactcaggacgggcagcttctgaaggcactaccacctctggctgtccctggtggccactccattcctcagc

SEQ ID NO: 1398 - DNA, 487 bp, Rattus norvegicus
  Genbank Accession No. AI043945
  misc_feature (1)..(487): n = a or c or g or t
tttttttttttttttttgaacttccacacgtttattaggctatgcgcctggggcatctcagcactcttgaagcacgcacttgttttggtttacagacacggcagtggccagtgaacggtgcctgcactgccaatagaagcagtgacaggcgaccactccgactcccgcactcccgtacccatggacttagggccgagtcggtgacataatgtgtgcgttcacagctggggctcanagcaggagccttgcagggcaagcacacagccctaagctatgcactcaggctaagtcttttacaaattatatttcgtaaattcgccatattcactgaagctctagctatatccgtaagactgtaaacatctcggtcaccactggcagctcgtanaggagacacactatactgttttaggaagttgttttgggcaataagtgcagaatctgtgcgtatctcataagataaaaatgtgaaactcatccctgggat

SEQ ID NO: 1399 - DNA, 409 bp, Rattus norvegicus
  Genbank Accession No. AI043964
tttttttttttttttttcattgtcacatttattagtagtagctgcagctggactggtgcttctatggggactgttgggacaaactctgaggggcaacaacaggagggaacaccagtgatggtcagcaagggtcttaagatgggatacagagcacagtgacggtcaccatggtgctgtcacagcacaaggagctactgggtgctcatttccttcctgaacattccctgagcctcagtccacgatggtcaacgcctcccacagacctggagcttttggactctggctacttctctcttctccggccacgcggacacgctctggatggccacccattctgcaagtttcttgacaaagcggtcctggttttcgtcaatgtactggaagacagctttgagggctgacatctttc

SEQ ID NO: 1400 - DNA, 483 bp, Rattus norvegicus
  Genbank Accession No. AI044031
tttttttttttttttttacggtaacagaaactgatcgagtccgtttttattaagatacacaactttataagaaaaatacgtttgcctctccaatgtaaaagcctcccacccccccacattaaaatctctcggtgcaggtggaacaggtgcaacagctgctggctcaacagacggatctccacgtgatgttctgcaaagtatcaccgaactacgaggactccaggtactccaaagccacgtcatagcagaaacgatactgctccggagcttccaccatgtttggcttgctgttcctcagggtctttactgcatggaaaacatccaccacattttgccgcttcaccatctccacgacaatgcctattgcacagaacatgccactgcgcccaccgccattcaagcagtggatgatcgtccggccttctccttcttcacattcttcctgccatttttccacctgcagtatcagtttcaaaaacgagc

SEQ ID NO: 1401 - DNA, 436 bp, Rattus norvegicus
  Genbank Accession No. AI044063
tttttttttttttttttcagtagaaaacatttttgttaccatagaaatgacaggcaatggtacggggaattcccatgctgttgggtgggcattcaggagtaagccccgtggggcagatgtataccaacaaggaaaaccaggtagggacacctgcccacacaggccttcagctgcaagacagatgggatgtcccagaactacctctgctgtacccgggctgctgcttaaatagagctcaaggccctgggctcactagcatggcagagagccaaacttgtccatgggaccagctagagaaggtgaggacaaagacaggctaggcggatggcaccagctctaatgactgggactgaggtccccatcaagaccctgacagacagacagcgtgaagatgagtccttgggtctgtaattcagaactctgccgggcatctcta

SEQ ID NO: 1402 - DNA, 307 bp, Rattus norvegicus
  Genbank Accession No. AI044093
tttttttttttttttttgctatgaaggctattcatttaaataatccttcatattcaaaaagcacagtcatggtacaaaaaattgacacttgaagtttcaaaaaaatctcaatttaagaaattatatgtatttatatatggcgaatatttggactgcttctgagttttgaatttcttctttttcttggaaaagcagcggatggagaggcacatctgtaccctctgggagagccatggagcaacacataaacccgttacagtgtttcaacttgaaccatgacctcaagactggttctagaatctgtgcc

SEQ ID NO: 1403 - DNA, 430 bp, Rattus norvegicus
  Genbank Accession No. AI044211
tatttttttatttttttagtcattttaatgcatttttccctgtgcacaagagaaataactgatagagccaaaagatacactttcctttatacatagcagttaaaagtaatgcaaacatcacatgacacttccagtaaaagttacatttccaattacaaatcaaaatgcattatgaaggtctcttcatgggagaagctgaggaactcttaggtaaaaagcactttcctggcgtcactacactgatccttcaggctgcacaaagattaaggtcatatacaatcaatctgcaactgttgacacaatgttacactgtaagttttctgtacaattaatgtatacttagagaaaccaggataaacatttctactatattttaactgaacttgcctaaccaacattttcactgagaaatttatcaaatatgctgtaa

SEQ ID NO: 1404 - DNA, 479 bp, Rattus norvegicus
  Genbank Accession No. AI044222
tttttttttttttttgtagtgaacgagttgtgtattaaagggaaggcgttttagtatgatctaaaagctgtttagatgcagagcgcttgttggtaaagtggtctcttatgcagtcttctttgactccggatggtggggtgttttagcttttcgggttttcttgctcctttgatggtttttccccctcttttgctttttcttttggctgatctttttctcccattctttcatcagcttcttcacccttgctgaatctgggtctaagcaggtttgatctccgttcttcagtgtagcgatgatttcagttttgttgcagttagggcttggggcaaactgtttgaggtctttgagggatttgtagtggaatgtgccttggctggtgctgatgcaggagcatcgctgattccttatcactaaggttcctcgaactccacagtgatccaggaagatgatgcccatgaggaatatagcaacggact

SEQ ID NO: 1405 - DNA, 447 bp, Rattus norvegicus
  Genbank Accession No. AI044229
tttttttttttttttttgagattcaacaagttagtttatccattggctacggcatgacaacaaatgttccaaggccaaccaacattctatgcaatatagttgtactgatttgggttttctttatctctttccatgtagtcccggtcaattagggattctattctcttcttaagatcagcaggttttactggaaattttagctgattgtagacttctgaaacaagaaggttgtggctaagtgtttttctcatcttcataattcggacgatcgcagcatcaatttggtactgtctatcttgaaatactctttctgtagtgcttgcttgttcttcaaccgtttctttcatctggatttgattgatctttatcctgaatagtttgtgtttgaaatcatcattacaaataaacttgtcaccatcttcaatatccttgccctttggattttta

SEQ ID NO: 1406 - DNA, 337 bp, Rattus norvegicus
  Genbank Accession No. AI044241
tttttttttttttttttcaacgcacaatttcattatgaatggaggtgactctgccggtgccactggcatcgctcagccccctctaccacatggcgcagagtaggtgagattcccagcagcatatggcccaggccttgcagcagtgaggaagtccaacgaaggagctccctgagtacttttctagggccaactccttgagactcgcagctcatggagtgcagcccgtataatgtagctttcacgttgaggctgccgatgaggtctcgacgattttgtttatacacatcatgggtgatgcgggcgatgtccttgccatgttttggcttctcccgtccta

SEQ ID NO: 1407 - DNA, 471 bp, Rattus norvegicus
  Genbank Accession No. AI044247
  misc_feature (1)..(471): n = a or c or g or t
tttttttttttttttttcaaaatcacccagagctgtcggtttagtgctttccaaaaatccacagctccgcctagaaacttctggacgggctatctctagacaaatggaccaacctcttgaggatccagccttcaggaaggtcctaccttccaccccattccaggcagctggtgaggctgaaagcatgggaaccaggcaacacctgctttgggtggagaatcagcacacaggctgggcagagagctttattggagggatggagggcacgatgttctgaacatgagttgagcagagtattggtagggagggcttaggtagccaggaagcccccatccactggcaaagcggaaccagtagtcatgctacttcggttgctcagcangaagaggatggtgtctaccacgttctccacctcagcaaacttgccaagtgggatacgatccagcatgaccttagctttgtgcgggtcac

SEQ ID NO: 1408 - DNA, 494 bp, Rattus norvegicus
  Genbank Accession No. AI044254
tttttttttttttttgtctttgcacaatcatggattgtgtatccacaagggcaatggcagtcagtagcctacagaagggtccagaggcagcaggctcccctcctccacctaccttccacatacccatgagtcaacatgaggcagtcagaggcccagagcctttagggaaggggccatgggtctgaatcacacatttcgatgacgcctttgtcattttttaaaaaaaatagcgcgttggcacattttcaggacagagacggtctgagacccgactctcagggaggaacacaatgtcaagtttcatcatggctctaaggcagactttacagcttttcacagggatggagacggacacctcagctcggtgtgtgtcagggtgagtgtgcacggccctcacagcaccgtggcctgcacgacgatctcggggtcctcgatgtccttcctgctctgcaccattctcagctccagctgagccgggctgggcttctgtcctt

SEQ ID NO: 1409 - DNA, 300 bp, Rattus norvegicus
  Genbank Accession No. AI044257
tttttttttttttttttgttttaaatccactctttatttaaaagacagtaaagggttacaaccagcctacagacaggaaagggttaccattagtctatacataacccgtgacaaagatcaatgaagacaacacacaaggcacccgtctgtcagatcaaggggctgacttcctacatgaggcaaagggacacagcagcacccagtgacattctgctgttctgcctaagtgcccagcacctagggcaaagagactcagatgcctaaatccgcctgtacctcagcatagctaggagtctggat

SEQ ID NO: 1410 - DNA, 355 bp, Rattus norvegicus
  Genbank Accession No. AI044263
tttttttttttttttttgtgtagccttggcttcttctgtcagattttgacctttttggtcaagtacaggattctcgttaagtttatttatgaacggacctttcacacaacaaaggtttattaaacaatcaaatcctttggatggctcatcctgcggacaggaaacggtctctgggagggagggttggttgagaatgagccaggacctttgactctagatttggagtagctgggagtgatgcttcagagttccagcaaaggggaaaaaagcccagtaagacatctgtttagcttctgttgaggggtgggcaggagtcaaaggcagacacctgaatatcagttctcaaaaagtgctt

SEQ ID NO: 1411 - DNA, 477 bp, Rattus norvegicus
  Genbank Accession No. AI044325
tttttttttttttttttgagttaattttttttaatcttgttgtttcattctgtatcttaacaaaagcaaatgcattgtaacaaaagtgggttgaagcgtatcacatttaacttcctgctcccgccacaaaatattttgtcttttccttatagtttcagaaatcagtaccattaaagccttaaacagaaaactaattccaatctgaaaaaggtacaaaaaggcacataaaatcccagtgcttctgtactgtaaaattcaagtgtagctgagctcggtgttttccagacagtatcggatcactgatattccctgggagcccaaactggttcgcagcctacgccaaagcctccagcaagcacggtgctagtggactacagagttaaagcctagcttctgtatgctttttgggaatatcaggtgaaactgttcatacgtgtccaaaagccaagtccgtcctgccgttcagtcatcaccacc

SEQ ID NO: 1412 - DNA, 409 bp, Rattus norvegicus
  Genbank Accession No. AI044341
cgtcgcgaatattaccaccacgagccttggcaattgaatctaactcatcaaggaagagtacacagggggcagcttgtcgtgccttgtcaaatatttccctgacattggcctcagattccccaaaccacatggtaagcagctcaggacccttgatggagatgaagttagcctggcattcattagcaatggctttggccagtaaggttttcccacagccaggcggtccatagaaaagaacacctttggaaggagtcatgccaaatttgaggaatttgtctggatgctccacaggatactgaaccaactcctgaagctcccgtttgacatcctccaggcctccaatgtcttcccaggttacttgtggcacttctaccacagtttcccgaagtgctgatgggttgctttgact

SEQ ID NO: 1413 - DNA, 283 bp, Rattus norvegicus
  Genbank Accession No. AI044345
tttttttttttttttttacctaatggaagcctttattttagccaaactgacagctctgagccaaagctccaagtccacctcctggcccactggtacccagaaaagatacacaggctaaggttgtcccctaaggggaagggctgaagtatatggcctgtgggctgaagctggctctgttctgggcaatccagtgtcccagagagacagggccatcagatgtctttttccatccagaatatagggcaccccttcagatctcgatatcgtgtctctaacgggcttt

SEQ ID NO: 1414 - DNA, 484 bp, Rattus norvegicus
  Genbank Accession No. AI044361
tttttttttttttttttgtttataaacatttggcattttatttaaagtttaaatcataaccatgaacattgttacgattagaggccctcttggttctccacaatgatactgatcatgctcacaaggggttcccattgttaagtcttaaaacaaccatcttagaatggaaaagaaatctcagccatcacattacaaagaataaactcagcacactactatttaacttgttttaacgtttcttcacaaatggtgaaaatactaaagtacagacaatgaataatcataatgttgtcgccaacattataaatatggaattataaatttaaaacattttctggtttaaaaaataaatctggtcgtcaatgcagctctgcaggtctctaatatggccggtctctgcgttcctgacggtgctcgcctttatccattttcccaggtcctccacatccgcctcttcttcctcccatctgttccattaaaggtc

SEQ ID NO: 1415 - DNA, 313 bp, Rattus norvegicus
  Genbank Accession No. AI044425
tttttttttttttttttccagaaataaaagcgctttaatatctggaccacccagatgaaatgtcatggcaaatctcataaaaacccagagggagcagaaactgatactaggggaaggaagggaaaccaaaaggcactgagcatgcttggcggggcaggaaaggacactgtcactccagagacaacgaataacaaagggacaggagccatccgggccagctcggggggcttcagaagcgggagacaagtctgagtccacaaaccaagttctctgcggcttttcaagaaagaggatttgcttgcaagatgcatga

SEQ ID NO: 1416 - DNA, 465 bp, Rattus norvegicus
  Genbank Accession No. AI044567
tttttttttttttttttactcaaattgaagaaaattttactaattataaattcaggaacttggtatgaaacaaattgtcacagcaactcctgcctttctttttgaagccacagtcttattttatcaaaatttttatccatccatcgtatgttttcttcaatggtttcaatggtttgttgaacacaacggagctgagaaccattttttttcaaggagctgaagaatccttttaattcaggatgggtcacagtgacagacacaaactccataaatttggcaaatccttcattgagccaaaggtcattccaccattccattgtgaccaagttcccgaaccactggtgagccagttcatgggatacagtcattgtgatgccaagcttactggatgcagaagacttttctttatcatataacaaagcacccttatcataagaaacctcatcaaacatctcccgaatctgt

SEQ ID NO: 1417 - DNA, 453 bp, Rattus norvegicus
  Genbank Accession No. AI044604
tttttttttttttttttactttacaacagtttatttaacatcccaatgataagtcatatttacatattatataaacgtatcaagtattataaaacgcctggactagaactgcactccacatggagttacttatttacttgcttacaaaattgtacaatttatataaagtatttccatccaaattgggtgacttttaataatccacacaaatactgttgacttttacaaacaggtgcatgttaaaatcttgggctaaaaattacagcattttcctgcgtaaaatttgctttggaaaagaagatggcttctttctgccccttccaagagtttttcctgctacttctgcagtctttcttggcttgctgacctttatttcatccaccggacttgccaagggagagatcagtttaatttctatagggggaggtgaccaagaacttccttttcctgtgt

SEQ ID NO: 1418 - DNA, 263 bp, Rattus norvegicus
  Genbank Accession No. AI044621
tttttttttttttttctgctcacatgtaactattaggtgaatcaaatgaagtgggaaatgaaagaccacagtggaacgaaagtccccgtccccgcctttcagtgccttttacagtcactgccagtcccccaactctctcctagtaaacggaaaagagtcgagtaactcggtgggagctttggaatcttccaaggctagtgtcggcagggcacggagtggagaactgaagcaacgatctggataaatcgcaggggaatgggtgg

SEQ ID NO: 1419 - DNA, 228 bp, Rattus norvegicus
  Genbank Accession No. AI044658
tttttttttttttttttgcatataattcttatttattaaggtgcgatgtttacatctttaaaaaaatgaaacccaaacaaaaactacacacatacacagaagacgttaaagagactcttgtacggcattttctaccacgtgaggtttcggtgaatgatttcagaattcccttggtcaacagtgccatccgtttttttctgtccattgtccagaaccatcctcgtgccg

SEQ ID NO: 1420 - DNA, 549 bp, Rattus norvegicus
  Genbank Accession No. AI044674
tttttttttttttttttggagaatcttaaggtaccctttggagaaattggacacatgtcaaacatctaaatgctggggtctggaaattaccggtctaatgccacattaggctaaggatacaaactttttttttcttcctcagtcaggtggatcaaaccactaagcttagaaaccgttttttctcatgcagctatgtctcttatttatgccttgaggactatttctggttttctagctgttaatgcactgttgaccttcataatggtgccttatgcaactgtcccttctgtggggtcaaatacaggggaatgggtgatgcatgcttaattaaggctcttttttcacctggcattgtactgtatcaatgtaaaatatggacaaaacaaagaacaacaacgacaacaaaaagaacacctctttaagatcctccacagtgacgaacgggtgaaaagtcctttgacacgtcaacgtgtgttcatttccaacaacttgactgtcagtgttaaaatggggaaaaaaatagacatggcaattgaaaagtaatttttg

SEQ ID NO: 1421 - DNA, 437 bp, Rattus norvegicus
  Genbank Accession No. AI044685
tttttttttttttttttgagctaaacaatttagaattagtaaatgaaaacagaaaccaactttaattctagcccacacaagcagagagtaagctataattcagtattcaagtaaactgaggtagtagagtatactgaaaacatgatctacccaccttcctatttacattacttacaagagtttggttccttattagcctttcttacagcaacaatctacattatatacaaagaggatgacaaaggataaatggaaagctttgaaaagcaatcaatattttaaaggaacacttaaagaaagaataattttaaagttattacttctactagtgtaaattgaaaattgttaggaaatattctgctcacatgggtttataatggttgatactggtttgtggccacctgagcatatttaaaaaatacagtatttttgccatt

SEQ ID NO: 1422 - DNA, 288 bp, Rattus norvegicus
  Genbank Accession No. AI044706
tttttttttttttttttaaggctcatttttaacactttattcacttcaaaacctttaacacaggtgtttctgtcctgaggaaggggtggccctggacttcaaaactgatgttaccccttttccacgctggaggccaacgcccggggacaggccgtttgcgtaatgggcgctcttccgcttcctcgctcactgactcgctgcgctcggtcgttcggctgctgcgagcggtatcagctcactcaaaggcggtaatacggttatccacagaatcacgggataacgcaggaa

SEQ ID NO: 1423 - DNA, 479 bp, Rattus norvegicus
  Genbank Accession No. AI044719
tttttttttttttttttaattgttcattagcaaaaatgtattctgtaagtccgcactcagagcatttcctcattataaagtcagccagagaacaatgccgcctcttgctgggcacaaactgagtcagtgtggctgacagctgcagccctttatcagcccagcatccaaattacttccccattgtgttttctcactaggcatccagcaatcctgagtcacaaagataagaagccccaacagtagacatttctaagaggccttcctctttcagcggcaaatgctgtgtgcaagcggtgtggccaggctggactagatccccggacacgcacctgctttcctactttagtacctttgtcctttcccaccacctcagcatcaaaagcacctatgggactgcttggccatattcctgagtccccagcagagcaaggtgctgctctcctctgcaccctgtcctaaaggaatctctaacaatagtt

SEQ ID NO: 1424 - DNA, 525 bp, Rattus norvegicus
  Genbank Accession No. AI044721
  misc_feature (1)..(525): n = a or c or g or t
tttttttttttttttttcaaataaacactttttttattttttgcaatacaacccactttccctccccaagaacatggactgacctcagccaccaaagcagaggacaaaagctgttgctgtgtcagaaggcaaggggttactagaaaaatagattatacccaacagtctcccaaggatccagacccctgtcccgagctcccctaacagggctaaccacatgtaactaaaaggcatggagaggccagaaacctcactgaaaagggaagagagcctggcagtgaagacttgggctcctacctaacgaaaaaaactaagatgcacagagaaaataatttattgggtaatggtagagatgtcatgctgaccattccagatctcactgaagctaaattctggccagtctatggaggtagaaattgggggtggaaggaaagcttaagaattcctacttccccaagaaaagtagactttacacagcactacccttttgcccagtctgacttcccacagagcctctaanactta

SEQ ID NO: 1425 - DNA, 567 bp, Rattus norvegicus
  Genbank Accession No. AI044740
tttttctttttttttttgcttttattttatcctaaatatgtcttctacatcctccaaaaaaaaccaaaatagttttcttgtgttgagaagggaggaaggggttatgaagtaggaaagacgttttgttgacactggcagaaactccagagcacaggtacctgacatgtgcagagaagacctgagctgtggccctgacactgggaacaggggcacgccctgctcagtgctggaccctcccctcccaggacctctcagtgacagaggcagggcaaagtgctttgtgcaaatccgctcaagctggctgctgctgagaatgagtctctggaagatccctatgggatcctcttcatcttagcacaaagtaggcagtgtcacccgaggcccccaagccccaccaggttgctgcccagacagacaatgaggcaaggtgattctgtgagactcatcgtcctctccttgtctttagcctgttgccactgagagaacttttcttcctttttaaatatgaaaaccagatgctgtaatttgtagtctgacagcaaagtcagtgccaggactgctgtcgct

SEQ ID NO: 1426 - DNA, 185 bp, Rattus norvegicus
  Genbank Accession No. AI044783
tttttttttttttttttatgataatgttgtttaatctgccaaatatacaagttgaattttacgagcacgtcttgtctgggtgatgcacagtaaccagagggttcttgaaatgatcaatgggtacggttaaaaatgggcactagccctgaccaagtaggtgggaatggggcagaatggagatccca

SEQ ID NO: 1427 - DNA, 501 bp, Rattus norvegicus
  Genbank Accession No. AI044821
tttttttttttttttttgaaatagggtttcatgtagcccagcctggcttcaaattccctatgtaaccaaggatgccactgaacttttgtgcctgtgttcagagtatatgattaaggcgtgtgccaccacacacagtgtatgccgttctggggaccagtcccagggttttgtgcatgatagacaagcattctagccatcaagctgtagctcaggtccagctcattcccttttcatactcattaacgtagcactgaaagcctgtacaactgctgtgaagttttaaagagctattttgttactttagtgcaagattttaaacaatacagaactcatcataagacagtagaatcagtatttatttacgtatagaagtgatacttctttatgtaataaagaaaaacctgacacattaaactgtcatgctagcctatctggagatggcctacatttgatgcagccttctagagatgctgtgatgttagaaatggtatctggtattaa

SEQ ID NO: 1428 - DNA, 380 bp, Rattus norvegicus
  Genbank Accession No. AI044842
tttttttttttttttttgttgttttttacttttttattcacttttgacaagtttttacataattgtccacctatgagttgggagctcgtggtaggtggctagaaccaggctagcccttctgaagaagaccagtttatactgagacctgagggaagagaagaagccaggtgggcccagtctgtgcacccagtcaatgtcagaggggagccgcgggacatccgggaacatcaagagcagaggtatgatgccaccaggcctctgtactacagccctattctgttgtctcaggcaggacagacggccctgatgctggcggtcagccacgggcgggtggatgtggtgaaagcgctgttggcctgtgaggtggatgttaacatgca

SEQ ID NO: 1429 - DNA, 390 bp, Rattus norvegicus
  Genbank Accession No. AI044861
tttttttttttcattttataaattttaatccataaaaaaaaaaaaaaaatggtaaatttttaagaaaggaaatatacatttagtgcaagttatgaattacagttcatctccagtgtcagcagtgaaacatcctgaaataaaagaatgatctaatttgaaaagagtcccagtgtttaacatgcaatcaataccaggtacagctaaacagaatccttccttctctccatgtcacacagcagcatttggtttaattatgctcaacagcacttttatgtcatagtaggaatttcagaaatagaaaatttgcataacattaggtcacattatccataaagtccgaggaaaaaataaaactgattacagtcaagtttgcctttgattctgaaccac

SEQ ID NO: 1430 - DNA, 359 bp, Rattus norvegicus
  Genbank Accession No. AI044872
tttttttttttttttttatgtgggacagccagtttattgtggcgtggttgtggtaggatacacagtccctcaacatgtacaactattttgatgttattgttgcttttcaggaaaccacagtatgatgtcttaggtctgcaatcttttctctgttaacctggtcaatggtccacctattttacaattcaagttagagaaagtcagggaaatctagttgtgtcatcctaaatcgagggctgcaagacttacaacccagttgtgtaaagtgcttatgttcagtgcaaacatagacagccttgagtgtaagctgacctcaggcaatgggggttcctgggagctgtggtgtgttctatgcatca

SEQ ID NO: 1431 - DNA, 388 bp, Rattus norvegicus
  Genbank Accession No. AI044900
tttttttttttttttttgagactgggtacccgcattgttctgaggaggatctgttctttagtgtactggaaacacgaggttaccagcaggcacaacagggaccctttggaacccttacaaaccagaagggtcacataaatgtactgcatgtgaggtggtgagggaaagggacaaggggaaggggttaagaagagaaatctctggtccactgtgactttcttcagcctggacagttgctcttaaaggggtagctttcttccagtgtactgtactcttcagagcagcagacggctgcagggtgtgcagccagcagcagacgtatcagaaagagtaagtcctaaccccttggttagaaaaacaggagacagaagttttaacacccacctta

SEQ ID NO: 1432 - DNA, 432 bp, Rattus norvegicus
  Genbank Accession No. AI044947
tttttttttttttttttaaacagcaccagcaggggtttatttagtgacagtaaggttaatgattccctcaaacaatataggacaggccacctggtttattcaaactgaatctaaaccttagatctgactcaacagtaacataaaaacctttaatgacaaacccgtgttaaaccaaagacagtttaggtgagtcttaaagctctactactgatgggctggcatctacacgacaagtgttcagttcggttacaaaagcacatttgagtttcttagggatatacaagtaatactccatgtagcctgctaggtcctcaatggtcacatcatccacatagacacgagcttgctcggaacaggatcgaggagagccagacagagttctggtgtgcagtgactgagagtagtcctcaagtgatcttcgttctggggcca

SEQ ID NO: 1433 - DNA, 119 bp, Rattus norvegicus
  Genbank Accession No. AI044984
tttttttttttttttttcccaaaatgtgagttttattgagtttttcataaataagcatttaccccgtgactgcccaggcagcactgccccactgacgtccagtgtcctccgggcgcaaa

SEQ ID NO: 1434 - DNA, 434 bp, Rattus norvegicus
  Genbank Accession No. AI045040
  misc_feature (1)..(434): n = a or c or g or t
tttttttttttttttttggctgttcttgtttccatttattagtctaggaatatacaaaagtgtgacatggcaaaatctcatggagaaagcagaatacacaggagggtggctttctcccgacgcctcataaaggcacacaggtgaggcttggttgggggtggcctcctgtcctggacccagtgtgctgcacaggaagccaggcacctctgtgaagaacagaggcctctcctcacaccagacttggggtgtggctcaggagagctcaggtggctgggagaacatctccagaatgacgctgagctgtgttcacgatgccaatctccagagtaaaaccagccaacagcagcgagataacccaacatggcacctgtgggacagccctgtcnctagcacagtgtacaggaggatgtctttctgggtcgggtgctccagct

SEQ ID NO: 1435 - DNA, 520 bp, Rattus norvegicus
  Genbank Accession No. AI045059
tttttttttttttttttcaggaaaaaccttcatgagatttattctacatattataaatcttaaaaccaaaatgagactcttcctgtagagtgtattggtatgtactatgttaccagactaggagacagagacaggtttagcttgagtttgaggccagcctaggtactgggagctccacgacagcttaggctacatagtgagactttgtctcagacaaatcaaaataacccctccccttgcctttttagaaaataaggtaactggcacccaaggaagctgcttttcctcataccttaactcttctcaaacagcactgtgcttgtaagcaccacatccctcagcagaacagcccctctggccttcagaaggaatgcgtctcatgctggagactcatcagagggatgagcaaaaggtgctgtaagggaaacatgactggctttccacaacactcctagctaccctttatgccatggggaacatctattctgactatgctgtatcaaaaacatcttgcattttt

SEQ ID NO: 1436 - DNA, 541 bp, Rattus norvegicus
  Genbank Accession No. AI045083
tttttttttttttttttagttttgcttttgtttttctttagaatttggtcttctttctttagtcattatttttcattacaaagtaagttgaaacaagtctgagttttctaaacaattcttagaaattgacttggacactgttaaaagcgaagccagagatcataacaaaataagagctataaaaagtctgttgggaattataaacacagtgagggactggacagtggaagatgcggagatggaggtcagggacatggccgcagccagcacttcctgagttaggtacttgggggaggggaactgaaatcagggtgctctttgctcacgttcctgctgggcttcggctgctggtctggagtccaggtctcactgtcgaccaccgactccagcccctcggccatttccactgcttcctctccactttgctctgcactgtcttcctcggagccaggaagggctttgccaagctgcagcgtctccatagtcctctgggtctcggagacccaggactcaatcctactattgagctcctcgtgccgaa

SEQ ID NO: 1437 - DNA, 365 bp, Rattus norvegicus
  Genbank Accession No. AI045107
tttttttttttttttttccaggttcataatttattgtacaaattgagtattacatgatgagttcacatcagcttcttcaggcgtgggacttaacagataaggccagacatttcaaaatccatttatgttgctttcacagctggggttttttttaggccttaacttaaagtataggaccaacaaagcaatgcctccatatgtggccaggacacaattcattctacctgtgagggtataagagttgaaatattttttaataccagtgaactggaattggccatcactttctggaccagccatgacttcaatcttcttcgtccgaatcacaaactctgcagccgatgtccttcagattcctcgtgccg

SEQ ID NO: 1438 - DNA, 517 bp, Rattus norvegicus
  Genbank Accession No. AI045154
tttttttttttttttttcagatttcaagatatttttattttaaactgttttattataaaactaatacaaataacaaatgaaatgtagagaaggaaagcagtccacttgctgccctgccatcctacagggaccatcgctggtgatctgattgtctactttcacagcctggtgtgtcattcgcatccatgccacgttaacgctgtggtccttctcttactgtagtgttgtctccatgctgctcacggatacctgcctatcgactagagctgtgggacagcagagacacagccagcctccgccactctgaacgtctccttggtgtaaacccccatgactgtactgtctctcagatagtcagctttatccagaacaatatacacagtctgatccttgagatgttcagcactggtcacttgcttaaacaaccggacaaagtcattaaatgtttcacaagtcgtttctgtagaacactctgcctctgaagaactaagatgactcagctcctcgtgccgaattc

SEQ ID NO: 1439 - DNA, 441 bp, Rattus norvegicus
  Genbank Accession No. AI045158
  misc_feature (1)..(441): n = a or c or g or t
tttttttttttttttttgagaaacaaacatttgtgtttattagccacagataattcagagcgtcaggctcctaaccaatccctcctatagtctacccacctaggccaactgccaaagaccaggaagagcagcagacaggccccatcctttcaacctcctccccagggtgagttcccaggaagccagggccctttgggtaaggaagaggaagtcagcaaaagaggacagacagggaagaaggaaatagggtctggggcagacagacttggcaaagcaattgattcccaactcagtggagagtaagcagcccaaatccagtctcacccgaggaaccacgcagaagcatacttgtgtcacaaaccttgttagggggtgggggaggccaagggcaacagcaaacctctgcaggtcagtccttgcttgccanaggatgctggtcta

SEQ ID NO: 1440 - DNA, 481 bp, Rattus norvegicus
  Genbank Accession No. AI045191
ttttttttttttattttggatgttttaacttttaattttattgcagaacttaattagcttttattggaggggtgatggcatagcagccacaggggatggggttgaggttcaagagaccggaagacaatttataggatttggttctctttctattatgtgactctcaaggaatgaactctggttgctcatcagcatgctgaaccatcttgtccttccagtctttaaacagtggctgtggacataacgctgttgacctggattccggcagctgcagttgcagatttgccactgtcacagaggaatttattcttgcaatcagtctcttcaattttgcagagctcagatgggacacatggttgaaaggtcaccaagggctctgtgcatggttgtcccccaaactgacttgggcgcagaacagatctaactttaacctgttttctaatacaagggtcacagtctgaccatgttccatagtctccta

SEQ ID NO: 1441 - DNA, 428 bp, Rattus norvegicus
  Genbank Accession No. AI045196
cggccgcacaggtttgttgtctcggcatgtttttgtgccgcgggaccgcgatcggctgcgtgagtacgaccgcgagtatcgccggtacttgcgctggtggcgcctgcgggaccgggatcgggatcgggaccgtctgctcctccgcggccggctatggctccgcgaggacgagcggctggagctgcgggagtggggtctggagctgcgggacgaagagcggctgcgggagcgcgaagacaggcggctggagcggcccgagcccgaggtggacggcgaggctttctcctgcggagagccgggccacatgtcgttcacatacttggacacggcggccgaagacatgacttccttctcagatcggggttccgtccgcgaacgcaacgacgtctaaggacttaaactgatgaagcgctcgcaagggcgagaga

SEQ ID NO: 1442 - DNA, 406 bp, Rattus norvegicus
  Genbank Accession No. AI045333
cggccgctgaacatggccttgagcatggtgtcctgccccgtgagggtgcgcagcgtggtgtagtgcagcgagccgcccacgttcagcttcacatacttgctgttcggggtcaggggcttcagactgtacgagggggagccaggttcgacacctgaggggttaggggactccaggcattcggccgcagccgccgccgggccagaggcctcggccgacatgccagtgagcggacgcgggtgacagtcgaagctctctccgcgccccggacccgctccctgagaccccgcgactcctgcgcgggcgcccgaccgctcggcgcacacgcccactcgccgccgctactctgctacgtccaccagccgccccatcgcgcgctctctccacccggaagctggccctcgtgccg

SEQ ID NO: 1443 - DNA, 403 bp, Rattus norvegicus
  Genbank Accession No. AI045458
ttttttttttttctgttaacatttttatttttccagataacaggagttgtatacaaatgacagtagacccttgcctctttattttttatctaaataaaagataactcaagatgaattctcaagagaaaaaaaagctatatacatcagggactgcatctccttcatcgtctacttggaaccagtagttgtgttgctgtcatggaatcaggaaagaggttgtggtatgttggaagaggtacatacgctgctgttatcattttaccagcaaaccacctgccatgcaacgcattgacagcagcaatagccgcagcaatcgatgggcacttcacatacacattgccctgagctgaatttttgtcaacataaatatgaatgactccaccatgtttattacattcttcaa

SEQ ID NO: 1444 - DNA, 376 bp, Rattus norvegicus
  Genbank Accession No. AI045488
tttttttttttttttttgaacttgacattcttttatgtttatttttagcatgaggaaactgaggaacagagaggcggtggaacctctctgccaacacagtgctcttcgccgaagctttttgcctctctctgacaatacataatatttttttcagggcatggtggcacgcacctgtgactctagcactggggagatggtagcgggaaaatcagaatttcaaggccatactcgatcacacaatgaatttgaagccagccaagaatccatgtgaccttgtctcaaagtagtaatgactggatcagcaggatgacttggggtagctgaggcattgttgttcatcccaggccttgactcaggtagttccagttctgtcttc

SEQ ID NO: 1445 - DNA, 452 bp, Rattus norvegicus
  Genbank Accession No. AI045545
tttttttttttttttttagatagaaactctggttttattgtcaactttacatttttttgtcaactgcaagatgagcctgctggaacatgaatattccaatattccagtcacaacaaaaataggaacttctgggcttttcttcttctgagtctctgatttcccaatgatgttcagccaaataacaaaagcaatacaatagtaattgagtttactattatcaatggcactctcatcacggtccttacagatcgaataaggtttaatagttgagatttgattcctggctcctctccgaatccaccaatgccctggtctgttccccagccaatgttcttgaggaagcgctcctcgtgcagcacggcgatggcattcacgcacagcagggccgcctgcatcagggagtacaacgtaaaggccatagttacttcaaactgttcccaggcctgactgac

SEQ ID NO: 1446 - DNA, 471 bp, Rattus norvegicus
  Genbank Accession No. AI045556
cggccgcgggccttcctcccgccaccgccgcccggggctgctgctccccggcctctggctgctgctgctcgccgggccggcctcgtgcgcctcagacgaactctccctggaacagcacagccattctttacgcccctcggagttccagccagagacaagcatcatgcacagtgctgcacaagtgaccttatcagagactgttcccaggtcccaaccaagcatctctgtccttgtcctctcctctccgtctcctccctcttttgatacggcctttttaagccagagacaacagactcgaagtacagtggagcacagcatctttgaggcaaattatatatccgtgacgagtaatgaggtggctcttgatgaggaggagatggataactttctgccagacgctcactggacctcttcacgggtggtctccccagtgcggtatatcacaccgagcccactggacccaccccagga

SEQ ID NO: 1447 - DNA, 142 bp, Rattus norvegicus
  Genbank Accession No. AI045572
tttttttttttttttttcgttagaaagcactatttatttcgtcatactcttgattcgtttctcttcttacagcttctttttggagactctgggtgtgctggtctatatgtatatgtgatacacaatcacgcccataagtgct

SEQ ID NO: 1448 - DNA, 487 bp, Rattus norvegicus
  Genbank Accession No. AI045600
ttttttttttttttttaggtggtccctaaactatttgaaggcaggtagctgagtctaagctaaagtatttctcagtcagagtaatcaatcacctcagagtaatcaatcaccctcccctcagacgcccctcacaatgcaggaacagtgcaacagcaaaatcaaagagcaaactgtattttcaagaacagaagagtcgccagtgctgaaggacagagtagaaagcagattctttgggggacatcagtcagtcagtttccggcccattaggaagacttctctttcctgctccgaggagagtcggctccattcgacgtgaccgtgccgttcacaccattctctgttccttttctggaagacctgcctttggtcacagccggtttccttttcacgggaggggcctggaaggcagaatgttccctccacctccgaagctggaagttaatgaacttccacatcatgaaggcttgagtgatgcaaatggacgcta

SEQ ID NO: 1449 - DNA, 400 bp, Rattus norvegicus
  Genbank Accession No. AI045608
  misc_feature (1)..(400): n = a or c or g or t
tttttttttttttttttgaaaatccaaaatgttttattttattttttttccttaaatagagataaccagtaaacaattttctgaacttggaagtttaaaaacgtgcatataaaaatgggcattatgtatttcttattgaatgtggattgactgccgtctgctaagaaaagtgggtgtgggggctgaagagaaaggaagttgtctttttttgttttttgtttttttttgttttttgtttttttttttttttaaggcttgcttgtgaaaggaacagttgtaaaaacaaaattgcttgaagcagggtcagcttagtgcttcacagtttgactgcttctctaagaggagcccttcctgcacacgtgcatcagaaaccacagaanacacanagacagacacctaa

SEQ ID NO: 1450 - DNA, 397 bp, Rattus norvegicus
  Genbank Accession No. AI045751
tttttttttttttttttaaaaactgaataatcatgtatggtttatttagtacaatgattataacctataatacaataaaacgtctccataactaaggagtgatatgccatgtattttctcaaaattttgtattgagtattttattaatgtcatttgctgttcaagtaacacctactgctttttctgataatgggaagaaaaaacataaagacaggaaaaagctactacccccaacaggaagtcaagggacaattgggcgtttgttcttttgtagaggcagtctcaactctttacttccttcctgcttcagggccacgtggttatggcctgcagcgctggagaaatctcgggtacaagcacacgtctcggatgtgatacctgttcagaatccagctta

SEQ ID NO: 1451 - DNA, 407 bp, Rattus norvegicus
  Genbank Accession No. AI045767
tttttttttttttttttaaaaaatattgctgtttaattttctagtcatgtactttaaaaagccaatacaattaagactttcagttatctttcagctctgcccctgaagtcacccacaagcagctgcagaagcacacaggacttgttcccatggtgggcacatgtgaagggcattgggtatctagaaatgggaatgcaagcctgtgtagctgacaggcagcctctgccctgacagtcttaacctgagggtcacacggcaccgaagtaataagcagttctgagttacaaagcgacagtaaagacctttcttcaggtccctgcatcggtgagcatacccagtatgctagagaatttatacgaaacctctaaatcaaggcctctttcataaccaagaataaaaattaaaca

SEQ ID NO: 1452 - DNA, 551 bp, Rattus norvegicus
  Genbank Accession No. AI045802
tttttttttttttttttaacagcctaaaaagaggaaatgtttattttggctcagtttcagccaagtcagctccagggtgcttggccctttgctttggggctgggaaagaagcactatgtcatggcggaggagagctgctcatttcacagcaactggcagtggagaggcaaggaaggacctggggtcctgatacaccccagtaacataacttcctccgacaaagacccacttcagttcctaccttctttaagctaagggccaagccttcaacatagatttggggtacatttaagatccaaataggaccagccaccacgaagaaggattttataggagcaattatatggagaatgttaagagctaactacaccctttctacactagagaggcaggtaatgccgcagaaaagggggtgggttgataaagtcccacgcacaggcagcaagctcagaggattcaaaagcactttagagggacttgccctcaaagcctgctgctccctctcatccagtgtccacacagagctgaccgcatttccgggtagcctggct

SEQ ID NO: 1453 - DNA, 225 bp, Rattus norvegicus
  Genbank Accession No. AI045822
tttttttttttttttttccaaatccttcatttaatatcaggtaatgcttgaactcaaaacacacacatttcataccattgagaaaagggccctgagggcacctgagtcatgcatgaggcagtaaataaaatcttgacccaacctagagagatcagtcactgtcctacaaggatggtatgcacgttcagtcttcacatttatccttccaagatggacttagtaagt

SEQ ID NO: 1454 - DNA, 414 bp, Rattus norvegicus
  Genbank Accession No. AI045871
tttttttttttttttttgcttttaacctttaatagataaacaacaaagtgatctggtttaaatacatattgagcaatgtcgtatttagaacaaagagctgctcagaacggttagggaaaacagacatgtcaacaaaaagaagacatttaacatttcaggctgtgtgtgtcaaaatgtcttccgattattattcccctacgaagaagcttcaaaaaccagttagttggttagaacttcacatattaaatcatacacgactggtgaaagaggaagaatttcagagattacctaagaggaatgagttaaacagtgcaaatactgagctgcttcctggaaatctcaccatgtgctttcctttcccctacaagaaatactgtaaagttgtctccagttttagcctcgtgccgaattctt

SEQ ID NO: 1455 - DNA, 449 bp, Rattus norvegicus
  Genbank Accession No. AI045911
tttttttttttttttttgaatggcagaagcactttattaggctccagggcccttagaagccactctcacagagtctgggcaggccacccccagcagctccagctgcacaggaagtgggcgggtgagagaatccacatagctttctctaccgtgaaggcccgaagaagatgctgggcccacagctgcctccctctcttcctgcagcctctcctgaccccctatgtctacatcagtcttggggtggaaagggaagctcaggccttcagtacaggaaaccaggcctgcagtacaggaaaccagcttgaaaccagccacctgctgtgcttgaacagggagcagaggggagcacaggggaccgcagcgtgatcctgtccaggagagagctggcaggctcacaatcagactggctctttcctacaggccctagagctcctagcttggctcagtaa

SEQ ID NO: 1456 - DNA, 518 bp, Rattus norvegicus
  Genbank Accession No. AI045939
tttttttttttttttttcacaggataagattatattttattagagatcttatattacatattcccaaaaagttataaaaatcttccaagagaaaaatatcaaaacctgttgatttcaatgagcaaaataatcagaatgaaagtaaacattttcttctagacaaaggactgtgaaaacatttcagcacaagtacagcaaaagacacacgaaggtgatcacaatgtctcagaacaccatacagccttttgtttaaatcgatgattttagaatgctgatatttgaaccatgggcctccaaattaaaatttcagcagtccttaaacgagattccattatcctgtccattcgtttgtagaaaggtctggatgtgaagtagccactccagtaatggtcgtctcggtcagcgtaggtgaagaagtctccactcagggaggggaacacagactggccacccttcttctcagctgccacagacttctccaatgcatcgaaataatctgacaaagttccaaactggat

SEQ ID NO: 1457 - DNA, 366 bp, Rattus norvegicus
  Genbank Accession No. AI045965
tttttttttttttttttctctttgtctttttcccgaggttccttgcgtttccgttcactattcccaggctgttttatacttgatggagaggcttgcgctggctggccctgctgggcctgcgtggaaggggtggtggtggccacagcagcctgagcctgctcctgctcctggtagtactgagaggcccgtcggtcctcctcttcctggagtttctttgccaactccaagtcactgattccttctgggatttgctcccagttgatgtcttggctctgctgttcttgttgcagtgacagtgccataaggtagtcttgatctatttggtcttgttgacctttgtttcggcacgaggcctcgtgccgaatt

SEQ ID NO: 1458 - DNA, 393 bp, Rattus norvegicus
  Genbank Accession No. AI058342
tttttttttttttttttatacaaagcaaactttatttctgctatacatgacaacatatttctctaaggaagctttatttctgctatacacagcaacattttgttctaggaaacaactactatattaattttaccattaaggtcagataaaaatacatgtcagcgatcccagataggcaatggtgtgtagactatcagatatgtgaggaaaagaaaaaaaaagctgtcaactgtccacaggggttcgtccagtcaggttttcagtcagtcagctgaggattatgtcattagttagtctttgttctgtagaaagaacacaatacaaggatgagagtcatcacctgcaagggaatggctgatgtacttagtatcccactctgttgggatttcctta

SEQ ID NO: 1459 - DNA, 431 bp, Rattus norvegicus
  Genbank Accession No. AI058359
  misc_feature (1)..(431): n = a or c or g or t
tttttttttttttttttgctcagccaacagcagcagcacgttttattgcaaccagaatcccctggtcatgtgaggaagggacagaacaggacacaagacaggagatagcatgctttatggaccagcacacacagaccggtgggaagcatacccaatgatgctgacatggagggtagttggagaggaggcgggctccattttagcagagtcttccccacaagggacctgagggaaagggggcagttgacagtgcgggtcaaatgaccaaagagactcagcagtctctagggcaacttctgcatgggtcncctgtggatgttgttagatgaaaacaaagatatactctgtccattgagagtanggaaaacaaaggctcaaaatgacagtcactggccagcacccataggtgtgacctgagaccctgactccta

SEQ ID NO: 1460 - DNA, 327 bp, Rattus norvegicus
  Genbank Accession No. AI058365
tttttttttttttttttgagttttcaaagaagagatttttagttttttaattgtgtatacttttgtggctgtggacacaagtgaggtgcgcatgaaatcaggacaagacttcagatcccatggagccgcaggcacaggaggttgtgaggcacccaaaggggttctgggaaatgaactggggtcctcttggagagcagtgtgccacctttacaaagatctctctctctctctctctctctctctctctctctctctctctctctctgatgactatgaaacatggttttctgttctaaacagaaacatttgcccgtgggacccttcctt

SEQ ID NO: 1461 - DNA, 410 bp, Rattus norvegicus
  Genbank Accession No. AI058382
tttttttttttttttttcaaagcacaatttcattatgaatggaggtgactctgccggtgccactgccatcgctcagccccctccaccacatggcgcagagtagatgagattcccagcagcatatggcccaggccttgcagcagtgaggaagtccaacgaaggagctccctgagtacttttttagggccaactccttgaaaatcgcagctcatggagtagagcccgtacaatgtagctttcacgttgaggctgccgaagaggtctcgaggattttgtttatacacatcaaaggtgatgcgggcgatgtccttgctatgttttggcttctcccgtcctaggccgtatgacaacatcccactctttgggctccagctctgtccctgctctagagccatcaagcatgtgtcatc

SEQ ID NO: 1462 - DNA, 428 bp, Rattus norvegicus
  Genbank Accession No. AI058390
cggccgctttaaccagcagtgaccggctgtgtttcccagagatgctcccttatcgcatcagatgcttcggtagtcagagcctctggccacgatggcagcagcgtcccactccacggcgaagaaggaaatggttccaaaaaacccaaatatcaccatgaccaggagctgccagtggaggagcaggtagttgctgtagaagaaagccacggctgcgcagatcgactgaacaaacttaaagacggcgaaggccggtgcgctgtcttccgagtagagaaaacccaatatgctgagcagctgggtgttgaagcagctgtctcccagacccagcagaaagctgcagaggatggcaacttctttgctgggcctgatgtatgcactgctgttggtcccttccacgggggcaatgggcgcgtctccaggcatgttga

SEQ ID NO: 1463 - DNA, 454 bp, Rattus norvegicus
  Genbank Accession No. AI058393
  misc_feature (1)..(454): n = a or c or g or t
tttttttttttttttttccttaattatttcacttttttgaaagtatgatcattttcattctgattccatatacaggcatttcaaagttcagggcagaaagcaggagactgaatatttatgtgggtgtaagttttgccacttttctctaaggctcccagcctccctaaggctcacagcggcagtccctctgctggtgatttggtggcagcagatggagatggtaatggcctattggaaaccataaggcgaggcagcaacaggcctcctgggatgtttcaggtgggttaatgcagatgtgtggctgaaatgtggcataaattangagtgaggtgagtcacagccttttgacatagtttccaggaaaagtaccaaagaatttggttcttcttgaagttcccacgaaccatccgtcatcacacttttccatgacatctacgacatcactttctctgag

SEQ ID NO: 1464 - DNA, 460 bp, Rattus norvegicus
  Genbank Accession No. AI058396
ttttttttttttttttgctttttgagaagtctgatctggtttaaatcacaatttaatttttcaaaggaggttactgggctctcagttttacattagtgttggagaatgatgtttaatgtgcttgctaaatttggtaatttaaaataaatccaagtacttataacgacagctacagataaccattcatgttaaatacatctccgattctctcctactcatacattacatactagatgaacattttaagtggtaatgcacacacacatgattctaagtcagacaatatatgcatattaaaattctgtatctcctgataaggtaaaaaataaagctatctaaattgatagacttttttctgcaaaattagaatcacactttcataagacttccaacatacatatcttcattaaagctttgttcagacacagtatcagaagcactccccttcccattcacccgt

SEQ ID NO: 1465 - DNA, 467 bp, Rattus norvegicus
  Genbank Accession No. AI058430
tttttttttttttttttataaaacttgataaaaaatagtatttcaaactgtacagtcaccagaagtacacagttatcaaaaacgcacacacgtcacttggcatctccagcaccgtccgctttctgtgcctggtctgttttggcatctccgttttctgcaggattattcgcatccttaccagcatccgctttccccttcttccccttgggtaccttctctcccttctttgcaggggcctttttaggcttgggctctggctttggaggagcaggtttagcagacaaccttgcagatcttctctgtggctcgtccttcaccttggctttgtctcctttagcatccccttcagcatttcttttgggcatggcggcggcaggggacgtcggcgctgagcacgggtttacagcggcgcacgggtttggtccgtccgggggtcgtcctcgctgcttcttcctcgtgccgaattc

SEQ ID NO: 1466 - DNA, 473 bp, Rattus norvegicus
  Genbank Accession No. AI058446
tttttttttttttttttgagagtaatcacagatttttaattttgattgatgtccaatatggttgtcatgacatatccctgattccatgaaagcaaatatttaatgttgggtggaattcttccccctgcttggagaaaatgactttatactatctctgtagattggaggtgagagatgtttggaacagaggagacccccacctattattaaactgaccttcaccttctggggctcctgtcagtcccagcatctgggcgtaccgccctctggtggtaagaaggcaaaagtgaggccagacctaagaaccacagagagctcctccctgttcagtctctacatcctccacccattttcctggactccctggacttagaaacagtctttggaaaacgggggtatctgtcaccttttctccagtccaatttaaatgaggggactcattttttaaagaagagtcctgcatgctttgaagt

SEQ ID NO: 1467 - DNA, 374 bp, Rattus norvegicus
  Genbank Accession No. AI058448
tttttttttttttttttcaggttggaggctggtttttatacagaggtaactcacagggtggatcaccagcctgctgctgcagggcaccagtctggcagtagtcccgtcagggatggctgtgggaagacgatgttacatagactgcccggtacacagtcacaccagacacaagcaaggacccacgggcactgagcaggatgggatgggtaagctgggcaagtgtccgggaggccacgaggccattttctgaccactggcatgctgcatctgggtgacagggtgacttggcgtcagatgattgtggcaaccctgtgtggggtacgatccaggtggagggttcagcctacggctctgggctgctcttctttcggcaa

SEQ ID NO: 1468 - DNA, 131 bp, Rattus norvegicus
  Genbank Accession No. AI058465
tttttttttttttttttggaatttctgagctttattaagatagggaccaaaacaaatgtgtacaggtgtaggttggaggactattcagaacaacgtctagtaaagaactcagccgtgctttgctgcggtgg

SEQ ID NO: 1469 - DNA, 248 bp, Rattus norvegicus
  Genbank Accession No. AI058577
tttttttttttttttttaacaccactcagcagacatctgaatagtttaatcacttctcctccatacaggccacctggcagggctgtgcagcccaggcaggccctgctccagtgcgtgcctatgtcccagagcgcttctctcctgggctgcactctgcaggcgcatgcctttcctgggcagcccctgcctctttcccaaaggctgggctggggaaggccaatcactcttgctcctggtgcagctcttga

SEQ ID NO: 1470 - DNA, 436 bp, Rattus norvegicus
  Genbank Accession No. AI058606
tttttttttttttttttctttggctcaaccttttaatataaaaaattcactgatgtacaaaaatgtgaaagagtgacaatgacaacatatgaaagcctgtgattgacagtccccttgtgtgcacgccatggtgcacatgcacccgcccacacatcctcgggtgtggaaacacaaagtaatgcaaagcagtgctacccagaagtgccgccatatgtgtcctccggatacccgccagtcacaggccagggtctactccaacattcagtaacaacaagacagcatcctcccaggaccagcgaggccggcttcttactcacgatggaccagcacaaataaacccagcagaaacagtactgcatacttaaatttaggatagtcattcatgaggatcgtcacgattccaatgtacggaacaaaccctcttgcctcgtgccga

SEQ ID NO: 1471 - DNA, 401 bp, Rattus norvegicus
  Genbank Accession No. AI058639
tttttttttttttttttgagggaaatataaatggggttggagaagggaaacagggtgtgggtgtggtcacatttcattgtatgcgtgtaagaaattctcaagaataaagaaaaatgtaaagtcccaaggaacgagaggccatcttccagtggtaactgtgacaggatttgactgcttggcagccatcgtaatcgaagtcatcagctacttcatgatctggttaaaccacatggagtatctcgggactgaggtgaggaggagcatgtgtgattgccctggtggtggcggcgagcttaggatccctgtgaggaaccaggtgcccttgtgctggcgggtcaccacacttccttccacccaaggccccatcacttcactgcccttctcacagcttgtcctcgtag

SEQ ID NO: 1472 - DNA, 308 bp, Rattus norvegicus
  Genbank Accession No. AI058730
tttttttttttttttttgctaggtgaggattttattaagtccgatgataggaaagactgagaacactcaagacagttagtaaaacagtgctctgtcctagagggttaaggcacaagtggaaatccagagtttgtgcttccacacacacatctgtgcctttcacataatgacctaaagccatcaacagcagtcaaaatgaccagaaggtggccgagagtgggctggtagctcagggaacacacgtgactccaaaagggttaactacaagtggcaggtgacatcatcttacagacattgcaacaggatag

SEQ ID NO: 1473 - DNA, 231 bp, Rattus norvegicus
  Genbank Accession No. AI058745
tttttttttttttttttgaaaataaaatcatcaattttatttcaaagtcattgctggggtatgacatgaataaataatggggcggaggggaagcagtgtgttgataggtcaagacaaggctcttggctctctatgttatgcaacataaaccattggaggaattcttacaggatttacagcagaagaggcatatggggaaattggtgtctcgcttccttcgccctcgtgccg

SEQ ID NO: 1474 - DNA, 342 bp, Rattus norvegicus
  Genbank Accession No. AI058759
tttttttttttttttttgaaccatctgcaactttattctggagcagaaataagtcattttctaacaataaatataaaaaaaaataataataagttaaggttccaaaaacaaaaacaaaaaccacccaataacacagatctgtaacactgacagcgacagttgtccaaaggggctaaaaacggggtggctgggtggtaagtctcctacaagtcggccaggcctcagcccgggaatgtctgttgcagggtatcctctgtccccagccctggcaaggtccctgccacacactcattctttccacaagtataaaatatatatttaaaaaaaacctcaacacagcca

SEQ ID NO: 1475 - DNA, 340 bp, Rattus norvegicus
  Genbank Accession No. AI058762
tttttttttttttttttaagctaaagaacagattttattgttttcccaaaacactaaaatagcccatggcatagtaatttaggacacaatataaatgacatatacagtcaggttcccaccccccccccatggctatttttaactgtcttggggaggaggctttaaaatgtccactcattcagtgacctttattaaagttatcaacaaaccacaaagggagagttacttgggcggaggggggggggggtcttaatgtaaaagaaatcacaagtcctgggtctgggtaaaggaaaatacttcatttgcgatctatgttctgtccgcagaaaaatctcaaact

SEQ ID NO: 1476 - DNA, 400 bp, Rattus norvegicus
  Genbank Accession No. AI058894
cggccgcgtggttcctctatgccctgactgagttgtgattgctaagatgaccaaaataaaggtggttcccgaggaatctgaggcgcaggcggagggctgcagcgaggagcgcacgtacgaagagctgctggtcaacctgaaccccatcgcgcagcccctggcttcccgccgcctgacgcgcaagctttacaaatgcatcaagaacgccgtaaagcagaagcagattcgtcgcggggtgaaggaagttcagaaatttgtcaacaatggcgagaaagggatcatggtcttggcacgagatacgttgccgattgaggtgtactgccatcttccagttatgtgcgatgaccagaacttgccctacgtctatattccctctaagacggacttgggtgcagctaca

SEQ ID NO: 1477 - DNA, 350 bp, Rattus norvegicus
  Genbank Accession No. AI059010
tttttttttttttcctttatttcgttttcattttcgtttttttttttttttttttgccctttggaagagagaacgggagtgtccgatttcgccctatttatgtttctactcgggaacaaacgttggttgcgtgttgcgtgtgtgtttccttgtgttggttttttaaagaaacgggaagaagaaaaaaaaaatcctccccccttatcccccgcgctctctcctcctcccgacaccatcccctctctttttgtttggttttgttttgccacgagtccacattcctgttccgtaatccttgggtcgccggttttgtgttttcagtaaagtcttcgtgacgccaaaaaaaaaaa

SEQ ID NO: 1478 - DNA, 469 bp, Rattus norvegicus
  Genbank Accession No. AI059077
cggccgccagagccccgcacaggaaggcggccgtgaagagcacgagctcaagtcgctgcaaccagggcagcgccatggcgcccaggccaccaggaagccaaccgcccaagccccgcccacgagcacagacacgtcacttccgggtgcgggtttattctcggaggcttagcagcctcatagcggcaggtacagcgaatagtctgagagcgcccagcggcgggccgggcggccagtacggccgatcatgggcaacttctgcacgtagcgggacgcgggactgggcccatacggtgcagggaaagcagtttgaaagaggcgcccgcggcagcgccgcccggcctgacgccctgcgattataaaccggaagtgaggggcgccgcggggcgcgaagcggctcttctggaagacgtctcgcgttcccgcgccgggaccctgctgacgaggagcgcctcgcgcccggtgtacacga

SEQ ID NO: 1479 - DNA, 337 bp, Rattus norvegicus
  Genbank Accession No. AI059095
tttttttttttttttttgggtgtggtaaacagtgtttattggtccctcctcatgtaatccacacttaccaaggcctaggtctcaagacgctgactgtgacttctgcctttattcctccgctacaattctatccaggctcacgtgtttcacaagctcagggtggggcgccatcatatcacatgtatgtctgttactcctgccattttacaatgcacccagcccacacaagtgtactggacagagctgcttcttctatgagcagagggaacaaagtgtctcgttggcacctgaaaacgcccactcgcagagcctggagcagtgggcagccctggagagt

SEQ ID NO: 1480 - DNA, 508 bp, Rattus norvegicus
  Genbank Accession No. AI059153
tttttttttttttttttagaggacatggatttcctgtttattttcttggtgccttggtcatacaagcaaacatggcaaaagtccctggcaccccaagcaacggcctactggtgcccactgtggggaaaggagctgcactgttctggcggagacacatggtagagtggtgcggcgctgctggacactgttgggctattggtctagactcagcctcctcctggagctggactcggactcttcatactctgctacacgccagcctgctccatgctgaaggagacctctggatgcttgtggttgagcatgatgtctgtaacacacgtagctggatagcgggagtttaaatgctggctaccgtcacccagggctgggtgctcatggcccaggctcaccccacattcttcatcttcctcatcctgaaactgctggctgcccatgagtgaagactgactaagaactgcatctgacatccgggcagagctcagtgcctttcccctcgtgccgaatt

SEQ ID NO: 1481 - DNA, 144 bp, Rattus norvegicus
  Genbank Accession No. AI059164
tttttttttttttttgtctgattacaaattttatttacatccgttacaaatagcaccaaaccccttgggctaccctagtagagaggacaacccccatttctggacacccatctcttccctgggctgcccatgtagtgtctgtca

SEQ ID NO: 1482 - DNA, 384 bp, Rattus norvegicus
  Genbank Accession No. AI059174
tttttttttttttttttgctggagaacaatggaaagagaggtttattttggctcgtgatttcagagggttcagtccatggttgctcccagaacatctttgtggccagggtggatggaagagaagctcctttacctcggaaagctcaggcagataagcaggcaggttggggcccagtggccaaaagctgtccatagcaagctcctcattcaaacaggaaacaccagtgaggccagacagggtggcaggctgtgatcagcagttcggtgatgccagggaatttatacccggattctccaccgatcaccggagtccataatgtgactagcatcccgactcctgctagctccagaccgaccacttgattctggcagagagttgttgag

SEQ ID NO: 1483 - DNA, 423 bp, Rattus norvegicus
  Genbank Accession No. AI059205
tttttttttttttttttaacttcgtaagtcgacagtatacttctgcctttcacataatgtgacagcggagtaggctggtcgaagcaatggcgttcagttttcagcttcaacatgggcgccgatcacaagtcttcactttctaccaagccgctgttcagtgtcaggtgagatgggctggcttcagtctggaaagcggctttgatgtctagtccctggtccgaaagggctgcataacgactggctgatggccgtaccttttttggcttggtggtctgtggctgctgatgccactgggtgtagacatccagcctggcagtacatgacacgatgcctgcttcgttcttggcggacacggtataccacccagcgtcttcttttgttgctccctgaatgatcatgcatatgtatccatgattatcctgg

SEQ ID NO: 1484 - DNA, 450 bp, Rattus norvegicus
  Genbank Accession No. AI059234
  misc_feature (1)..(450): n = a or c or g or t
tttttttttttttttttcacaacatacaaagaatttatttatgtaatacagacctttgctcaaatattttcacagaattccatacagcaatctactagaaaaagtagagttatatgacaccaaaataacattgtttcttggtacaaattactaatcaaaaacaaggtagagatagtctcataacaaatagggggaaggtgggtgctgcttacatggtacctgtttgtttgcctctggtcttgagccaaggctgtgggtgtggggttgggggggtcgtanggagcagccccaccggctctgcctctggtgagcttgggcaggcttcggtacttacagagactgtgagcccagagcgtttctgtcatttcaccctgtgcctcgaggacgacagagcagggaaagagagtactgatgaatgctgtaacttagatctttgcctcgtgccgaatt

SEQ ID NO: 1485 - DNA, 324 bp, Rattus norvegicus
  Genbank Accession No. AI059270
tttttttttttttttttgcctttggataagtttttattgttgacaatagctttcgagaatacccttttcactaccatccgattgtcactctgtaaataaacacataccccatgctacatattggaagggctaagtttagtcctaagcggatatcaaatatgaatctgccatccactgcagcacgctggatgctaacacgctgaatacagttaacatttaaacagacttacttcttcctgtaatttaaattcagaaggatctgctgcaacagccatgaagtaaagcagtcttctaaattcttccctattttgggaatccagaagc

SEQ ID NO: 1486 - DNA, 177 bp, Rattus norvegicus
  Genbank Accession No. AI059340
tttttttttttttttttgcaatcaaaataaggaaaagaaatatcttacaagttaccatgaacatatatattaaagtgacaggggaggagagaaataaaaataaaaaagttacaatctgtacagagaggaattaccatggacaaccaaaaaaaaaaaaaaatcccctttcttttggga

SEQ ID NO: 1487 - DNA, 243 bp, Rattus norvegicus
  Genbank Accession No. AI059386
  misc_feature (1)..(243): n = a or c or g or t
tttttttttttttttttacaggtgaaataaatttttattgatcagtataaaatatttcaacacacaatgtcttacatttgatattgtcttcagtctggtgactgtttccttgcaatagttgggatagaatctgaggcctcagacatgacaggcaggtcctccactactaaactatgccccagacccgaggggttctangcaagtgctctcctattgaaacatggccacagctcctcagtggta

SEQ ID NO: 1488 - DNA, 156 bp, Rattus norvegicus
  Genbank Accession No. AI059403
tttttttttttttttttaagtcataaaaaatattttattggtaattatacataagtgagtggggctgtaaatactttctatttcaggatattgataagtgcataaactggaggctgtatctggaacccagagtactatggtttccagaccaattgt

SEQ ID NO: 1489 - DNA, 346 bp, Rattus norvegicus
  Genbank Accession No. AI059508
tttttttttttttttttcccaaaacatatatttacctttccactcggtacacccttgagcacctttgccagaacatccctggcgtggcccagcttggcaagggccaatccataggctttccgtgtggctatcttgtcccccactttgtatttgggtggggtaggcattcggatgttggcaatgtccacggaaggggcatcctcctgagggggcgtggcgaggatcttctttttgctctgaacctggctgtaaatctcctggataatctgctcagccatgtttttggggaggggcttcccatgccacgcctccttgtcttcaatccctgtgatcccgcggcccttga

SEQ ID NO: 1490 - DNA, 434 bp, Rattus norvegicus
  Genbank Accession No. AI059513
tttttttttttttttttcgagcccaacgttttagtttttattaatactaagggtctcaaactcccaaactgacccttaaacgctgcccaagaggcagtcagcaagcctggggaaaacagagcggcttacacacatccttgccagagggctgaccataggagagggtccccagctgccaggacttagagaaccctgtgaagcccaactgtcagatactgagacacaggtcctcggtccactgggagaaagtgtctgctgcccaagtcagaggcaagagtgacatgcagaagtgaggacggccgaggctaagctgtggcttttattatatctgctttggcaataataaataattcttcatgtactctgcaaggaaacttgaaaaacagggagaagcagcagatgtggagttcttaagactgaccctgcactgaaaa

SEQ ID NO: 1491 - DNA, 472 bp, Rattus norvegicus
  Genbank Accession No. AI059519
tttttttttttttttttcctggtgaccttcaatgatcaattttattataaagaacagtatcaaaatatacaaatctgcttatgaaccaccaagaaatgcagctttttaaagggccaagtgagtatcagctttttcagagtaggcagcttctccctctgaggtcttcctggagaaatggggttgatgtccatgggccacattttctatatatcctctcaataacttaaagggtgagtctggcttctgaatccagatgtctatcacaaatcctcatgggagagtggctgtgtggggttttcctctgtgacttcgctttgtgctgtctgcacacaagcgtcttctgtctcctcaaagccatccggacacacgcacacaaagctccctggaacattgtagcagttttcgtttcttctcttacaggctttttcttctagtgagcattcatctatgtctgcacactgtccactctgct

SEQ ID NO: 1492 - DNA, 299 bp, Rattus norvegicus
  Genbank Accession No. AI059549
  misc_feature (1)..(299): n = a or c or g or t
tttttttttttttttttggccaaaaaacttgtttttattattaaaccttgtagtacaaacctgaaaagtaaacaaagaacgggcaatcaaccacacagaacctccctgcgggagggtgcagagcagcgctaataaattaaatgtcaaactgtaagccataggcgagagtttactgtcaaagaggaaaagtacacagcaaggccatangaactggacaaccacattgggaaacactcgactgttaggtgatcgttaaatattccaacagttcagtcttctgcaacaaccaccacccacgt

SEQ ID NO: 1493 - DNA, 341 bp, Rattus norvegicus
  Genbank Accession No. AI059608
tttttttttttttttctgttctgtagggtgttgctttatttgtggggtgggcagttggtaaggatagagttgactgaagcaaagccagggcagttttaggaaaaaggaaggagaagagacatggtaagtgaagctgtttgtcagcatgtggaccatgtgtgggtgggccacaaatgggactggcaacactggaatctcacagaagagggcctgggtttggggacccagtgtgtaaggagtggggcctctctctctagaaacctcccactggggaggattcctgagcatagactccagacacgtttgcctctgatctgcatggtggggacatggtggagcca

SEQ ID NO: 1494 - DNA, 433 bp, Rattus norvegicus
  Genbank Accession No. AI059638
tttttttttttttttttaaagtttaaaacatgaatttattttatgtatatgggtgtttggtttgcatgtaaggcaccaccgtatgcatgcctggtagtccatggagcccaagagagggttttggattcctctggacaggagttacaagatggctgtgaaccaccatgttggtactgggaatcaaatggcagccagtgttcttaactgctgagctatctctggcctgtggacgattttgattccaactataaaaggctcttgtctgccccctgattcctggggaccctttgttatgtggctgttgagtcatcaaggtcaaggcagagtcactgctccccggactgttcttcttccagttgtagctgaaggaaaacaccagaggacttggcatacactgtctgcttgtctctgctctgggcgatacatgacatgt

SEQ ID NO: 1495 - DNA, 170 bp, Rattus norvegicus
  Genbank Accession No. AI059759
tttttttttttttttttccgttttaagtattttttcttttaatttttttttttaaattttgaaagcagcttaacgtgaatgaaaagcagttcctgagtaactgcagtaaacagtctttaaatacatatacatgtacacatacatatgtatatatctgcaacttagctcat

SEQ ID NO: 1496 - DNA, 190 bp, Rattus norvegicus
  Genbank Accession No. AI059835
tttttttttttttttttctgaaaatatcttgccttttttattaatcatgtcatctaacaccaattaaaaagacaagtctgtgaatatgatataaaaatacgatccccaggttaacacttcgtcgcaggcacagttacctcacagaatacatgtttggagggccgggaaaggagtctgggtctgtgtctct

SEQ ID NO: 1497 - DNA, 424 bp, Rattus norvegicus
  Genbank Accession No. AI059844
tttttttttttttttttgagctctaaatacaaactttatttctattacaaggaaataattaaaccagtaaaataagaagggaaggggctggagcttcagtccctgtgagggcaggtgtggccctggtgagggcagcacgaacagagcagtacattccccaccaggagcagagaggtgggtgagtgacccgcaagcaccaaggtggcctctagtcctgccatatacctgccgctcagcttgttcctaacatgctgcaaacccaagcttaggcccccagggggagagaattgcttcactggtatctgagattcccagaaccctcctctttgtccagcaggaccacaaagcaccaagaagcagtgctgatggtcaatgagcagttcctccgggtacagctccaacatcagcctcgtgccgaattctt

SEQ ID NO: 1498 - DNA, 501 bp, Rattus norvegicus
  Genbank Accession No. AI059856
tttttttttttttttttactcagacaggatcagacatttataaaacaggtaagtattcacacactgtaggagaaacaaccttcccagcaatggggaatgctgtaaagtgctcttgcctgcaaccatctcttccccatgctcgggcccaggagcaggacatggggcactgttctgtgacagtcctcagggccactcaggctaggcaaaaggaggcatgaagtcattccagggctccaagacactctatcccacagctgtggaatagtctgctccattcactggaaggctgtcctggaaatgggccaacatgtcaaggaggtggaaggacagatgaccttgccaacttgtaccttgaggagagagccatcatcaaaaaagcagagaaggccattgtccccatagctgaagatgttgcaaaataaatactggccccagaataagcctttgctcctctgggaacagttctccagacgcattctactgtccctccagcaagagcct

SEQ ID NO: 1499 - DNA, 350 bp, Rattus norvegicus
  Genbank Accession No. AI059877
  misc_feature (1)..(350): n = a or c or g or t
tttttttttttttttagcatttatttatttacttaggctagcttgggtgaggaacacatggcgggtggattccctgccacaagacaggtgctagtgaaatggtttgtgcactgctcctgtgccatgtangctggcttatgcaagacggtgtagctgtgcttctgaaagcctgggagtcaggctctgctttgatgggatgagcttctgcagaggggacttggacaagcagagcagtggtctgtgtgggaataggagaggaggagacagtatggtttgacttttgcctactacttataaggaatttctttgatgattactgtttacttgtaatatatactaaaaatctacat

SEQ ID NO: 1500 - DNA, 457 bp, Rattus norvegicus
  Genbank Accession No. AI059879
tttttttttttttttttagcaattccaagaagcttttatttttaaagaagttaacagaaatcgaaagggagctttgcagtaatgttttataaagggatatctcaagacagattatattgctttactattagcagttgttttgattgaatatttggtacttgataacctcaagataagtatttacttttcgagagtctcggagcaggcagcgaatcagggtataaaaagaaaagcagcgaacatcttcattgcttgactgcaaggatgacagcccggaccaagcaaggtgggtgtcattatctctctctccaatcatgctgagaattgttttaacacccgtcgtgagttcatcaaattttgcctgaatctctctggctttggagaaaagaaaagaagggtctccttgcattgcagatatttcattcacaagatgatttagagcattggtccaggaatt

SEQ ID NO: 1501 - DNA, 177 bp, Rattus norvegicus
  Genbank Accession No. AI059916
tttttttttttttttttatagagaagcctataagcttagtcctagcttctatgtggacattaaccacgttgaaagtgcagagccgggagtcgccagcctgtggtatcagctcacagaaagcggtaatacggttatccacagaatcaggggataacgcatgaaagaacatgtgagcac

SEQ ID NO: 1502 - DNA, 242 bp, Rattus norvegicus
  Genbank Accession No. AI059939
tttttttttttttttttgggtctgatttttctcttctgtttttaacaactgaatatctagtgtgggctattgagtgtgatgctggtgaggagactctacctcctgtggataaattcttcctaacagtgacagtagcagtatgggcagacagtatcacctcgcagtacgggacctcacatagcccattggtaggcattctgtggccaactgtattaacattggaagggtggggtgacagagca

SEQ ID NO: 1503 - DNA, 214 bp, Rattus norvegicus
  Genbank Accession No. AI059947
  misc_feature (1)..(214): n = a or c or g or t
tttttttttttttttttaagtgtaattaatatattctaataaaaaacactagtaaaaaaatagagccatcctgggcaacttagtgagatccagcctctaaataaaaggtcaatgcagctcattggcagggcacacgctcagcacgtcaaaggtttagggctcagccttccacatgcaggtttcttcaaagcctccaaagcagtgtntgtgcctt

SEQ ID NO: 1504 - DNA, 372 bp, Rattus norvegicus
  Genbank Accession No. AI059974
tttttttttttttttttacaatgtttccaatggccataatttattatctcaccacaaggcacaatacacagagctttgaaggtccaatgcagtcgtcgtggcagaacgctccgcagccttggcacatgatcatggctttcaggctgcatgcacactggagagagatgctttctactgcactgctgtcagtgaacatctgtagggacagtgatgcagtgtggcctgtaccaaagctggctttgtggctcagctgcaccacaccaccagcgaggcctctgggaaaggcggccgagctggaggagtaattaaagctgctgggactcagctgcagtttggaaaacttcccgtacaaagcctgcttgatgctgagtt

SEQ ID NO: 1505 - DNA, 130 bp, Rattus norvegicus
  Genbank Accession No. AI059983
tttttttttttttttttcactcaatagtattttatttaaaagttcacaattaaggcacagtaataaacaaaacacttaaaagcaacaaaagctaccttgaaagaaaaacatccagcatgtcaagggatgg

SEQ ID NO: 1506 - DNA, 442 bp, Rattus norvegicus
  Genbank Accession No. AI060052
tttttttttttttttttcagttgggatatgctttattctaacgttgtttgactatgaacaaaataaaaatagacacagagacatctggtgactcagtcatgcagttcgcacacgtgggtactggtatccactctcttttgcttggccagctcttggatggttgctatctctccagcagtaaacttcggagtgagagtcacattgtcataatcaaagtcttcatcaagaaagaatggctgaacttcatctccaagtatctcttcagtttgcgtctgagttcttcccacagcgggcgttggcttcccctcagaggtgagtggcaggtccacagaaggaacataagcaggagcactgatgcttatactctgttccacctcacctggaagtaccatccaatccttgttcatctggggcttactctcttcctccgtgtccacatctt

SEQ ID NO: 1507 - DNA, 250 bp, Rattus norvegicus
  Genbank Accession No. AI060071
tttttttttttttttttgctgggcctttgcttgtttattttgcttcccgactcttctcttggggttcagagccactgaggggtggggcaagtccaggcaaggagtggaggttggaggaagatgcggaccacacaaacagcgccactgtacacattaccacaggcagcacgaatgaggaccacatatgcctagcatggcacaaaaggaggccaagtcagtcacagacacaaacattggcaaaggtggggga

SEQ ID NO: 1508 - DNA, 261 bp, Rattus norvegicus
  Genbank Accession No. AI060127
tttttttttttttttctggatcactggtttagttctctgaacaacaatgtgttgtcttcattttacaagaccagagaggtttaagtacattgctgtacatcatcctgtggggggaatgctggtaggacagaaggaaccagcagggcagatgacacactcccatctgacaaaaaggcctcaagttcctgaggctgtccagctcagggggaagaaaggcaataaaggaaaacccttcttgaagcatggaagcagggtatccca

SEQ ID NO: 1509 - DNA, 431 bp, Rattus norvegicus
  Genbank Accession No. AI060136
tttttttttttttttttccactctctggtttacttcttaccgagaatcgagaaatccaactacaatgacgaagaaagaagacagggagatcttaaaagacacaagatcttaaatgaaaacaaaaagtagtaacaaaatcttttgtaaaaaagagtccttcaatattccctgtaccccagcgtccttccccagcaaccaggtcatgtgagtgtgattcccacagaggccagtgcttcaatggcccaggcaggacagaggctgtggtccccatacatggtccgcatgaagttccgcacgaagtcgggaaagcgctgttccaagatactactgcgcgcggcgctcaggagctgcagctgataggcaatgttgtgcacggtgaggtggtgcagcgctgcggtgttgtcactgtgcagcagggtgtgcaagaaggc

SEQ ID NO: 1510 - DNA, 385 bp, Rattus norvegicus
  Genbank Accession No. AI060149
tttttttttttttttttagtattattttctatatatttatagacttgaattatttgaggttttggcgactagtgccctcagcagcagagatttacgtcactaatattttatcagcacagtaacaccacacagctgttccctttacatctgctaccaggaggaaaagaacggcttcctgcagtggaccgtctgggtaaaggagctgcccaggtgtacaacacgcccctggccaccacttttgctgcactccacgatcacgcatggcatctgtgccagctgcataggactcttgccatctctcagcgcctgagtgaggtttaagatctggcctctcatcacagacatctgactttcaaaagcagctctgtcaaatcctttgtcagtc

SEQ ID NO: 1511 - DNA, 422 bp, Rattus norvegicus
  Genbank Accession No. AI060178
  misc_feature (1)..(422): n = a or c or g or t
tttttttttttttttttcaaggtaaaataattcattaaaatctgaagttaaaggtctgaggtgaagggctaagttcccgtgccggggagctgttaagccattatttataagatgaggccctggctaccagccaggagacccgaatccaggatggcttttctcttatctcgatttgtctttgccacgacattcacctcctttgagttcagcttttccgtttgtaaaacggacaaacagcctgtttccctctttagcatccggagtctgatccgtangaaaacaaaaagcaaaccaaccaaaatgctttggagaggtaaacgcactgggccgaggtgaagcatcactccagccgcctgcggggtgggctgggctctttgcaaggccttgacgtcctccaaccgcccgggggcgctcgctcccgg

SEQ ID NO: 1512 - DNA, 541 bp, Rattus norvegicus
  Genbank Accession No. AI060196
ttgttttttttttttttgttctcaaccatttaatttattgaaaggagatgctgctactcagcggctgctagtcttttgtttacatagagtctggttttgtttgttttgctctgtgctgggaacataaataaagttttctacattattttcagtcataagttgtgctatagtttcttttctgctgtaacatgctgcatactgtccttgtaaaatctctcttttcaccatgggaaaaaatgcaagctttttggctcctctcaacatgcatgattatttaagtgaagatgttcaggagtcaacagcttaaaatgcagatgaggtccataagcatggtgctttctttctcaggttcacagaagtagtcctcctccactgaattccattctctcagggggttcaataaaggccagccaatctgatgcatgtgtaggcaacagacccatggactggcacttgtaaacagccaatgccaaacccatcaggttcccaatgagatagaccaaaccttgaagaaactctgacttgaactctccagcatctt

SEQ ID NO: 1513 - DNA, 501 bp, Rattus norvegicus
  Genbank Accession No. AI060213
tttttttttttttttttagatgttacttatcattttcataggacttccattttcagtgtgggggcaggggctgaatgaactcagggcctcacactagtcgtgtgctatatccccagcccacattttaatttttacttaaattgtaatacacacttaatttagaaaaaaaaaaaaaccttccaggaagctatagaaaaggggaaaaaatggatcttgtaatccactgtccttgggtcatcaggcttgaagcttctgagctctctctcatctagctggtgttttgtcggtgggtcatgaacataaatgccagacactcagaggaacaggaagtgcaaaggctcggtggtaggatcatcggggacctttggggcttgataggaaactccagagcagcaaggaggatagatatagcaagtaataatttaaaacaacgacaacaataatctatgcttaagccggctaagcaccggcaacgcagtctcccctcccccatcgggagtc

SEQ ID NO: 1514 - DNA, 528 bp, Rattus norvegicus
  Genbank Accession No. AI060238
ttttttttttttttttagatttaccaaagtcactatagacaaattccgaaggaatatataccctccaattttgtggactatgttcatagggaggcctttatggctgatgtcaggtaatataaccttgcagttctaagaattgttccattggtggagacctgaaatgggtggtttcagttgtagcagtgatggtctaggtaagttggcatcctctaaccaacccccatgtttgtatatctctgtatgtatttgttatattttatgtttatgtgctgtccatggtctgattcttttatatttgttgcactatctgccctgcccaatgataattttctccaagttccaaagtgctggacaagagtttcacgttccccaggttttgttttgttctgttctatttcattgtgtgtgtgtgtcaaccattgtcagtctactagcattttaacaaataacgaagattattggaacaacacagacgtgtgaagtgatgtgaattgccgtagcccatacaagtgcctaatgtgcact

SEQ ID NO: 1515 - DNA, 515 bp, Rattus norvegicus
  Genbank Accession No. AI060271
cggccgcctggcccgcgggtcgggcttctccagcggcggggcctccggccctcctccgcactctgtggctcgtgacggtcgccgcgggacattgtggggctgctgcctctggcgctgtcggaggcgaggagacgcccaagtgtgaggacctcagagtgggacaatatatttgtaaagaaccaaaaataaatgatgctacgcaagaaccagttaattgtacaaactacacagctcatggcttgttaaagttttgcactgtgggattttgcggaattgggagcctaattgatttcgtccttatttcaatgcagatcgtcggcccttcggatgggagtagttacattatagactattatggaaccagactcacgagactcagcgttactaatgagacatttagaaaaacacagttgtatccatgagtgtttgaaagaggaacagatttgagcctccctgatttcaatcaagagccctgtgtgtggaattccagatttccttttcctttagtatcactt

SEQ ID NO: 1516 - DNA, 354 bp, Rattus norvegicus
  Genbank Accession No. AI060282
  misc_feature (1)..(354): n = a or c or g or t
tttttttttttttttttgaacatgaagatacatttattttgggagtagttttttacaaagataaaactattaacattaaagtgattttcccccacagaaatcgtaagttcttatgaagtacgaacattctcaggacgttaaggcacgcaggaaacacaatgggtggctgtctccttggcttagagcctggcttgcttcttcaaagattccttcaccttcttgataaaagaagagtccccagctcccacaggccagttgtcatgatctggtatcgtgaagttgcgagtgtacagagcctggcctccgtccacattgattaactgtccagtgatgaaggatgctgcnggggacagt

SEQ ID NO: 1517 - DNA, 390 bp, Rattus norvegicus
  Genbank Accession No. AI069920
tttttttttttttttttcttagaaaggaaagcatttaatgggcgctcgcttacagtttcagagggtcagtccattatcacagcagggagcactcgggcaggcaaactctggggttgagctttacagtctgagcccaggcagcaggggcagactgggcctggaatgggcttatagaacctcaaagaccacccacagggtcgcacatcctcccagaggccatgcctcccaatccttctaatcctatcaaacggttccaatccctggtgacctaacctccaaatatgagaccatgatcccatattcattcaaaccaccacactggtggaggcaggacacaattttaatgggctatagagtacagaggtgatgttttttttctgtcaacttgcc

SEQ ID NO: 1518 - DNA, 470 bp, Rattus norvegicus
  Genbank Accession No. AI070038
tttttttttttttttttaaagaattacaaagagtttaattcttttgacagtttaatccctttctcatttcaagaagataaagtttaaacaaaactgtcacaagtcctttgcatcatgcttacatttcagaaaacagcagcattcttatgttttttaactttactattttgagatttcaaaattacatttgtttacttattatgtatatgtggtcagaagacaactttcaggagtcaggtctcttcttccacactgtggatcccaggaattaactgaggtcaccaggccttatataaatcttcacattactgaatacatgtgtaaacattactctatcatggaaaaacatcctttgatttcactcctttcctgtatatttcataatcttctttcaaagccacacatttctttcagacatcgccaagaatacaattccttctttcattaaccacccaacatcttcagaaaaa

SEQ ID NO: 1519 - DNA, 504 bp, Rattus norvegicus
  Genbank Accession No. AI070068
  misc_feature (1)..(504): n = a or c or g or t
tttttttttttttttttaaggcttaaccagtttattggaatgtctctgtagtagaaatttttaaaaaatatgcaagcgatctgtcttgctcagcacaatactaaagtagatgtgccttagctgcgaagtcccgggctcgagtcccggctcccgcgtcgagggtcgccgccctccgctgagttacgcacagttcactgtccagcggggtgggggacgcctcgccccacccctgcggcggtgtccagaccgtctgctgctgcgtgcagaggctggctgcatgattgccaggccttggctctaaagtctctgtctcctccagcctgaggtcccctccttcctgtcttggcgaccacctgtggtgctggctcctggctccatagcccaaggggcgggcgggcgcacactcccctctcctcgtctcagtctcggtgactccgcccctcccggaaggtatcacgggtagggtagcttttgagggattgttctggggaatganggggcgct

SEQ ID NO: 1520 - DNA, 459 bp, Rattus norvegicus
  Genbank Accession No. AI070128
tttttttttttttttttaaacaaatagcttaagtattttatttgtttgcaactaagcttgttaacactatataatgaaaatgtacaaagaataatgttgcagtttttggttagatttaagtcaaagacattcattaataaggaatcttcaaatgtgaataccccagaaatgtccgcaagccagctgatcacaacaactgtctctgaatatcaccttactttggaaggtattggcaaacatttgaattaaaactcaagatttttccaaaataaagccgtaattaataaaactattctatattcaaactaaaacagttttcataaaactttcctttccaaaacaatagtaaaggaaacaaggcattttgtaaaatgtggtcctgaacaagtcacagtaaaaataaatgtatacttaactcccacctcctcaaaacagaggctgctttctgctcacagcctt

SEQ ID NO: 1521 - DNA, 523 bp, Rattus norvegicus
  Genbank Accession No. AI070138
tttttttttttttttttgccccatgagagctttactcagccagggccccagggaaaggctggttctccacatccttctggtttctagttcccacctccaccccttccagtgcagtcagagtcagtgtatggtttggggttggaaggagtgttcttgaccatggctagccaggggaggcaacacaggctcaggagggcctggagcagactgaagatactgtgcttttatctcccgtgcagctgtctggccttgggagcatgtaattccaactcttctgctcactcggggtggctgtcacaggctctgctttcctagctctgtagggtctctcttccatgtggcttgtctgctccagaatccactgccgctctgactcgttcactgccagcctgagtgtcacctcctggaagacgttgctcatagccacctgcttaaagtgtagtttctggaacatccggatgctgggttcattttcttgcccgattttggcctcaaacttggtcagacctagcttcgtcactcc

SEQ ID NO: 1522 - DNA, 399 bp, Rattus norvegicus
  Genbank Accession No. AI070200
tttttttttttttttttaaacagtaaaatagccatatcagattttattattaccaaagaaatcgggaaattatgttctctcacagacaatgaggtctttgtgtaactttaattcgtgtggctcagtctctactctattgggcctctttgagctcgttgctatagacaccatgtgtgttcagtggggcctgggaactgggcgctcaccattcctctgcatgctgtgtgcccatcctcatgggagactaccatcggctcacgggaaacagaagcaggagtcaaggaaaaataacaaggtgtatttaaaaacacacttctccagttggcattttgaaagagctaacagttgtctctgaccctcatctgtgctctggagtcctctgagactttttcttgactt

SEQ ID NO: 1523 - DNA, 377 bp, Rattus norvegicus
  Genbank Accession No. AI070274
tttttttttttttttttcttttagatcatgtgtacgaatattttaccggaatgtatttctatacatcacatgcatgcctagtgcccacggaagtcagaaggcttcagattccttagaaatagagttaggcgtgattgtgagcctccatgtgggtactgaaaatcaaaccctggtcttctgcaagagtaacaagtgccttaaccactgaaccttccctcccctgcacagcccagtttttctttaaagtagcaaatgcagaaggacctgggagtctcttatggtagctggcccatcttcagaaaaagccagactacagccggaagttcatgaagaatactgagaagccaaccagacaagttactcttctgttttcatct

SEQ ID NO: 1524 - DNA, 355 bp, Rattus norvegicus
  Genbank Accession No. AI070277
tttttttttttttttttgtgcatcaaagagaatatatttgactcctactgatggcaaggagaccaaggacattcctgctttctacctgagaatctttctttccactttgttttcctcaatggaagtgccctttgagaaggaagcacatcctggccttcaggagatgcttgcaaactcaattagagctttcattcctctgcgacttgcagcgggggaatcaccttctcaggtattccccatttctagcaggagcccactgtggagcaaaatgactgaaagaggtacataagagggagagtccacagagagagattaatcactgcaatactctcctttcttgttatactcatcaagt

SEQ ID NO: 1525 - DNA, 443 bp, Rattus norvegicus
  Genbank Accession No. AI070294
tttttttttttttttttggcactgaaatcaaaaccatttgttgagtaacgagctgtacgtgatctgaggatcgacacacactagtcgtcctgggcaccagatggccctctaactggccacaccaagatgggatgacaatgaaggggcgtgaggcggagccgtccacagatcaacctaggaaggcttcccaggaaggacacactgactcttttccaatcctttgctttttcctgtccttacctccacgcacatacttggaataccatgaattctgaaaccacatttggacataaactcagaacacacccaactcccactgaggtctttccaggctaggtgacattttcccgctgtttgttaatgtctaacctaaaaaaccaggagctgtgactgctccgagttcagagtcctctctactaggtatatatatagtgaggatcctt

SEQ ID NO: 1526 - DNA, 545 bp, Rattus norvegicus
  Genbank Accession No. AI070295
tttttttttttttttttgttattccataccagtttattttagataatgtgcttcaaaaacgttttatcataaataacctttcacatcataaaataacttagtacgatttataataaaacttctgagaatttaacatctcatcaaaatacattaaactgtggcttgaaaatatgattaacccttttcacttttcttttatttgagggcatgaagaccaaaaaaaatacccaaaatattgctacacatttaaagtttcaacaaagcaatatttggtttactttactgtaacccggccatcctaaattaatagttttctttcttgcacagttctttgtagtttttttgtcccttttgacttggatttctgtttccacacagcttcctccttcagtctcacctctctctccttctgcaaagtcatctcctagccctcctgtagttgaactcagccccttgacatcagtttctgtaatccttgcatcagcgtggggagtgactgcttgagtaactacaaaggtatttcaaaacttcagtgcaatttggtt

SEQ ID NO: 1527 - DNA, 522 bp, Rattus norvegicus
  Genbank Accession No. AI070306
tttttttttttttttttccatatctgaagtattttatttgttcacatttatcctagtcgaggttcataactacttcatttgacagtttaaaaatcattctgtaaataaaataaaaaaaaatcacagctgggacagtaaagaaaggactcggtatgtaataaagaaaggagtgttggaaaataacatcggaacaagcaggggtaacgtggacatgatcgtgaggctgagagcggagcggaaagtctcccagcgtctgtaacgaacaaaaaccaagagcagtaaacagaaataagaattcaaagtgcaggcgtgcgagctttgatggccacgccccttcaggagccagaacatccattctgccatataaagtgacaggctctgctttaaacactacgtcatcttgcagaatccctttgcggcgaacgtaacctctatagtgacttaatgggaagttggtcatacgtgatatataatttctctacagaaaatatggaagtggtaaagactgttgttttaatttta

SEQ ID NO: 1528 - DNA, 417 bp, Rattus norvegicus
  Genbank Accession No. AI070314
tttttttttttttttttctcattttggtttcgtttttaatgcattttgtcagttttcttcatttttaagtcacaaacagcaggcactgaacagcagttccccccgctgctgccggcagtcaggccccgaggttacttgaggttctaggcagatgcaacagctagggaggccccagccacaggcagcttaggagaagtgtgctgcagatggaaggtgttccgggaatccaaggacgggggcgccggggacaagcacagcttgctcccacccccaaaccaggcgcctcctaaacttccctgtctggactcttggagcagccctcactgtggccagccggcatgcagggtagtcctccagccacccttgggagcccaagttcttttccaagaccccctacttgtccctttgcctgctcca

SEQ ID NO: 1529 - DNA, 544 bp, Rattus norvegicus
  Genbank Accession No. AI070318
tttttttttttttttttcatataaaaatatatatatactttattttcaactagaaaggtgcaaacatgtaacttttggtcacactctcaacaaataaactgcctcccaaaccagtcatagtcaaagaagcagcaaacacttcctcgtggaaatctgaccagttaccctgagcaagccatttcttaataaaggccatttgttcgccaacagtgattttacatttcctactagaaatctgacttctgatccattgctttaccgtctacgtaccatatgttctgacagacagtcactcaggttacagtttccactgcagtatctcctttgttttgaatcacagacaagctttatgtcctatcgatggtgtttggagtttgaggctatcagtttaaaaattccaaaagcacttaaaacaagaacaataggcacaaacgtctttaaattaacttagataactgtacaaatatatatatttatccacaatatttacaagatccataaaaatctggcttgttaccggcaaattcacttgccacaagctgtc

SEQ ID NO: 1530 - DNA, 277 bp, Rattus norvegicus
  Genbank Accession No. AI070343
tttttttttttttttttagggcactggtaacaacagtcagggtttattgccaacaggactcaacaggaatactaggcccagggcaaaggagttggctccctcccgacgcccggaccttgccccatggttggtagccacccagggctcaaggcaggcagctggaggaagctgggcacttgtcccagaccagctgctggctttattggtggcctagatatccccacccccaacaactccccctcgggctctagaaacacaaatttattcaaagtgtcag

SEQ ID NO: 1531 - DNA, 462 bp, Rattus norvegicus
  Genbank Accession No. AI070399
tttttttttttttttttcattcataaatttattccccccctccccttgcaggaatatgtaacgctgcagtgagcaggggtcagaaccgtggacgctgctctggccctctgccctgcagaggcttcaggaaccacacaccgcaccacactgcttcctgcactgtcgctgtgggtgaggccgccacagacctcgccttctccacagacgccagggacaggtgaaggctctacagggccaggttggggacagaggcctactttcatgcttgggtgacccgaaggtgacatttcatctcggtgcctgtttcctcccaagcaagcagaacaaatattattcctacggggttctttgaggaacaacagactaacagtgaagccagtctgctggaggaatgactgacctgatggggctcagcgcccttcacctgtcttggctttgctgttaatgctgaggactgaccca

SEQ ID NO: 1532 - DNA, 446 bp, Rattus norvegicus
  Genbank Accession No. AI070400
tttttttttttttttttgtctgtagcatatctagactaaatgcagagcaatcaacaaacagaaacttggctgtgacaaactgtacatacataaatatctcttttataccacaacattcaattttcttcacataaagctttctgtgattttacctattacatccagattttctttacaccctttttacaaaaaaagtgcctttcaaatttacagcttgtacctctaaagcaacattaaaacatcatgccccaaagaaaacaacgtacaaaggaagctgccacgtaaactccgaaaaatggtgaggaggtcctaacccctccagcaggtgtgggttggtggattgtatgatactgacatggtacctgggagaggggctttcgggttgatcgagcagcaccataggaaaactgcccagatggcccagtacggagagccattggctacgc

SEQ ID NO: 1533 - DNA, 495 bp, Rattus norvegicus
  Genbank Accession No. AI070408
tttttttttttttttttccccatgtaaaacattgctttaagttttaatgtttatttccccaagacagcctagcctgtactctacttgaataaattttacaagctagttttctgctgcttctagttttaaagtttaaccatgttttttgatgacaaggaatgctgcaaaaatactctagttcaacaaagagttatgatcacaaaataatttttatccattctacagtgtttcagaattaccagttgatttttaaacacaaagtagatatagatgctaatggtggctaacctggtatgtttcttatagcaaactgttgttcatgcaacacttgtgctcaaaggggaaggcacaggatttcctacaatgagccaccttataaagagttctttttgtacaaattaatttatgacatatttaatttagtgtgcataacctcaaaactgaggtattattccaatttataaaaaccacttgcataatttttatgcaagtttt

SEQ ID NO: 1534 - DNA, 332 bp, Rattus norvegicus
  Genbank Accession No. AI070421
tttttttttttttttttaacgtttcctaatgtctgctttctttgcaactgtgagtggcgatggtcgccagctcagaccaaggcgactgtgcaaacctctgaacgaggttttcctttctgacagaagttggtctatcggggttctttctcaacagacatgatttctagaaacacagcagccatcttgtgactacgaagcaaggagcaatgagattactgagaggaggccccgccctcactgagcattgatacggcactccgttagatataatactgtgttagtcacctgctccaaggttcaggctatgcggataacaagccctcgtgccgaat

SEQ ID NO: 1535 - DNA, 435 bp, Rattus norvegicus
  Genbank Accession No. AI070584
  misc_feature (1)..(435): n = a or c or g or t
tttttttttttttttttaaggatgtgaaacacagtttattcttcgtggaaaggttgaacaaggtcaaaaaatgtccttcgagagcactgacccagccccgccctgcaggtttctggggtcagccaagcttcggggctgaagttgctgctttgggctcagccgagggaggcgagcgtggtgccgagcgtgagcagggggagcaggaggctgcgggagggtcgaggggcgggagacatggtccgcggcgtcggggcgtcgggcagtgagggctccgcggcggggcccacgccctggggtcgcgccgctgctctcttgggcgcctttgtcttctaaaggaacggaatgtgattcctagagcgcagtcgccttggaggtgagggaattgctcctggaaatgcctgtttgctcttctcttttccgtnttttgatctttct

SEQ ID NO: 1536 - DNA, 303 bp, Rattus norvegicus
  Genbank Accession No. AI070621
tttttttttttttttctgaggtccttttatttttttcaaaggacccttttaaaaatttataactacaaaacagtcgccatacattctgccataaataaaaacaaacagtaaggcaggactacataagcaaactgagaacaaatgtttttcagaaagtgtgaaaatgttttacaatcataaagccatccagtttttaaaataaaactgtggaaaacgttcaagtggcacatacaagtcaccctggaaaaggaacaagatgtggcattgttgttttgtactgttatttaaaacctaatcttgctt

SEQ ID NO: 1537 - DNA, 270 bp, Rattus norvegicus
  Genbank Accession No. AI070651
tttttttttttttttttgtgagttgtttacatttttattttatttcttagaagttttagggactggctgggaagaagtctcaaatcttttttttttcttgaaagattatgttttaatatatgagtgtctcacctacctgtgcatacatcacgcgtgtgcctggcattctgagaagccagagaagagtatgaggtcccctggaattggagctatagacagtttaagctaccatataggtgctgggaactgaacaggtcgcgcccttaacca

SEQ ID NO: 1538 - DNA, 329 bp, Rattus norvegicus
  Genbank Accession No. AI070784
ttttttttttttttcttaggaaggacatttaattggggggaggggaggtatacagattcacaggttcagtctattatcaaggtggaaggaatgtcagtgtccaagcagacatgatgctggagagagttctatatcttgatcagaaggcagccagaagactcttctgccctgggcagagtttaagcatggggtctcaaagcccatcccccctccacagtgacatacttcctcaaaggccacatctactccaaaaaggccatacctcctaacactgccacttgccatgggccaagtatatttaaaccaccgtacctttgaagatcacagta

SEQ ID NO: 1539 - DNA, 189 bp, Rattus norvegicus
  Genbank Accession No. AI070880
tttttttttttttttttcaaaaggaccacacacgttttactttatccatgtttacaagagaagtgattcacacatgaaactgggcttccttgggctgagacatggagacgacataatccaatccagtccaggcatcattagaaacccagcacaccaagatagatctgggccatcacaatggacatcata

SEQ ID NO: 1540 - DNA, 302 bp, Rattus norvegicus
  Genbank Accession No. AI071048
tttttttttttttttttggggttacacattacagattctttattttgttgacattaaaacaaacagtgaaatgcagcacagcaaatattcggaaatcccaatgtcccgtgacaagatttaaaaacagatcctgctggtgcctgggtgttagggatgaagtttcttgcaagtaggggtaaggcttttatcaggcctgtatgtcacaagacagtgtcgggtgctgctctctgtctgaaagtctacaaagccccctggctccaaggatagcacatgaggcttatgacaaaagtctgtttttagtt

SEQ ID NO: 1541 - DNA, 354 bp, Rattus norvegicus
  Genbank Accession No. AI071098
tttttttttttttttttatggagggactggttctttattcaaaatgtcacttgtcactattcagtatcaaaacagttgcactacagggttctctttctccggttggaggagtacaaacaagccaggaatctgcagggcgcccacctaacaggctgagaagaaaccacctgaacatggcaattgggtggggacacttgaaagatcagcacaccactagcccatagactgcaaagaattctcacagccagtgggttggccaaggtaacctaaccccccaaaaacaattttatattattttgaaatttaaaaagttcttttttttttttaaacataagctattcaagcctcgtgccg

SEQ ID NO: 1542 - DNA, 519 bp, Rattus norvegicus
  Genbank Accession No. AI071181
tttttttttttttttttcttcggagctggggaccgaagtgctctaccactgagctaaatccccaacccctcaccgttacattttgtgtggagcatcagtcgcgtgcctgagggtcttgcctatagagtctgtggtcatcctgttggccaacaggtattccttttgttggaccaattgcatttcccatctctctgtggtgtgatggaggtgtgagtcctggatgtaagtgcgaagagtccactgtggaatggtggctaacatccactttagctaaaatctcataatacagcaaataaaacactggggttattatgcccactatcaacattatcacgacagctgtccaccaacccatcccccagtctgcgccgtaatatggatcctttcggtgaacgcttttgttatcaggctcaaatcggacctgttgtgctgttaaggcggacactacttcattcaggttctccttcttggtgtctgtacacttgactatttgctctatgtcgcgcctcgtgccgaatt

SEQ ID NO: 1543 - DNA, 380 bp, Rattus norvegicus
  Genbank Accession No. AI071206
tttttttttttttatttacacaaattacagtatttaccacatataaatattgacagttgtcactgtaacagcagacaacttcactttcaagtgagcactttttgaaatatcacagagctccatgcctctgttcttgttctgctaccctgatggctcagtttattacatagctcaaggcggcccgacactcccagcaatccttcagcctcccaggcgctgggactaaggcaggagcctggctcagtgcccttggtaagtactctccatgagttgtgcagttctccttcagtctcatcccatagctgctatgtacaaaccaagcacaacagtaattgtgacaaaccctcaaacacgtgtgtaacagatgagaaccagcagtt

SEQ ID NO: 1544 - DNA, 565 bp, Rattus norvegicus
  Genbank Accession No. AI071243
tttttttttttctttttaaagttttaattttattcaaaaattacttcaaaacttcattaactctttacagactgtttacaatactgtcaatatcactatttctatagaaaagtattttctttacactatcgataattatgtttttacattgctttaaatatatttgttgggtaaatactacacacacaaactgacaaaaagtaatgtgcatttaaaaatttgatagttctctaatttttaaggaccatgctgtttaggaataaaaggagaaaggccagaaaagacatcacttttacacagtgatagatacgtgattaatcaatgcataaaagtatgttcaacagtagaaatataaagcctgtactaaacaggtgctttcttctgaggtttaggaattacaagtgttacaaatgcctgttacatgcacattctggcatggacatgagctaaccatcaaggagactgatcgcatgctaacactgttattttggtagtgttgaggaccatagtccatgctgtcagtttttaaggccatatgactgctaaaggtgcaaacatcacatca

SEQ ID NO: 1545 - DNA, 384 bp, Rattus norvegicus
  Genbank Accession No. AI071289
tttttttttttttttttacattcttcaagtatgttgttcggattttttatttttaagttggtaactatacacatatatatataaaaaaacaaacaaccaaaccttaaaagtgcggccaagggattttgcttaaaagttaggattaagggctacttcacaatactgaacaggattgcatggtcatcctatgggcttgatgatcttgcctccaatcctggcagttaagaaaggagcaggttcagaagtgatcatatttcagggttagcatgagaaagctagggagatgcctgtgttcttccacggcaggggaaatccaccctgaatctaaaattccaaactggaatgtggtgggacttcacagtagagttagtctggatgaggaga

SEQ ID NO: 1546 - DNA, 474 bp, Rattus norvegicus
  Genbank Accession No. AI071490
tttttttttttttttttagttataaaataaaacatttttaatggacaaagtaatcatatatatatgtgtgtgtgtatgtgtgtgagacttagcaaacaaaggaagaatgtgaagcagtttgtttttttactatttacaaaatgccatttggagtggaggtggccatcttcagtaacttgggaaatgtctttcacatgaagtggtcactgaagtgtggctcctgggattggctcagaaaggccacacactgtcctgggaggaagcatccccctctagggagcaccagaaaggctcagtcttctgtctcctcataggtagtctcgtcaaagggcctgtccagcagaggcagcggccggtggcgggagtacttcagttgcagcagatccccaacttcatctatctccttcaaagccgtgtcaagtatttctttggtatgagccgctgacaggcaaaatctggctctggactcaatga

SEQ ID NO: 1547 - DNA, 510 bp, Rattus norvegicus
  Genbank Accession No. AI071538
  misc_feature (1)..(510): n = a or c or g or t
tttttttttttttttttgggattttaaggttagttctctttaacagtctgagctcttcttttctatgaagaactcatctgaaaccagcacatttgacatggtctgggacatacactgtggtttgaaaaaaataaaaggatgattcagttatgtactaatatggtcaatctgcttgtgagaaagattctctcgggagaacacagtgctgtctgcccttcaagtgtggcactggtacaagtggcgacagcacgctgggacttctctgacgttgctacgcattcttcctgtcccagttgtcctggctgtttcctgagctggggcaggagcattctgcaagacagcccccagaagggaggagtaccttcgatgttggggcttttttacttttaacgggacacagaatggtttgtggggcanggaatcaaataggaaactgttttcttggcaaacatagttcattaacacatttaacattaaaactgcaccaagcgctggggacgtagctccaca

SEQ ID NO: 1548 - DNA, 378 bp, Rattus norvegicus
  Genbank Accession No. AI071554
tttttttttttttttttacataaagaagtttatctggatcacagttttgtaaactgaaagtcctaagtcgggtgtcccccaccccgactcttgcctggctatgtcacatcatggcaggcaggcaaatcaaagggaatgatcaaatgaagaccgacagacagatagatggactgatgtacagacagacagacagcaagaaggggctgatctttttctgcttttggacaactccttgtcaaggactagctagaatcctttaagacctacattaatcctttctgaagctatgtcaggaaatcaacagttcacaggtcagcagcggcagctcgatccacttgcaaacacttcacggatacaccagtagtctgcctcgtgccg

SEQ ID NO: 1549 - DNA, 456 bp, Rattus norvegicus
  Genbank Accession No. AI071566
tttttttttttttttttaagaaaagaaggcttatctttattatttttaattacatataggtatgtgtatctgtgtatgagtgcattgcctacagaggtcagaggtgtcaaaaaacctacagctgaagttatagatagtgtgagtcttctgacatgggcactgggtctcctggaagagcagcaaaagttcttaactactgagccatcttgtcccagccgtccctgggacaaaagtcttcaaacccattccagcctggctattctgcggtgttctctacacagcctttccagcgcagggacagggcctcaatcgtgtcccgcagcatctgtgtccagtcatctcctctccgcattggggtacagcgtgtctccttgtgctccagggccaagatctctgcgggggtctcaggagtcagcccagccgcctggactgcttctgggaatttgactgctgaag

SEQ ID NO: 1550 - DNA, 459 bp, Rattus norvegicus
  Genbank Accession No. AI071595
  misc_feature (1)..(459): n = a or c or g or t
tttttttttttttttttacaaagtgacaaacatggctcttcattatgcaaacaaaggcaataccatgttggtaaggctggactcaaaatgggatctcaagagacaataaaagagttagagctacagctctccccagattgattcttcttactcttgaggaaatagagcatttcttcaaggtatggaggtaacagcatttgcttctattaagttacagatgcatgggtggttgttttcaatcatgaaaaagaagacggtaccatttctattatactgtgttgaggttctatagttgatctgatggttgatataggaagagcaagagatgatggtgttgatgcattgaagttctcacaggggataaacatcttgcttggtggggtgaaagatcagaaactgaactanccaaacacatcacaacatatggagagccaaggtctggacttgaacagtatacta

SEQ ID NO: 1551 - DNA, 380 bp, Rattus norvegicus
  Genbank Accession No. AI071644
tttttttttttttttttaaaagggttacaaatattcagattttattataaataaaatactgttttctttttaaacataaaaaacgccaagtgttgcgctttattcctgtggggaagactgtaaagttaaggcaaacagctaaggtgaaggcacatttaaaagggccacagttagagggaaattccatggaggtgggggtaggataaaaacaatctctttaaactctgacttttcttgggtcaaaaggacagtgacagagagcagcagagaagtgggggggtctgaaaagtgtaatttttgtgtcaaggcaccgaggcctcacagggccccctgtcagggacactgccttacagccctcccaccactagggtttctcgatg

SEQ ID NO: 1552 - DNA, 332 bp, Rattus norvegicus
  Genbank Accession No. AI071662
tttttttttttttttttcatgttataaatattatttaaaaaacagatcagaacacatacatcgggtcccaagggagaggaagcagtggtagagccccaggaccaggtcaggcaagagcatgcactgatgctacagggtgaggaccctgccctcggccacccaggctgtgtccaaccagcctgtctctttcctgggagaccccttctcacactatctactggcatcatccaccccatgtggtataaactgcccgtctctggtctggggctgatggcaaggactgcactagttgtctgagaactaggggacgcttgatcaccaagagcaacctc

SEQ ID NO: 1553 - DNA, 402 bp, Rattus norvegicus
  Genbank Accession No. AI071696
tttttttttttttttttgtaataagcaaaggcgaggtttattacggagacctattacagagatctccgggccgacacgtatcccacgcaggagacagaggtgtcggccccgagaggctgggaaaaagagtatttaaaggcattcaggcggtttgcgtattgggcgctcttccgcttcctcgctcactgactcgctgcgctcggtcgttcggctgcggcgagcggtatcagctcactcaaaggcggtaatacggttatccacagaatcaggggataacgcaggaaagaacatgtgagcaaaaggccagcaaaaggccaggaaccgtaaaaaggccgcgttgctggcgtttttccataggctccgcccccctgacgagcatcacaaaaatcgacgctcaagtca

SEQ ID NO: 1554 - DNA, 501 bp, Rattus norvegicus
  Genbank Accession No. AI071702
tttttttttttttttttcacattcatagatagctttatttagcctttagaaaaatatatacatcagaaccacggttctcttaaatatttttaaattaaaagtgtgcaagtgagaggaagattgtttccacagtcagaacatcaatactgtgtatgaaggagacgggaattctgaaggtctggaatggttaagaactagggaggagcagctcgtggctgccaagtggccagtgcggatcacacccaagagactgctgtttccacctgaaaacagaattactattacatgcctagctttgagtaaaacaactgaatgctgggcagatacaaacaggcattgattaaaccaaaatttgccatttcaattggtattaacttgaatttggctacattaggatctgtcagtcatcattcaagtgctagcagatgcaataaaacttcaggggcctaaggagcttgttaatgtcatctacttcagataagtcttgcctcgtgccgaatt

SEQ ID NO: 1555 - DNA, 426 bp, Rattus norvegicus
  Genbank Accession No. AI071722
  misc_feature (1)..(426): n = a or c or g or t
tttttttttttttttttattggcaggaactttacaaaatttattctcggtatctgatgttgcaaactttagggtctttgagatatgccggatccttgtatgtaactggcataaaccccattttctgagctcgcttaatggctttagtcacttccttctgcttcttcccacaaagacctgtacattcttgtaatctacacgtttctcacacaagacgcacttcttaagaggctctttataggggttttccattgggattggcaggtcttcattgctggttacctgttcatactgtgaaaaacatcttctccatggcacagaaaccgcgtgagttgcgcgatccgtgaagcagccagtcgcggttgtcaagttcttcctcnctatacagctgcgcagagcaagcagacctgccacctcgtgccgaatt

SEQ ID NO: 1556 - DNA, 263 bp, Rattus norvegicus
  Genbank Accession No. AI071755
tttttttttttttttttaacatttgtaaaaacaattttaatgaagttatcttacaaaaaggagataccaccctgaccagacatcaaatgctaacacatgggtataccccagcttcatacatgtgttacttacttttgagctgttgaccagtagggttccataaacttccaggtattacaggctgtttccaatactcttggttgatctctataacttaatggtaagcctctattgctaatattaccacatatttgagtcatata

SEQ ID NO: 1557 - DNA, 285 bp, Rattus norvegicus
  Genbank Accession No. AI071773
  misc_feature (1)..(285): n = a or c or g or t
tttttttttttttttttncccccaaaagaaacaatttatttagaataaaacaaaagcagctcaactgtgagcccatgtttgagtgacagctacttttaagctgtgtgagccataaaaagggtttttctttacttttccagaaatcttgtgtacacagcacaaagcaaagaggtcatttttccacttaaaacaccggcattggcatcacaatagcagatacacaatgttaagctgccattttagtaaaatgcacaaaatactaaacagattagctttcttccatca

SEQ ID NO: 1558 - DNA, 332 bp, Rattus norvegicus
  Genbank Accession No. AI071911
tttttttttttttttttgtctgtgattaaagtcctttactttttagcaccacattaaacgattttacacatccagtcacttaatgaaatccaacaaactcttcaagagtccgggggatctggtcttggtagttaatgtcattagcccgaactgctcgggcagccaggcacttgaggctcatcttcatctgagttttaagtagtatttcagacaccccagttgtacttttgtctagcggagttttattctgcttgtttgtcatgtcggtatgagctccagcttccacaaggctaatgatgatggagtgcaaggtcagaaaatcactgatgggg

SEQ ID NO: 1559 - DNA, 575 bp, Rattus norvegicus
  Genbank Accession No. AI071946
tttttttttttttttttcacatcttttaaaatacttttattaaataacctacttggagaacagttacaaaatttttaagtagtaattccaagtagtaaaaggcattttcctttaaaaaaaaaaaaagacgaaaatatccttatgatttgctgctttatacacaggaatgatttattttacagtcatttgtaacatcagcctataaaattccaaacatttcttaaagtctgaattacagagtgaagttcacaatgatatgctttcctctgaagctaccatcaacagacaaaactgaactctatgataacaagtccacacagaatgaatgtacaagacaggcactttgaaccagatactgggaatcgttcacagttaatattgctttttctgaagctcatctcgtccaaggtaaccaactagtgaagccaaggtttcctggtgcagaagtacaaacaggtttggtttcaaacactcgagttgtgatacatgcaagacatggcctaactaggaaggatcttctaaaagaaaatgaagaaaccaaaagcagcccggaataaaagcatttacaagcatct

SEQ ID NO: 1560 - DNA, 450 bp, Rattus norvegicus
  Genbank Accession No. AI071965
tttttttttttttttttggcaagttcttttgaagtttattttcaaatagccagtaaaaattgacctgagttcaggatggttatgtaaaaacaaaaaacgtgaactaacagtggtggtgtaaactcatctccgagttcacacactggggaccaagtgcaacggccaggcaagattatacagggaaggagaacaagagtctcagccttcggtgagccaccatgcaaggaaagcaacagagtgtcaaacgggagaagcaacagagtctcagctttcagtgatccaccggtggcccctgagctcctgacttaacagtgcctcaacactgtcgcccaggggagagtccaaacacaaaggaactcaacagtgtcctggtgtttttgtaacacacctcttgctatatcaatatagctctgactgtcctgcaaaagaaataacttcagagggggggca

SEQ ID NO: 1561 - DNA, 335 bp, Rattus norvegicus
  Genbank Accession No. AI071990
tttttttttttttttttaaataaaaccattacaatttattaaactccatatataaaaccataggcatggcctactgtccttatatagctgtttctaactttaatattaacaaacattagaaagtccactgtgctgttataagcctggaaaagagttatcacagataacagtaagattatccctgtcctcggtgaagtaacttagaaaccgtcactcagaacaaggcttctgaatcaacgatgatgaagacataaaatagaaacactcaatttgctcacacaaatgctcacaggttctgatttgtctgttttagatttctgagacaagcctcacta

SEQ ID NO: 1562 - DNA, 429 bp, Rattus norvegicus
  Genbank Accession No. AI072034
tttttttttttttttttggaggccattcaaattgtttattccctagctctgactgcacacaccacctacaggtcgccaagtcccaggctcaaaaacgaaggcactgtgtcagagttaaggcccaggtggctctcagggatttgcctacatatcactatggcaacgggaaaacactcctgttaatgaccactaggactctgggcttccacgcagagttctctgagtacagagtaccaggcaagagcccttggctgtagtgtaaccattttgggtagccaggggttatgaggcacagaaatgccaaaccggtacctacccaaaggatagaacccccagaaggacgacggcattgctgagtctaattctgggaaacgatgggataggctcaagaaagcaccccaaagttgatcagggacccacagttgcaca

SEQ ID NO: 1563 - DNA, 279 bp, Rattus norvegicus
  Genbank Accession No. AI072036
  misc_feature (1)..(279): n = a or c or g or t
tttttttttttttttttggggttgtgcaaatgtttttatttccacatttatatcacaagttgtccacttactggaccaaatagcaaagttgctcccttctgcgtgaacacagaagtctaggtactgtacattcactaaggctccttgtttttgcaaatcgagtttatgacaaccataaggcaaacgaatctaaaggaatggttatgagtgtttccagcanacagacggctctcccctagcccagcagggcaactcacaccagtagcaccctcgggaact

SEQ ID NO: 1564 - DNA, 454 bp, Rattus norvegicus
  Genbank Accession No. AI072050
tttttttttttttttttcattttttaaaaagttctattttgtctttaggaattacatcagaaacttacatctgtaagtacagaactcaaagttaatttgtagtcgagtttaaaaagataaatagtagagtcagaaatatttaagcaagtacatcaaaccatttattaaacagggctttgtgtagcctcctgtcaagagataacctctagtgcttcagagtggagaacaagagtggctgttgttctgaagtgggtattgctgtgttgctgagtgtgatataaaactccaggctcaaatgatccacgcacttccccttctaaagtgctgaggctaaatggctcagttaattttgggacagtcaccaaggagggaatacagatatccacagaaatagtcatcagaatgatacattatccaggctttgaatacgtttctactatgaatccattttcca

SEQ ID NO: 1565 - DNA, 445 bp, Rattus norvegicus
  Genbank Accession No. AI072060
  misc_feature (1)..(445): n = a or c or g or t
tttttttttttttttttccgttataatagccatctttatttgtaaaaatccagatataaaacgtaatctttcagtctttccaggttttccttttttacaaaaacaaaaaggcacatataaaccttccccgctgtcgtccccgtccacggtgtttttcgggcagccctccccccgccccccattacagctacatgcttcattccaggacgtctggatccccacatgctttggtgctttcctaccagggtagagttccgagctccaagacttgaagtacacaaagggggggtaggggtangtgcantgtgtggcacaatgttccacggtctcgttaccttctgagataatgcccacccccttagcaatggctttggctgtgattggatggtctcctgtgaccatgatgaccttaatcccagcgctgcggcatttgcccacagcatcg

SEQ ID NO: 1566 - DNA, 444 bp, Rattus norvegicus
  Genbank Accession No. AI072299
tttttttttttttttttaaattcaaaaagtttattgcaccaaatgtcacagaaagatggatcaaaacaatacatgaatgttgttttaggaaaaagtctctgcacactgacagtcatatccactctgctgacttagaaaccagtcctatcaatttctcttaatgaaagatcaatagtaacacagctcagagttgtctcctttttaaaacactgaaatttaaacataatggaaatagaagttccagatgtccaccaaattttaacatttaaaaaattaacattcaaagggggctgcttgatttagacaagaattgtattcttctccgccaagcacaataaaaacaaagggttcacattaactaaaagaagctacggaccttttcagtttaatgaaccaagtctgtgtgaacataacacctaagagtgcatcagtgggaaactccgg

SEQ ID NO: 1567 - DNA, 356 bp, Rattus norvegicus
  Genbank Accession No. AI072348
tttttttttttttttttcccaggcagcacgggcactttatttatatgtgtacatatgtacagaggcatctgtacagcacaggaccggaagcctgctccgctatggacctaaagatgcaggactgggtgcccccgttttagttaggcctgctgaagccacaccttcagcaggacaccgggagttcgaccctgcttcgggcttcgtacctgggaccattagggaagcaggtgggactggaggagctgcactgcggggtacattctttgttggggctacggttggagtctgggggtcaggagagagtttgggggaggcgggcttaaagcgaggtccgcttaacgtggtccgctcttcca

SEQ ID NO: 1568 - DNA, 468 bp, Rattus norvegicus
  Genbank Accession No. AI072389
tttttttttttttttttcagtgtacaagaatgtttattgcagcattgtcagaagtagtacaaatccagccaacaaaacagaaacacaataccagggacaaccagaatgtccagaagtggactagctgaataaataatgtaacgtttttacaactagtacacagctatgaagaataagttacctgtgcatgtgcttacaggaagctggccgtgataaattgctaagtgaaaggatctgttactgaccatagggtatgatccagtgtaagaaccgtatgtgtacataccagacgatcaatccttggatgttttagaagcttcaagaacaaggagcaaccacctaattgttactatagctttcagaggagcgggcctggacggatttggagactgtctacactgtttggcttctggcagctaccttatttctctgaaagcaagccaaacaggtgccctcgtgccgaattct

SEQ ID NO: 1569 - DNA, 384 bp, Rattus norvegicus
  Genbank Accession No. AI072403
  misc_feature (1)..(384): n = a or c or g or t
tttttttttttttttgtggaccaagtctttattagtactgaagcctgagggaatggtattagggttcacactttggacacttgctgagttgagttcaacaaaagcctcaccactctgcctgccttctctagtataaatgaaatgaacacctgcgaccccatcatgaattgtgcagtcggagaggaagttttgtacgtcctcaattgagcaggaccagggtaggccacggagtttgaccacatagccttcacctccctcagggcccagcatcatggacacttgacagggttgatgtcacacaagcttgggcaattttttgtagcttaaagaaccaccacagatgccttctgtangaaacacagaatggaagataacaagttttcc

SEQ ID NO: 1570 - DNA, 519 bp, Rattus norvegicus
  Genbank Accession No. AI072424
tttttttttttttttttaaagagaagaactttattctttattaagataccatgctagaagttatgaagaatttttgttggaacacatttggaaaatagagtagctttagtttaataacttgcactgcagagaaaattgttaaagaaattcatatcaaagtccaagtattagttcaatgtcccgtatttgattccatgatcttcacagggaggtcttctgcaatagaatatgctcctatacagccgagatatttaaggttgcttgattttccttaccattactccactgcaagcttctggtgtaatcccacatagcaagtcagtcttcattgtaacaggtcaggaccggcctcgaccccttttccctgcccgcggcctctttgttgttgggcacctcctctcgcaccacgaacgcctcttgctgatccagggcctcctctctgtgaataaccggctctaccacggggaggagcagccccgcgacctctggatggagcagcaccccttgctcctctaccac

SEQ ID NO: 1571 - DNA, 475 bp, Rattus norvegicus
  Genbank Accession No. AI072425
tttttttttttttttttcaggtaacaggctccttccttgatttactcacagatgaaaagattaaaacatcagcagatcaaataaaactcagggcaattcataaggcactttgggcagcagcaatgggctgaaatgggagagatgagcacacactcaacccggcctaggagtgccttcgccgacagggctgtatcgcaacactagggtgtcgtgaacaggcttccagacatggtactcagtacacgacctagctggtcacgtgagtactgggtcctcgatgccgtggtcggggttgcaggtgaaagcgatggtgatggcgtagcgggtgccccagaggactttctccactcggtgcaggttctcagaacctgaagtaaagaatgagactcgaccagctctgggctccactgtcttgttggacccttcctccatgaacacaaagcgccctccaccgaagtcctctaagtaatccgat

SEQ ID NO: 1572 - DNA, 332 bp, Rattus norvegicus
  Genbank Accession No. AI072467
ttgtttttgttttttgtgtttttgtttgttttttgtttttttggttagaagctttggaattgcagttagtctatttttgaaattggtttgttattaatctttttttctttatttaaattcatttgtaattgttcatcttcaaagcttacaatctgaaggtgtccgttcctacactggtcagaccactgtccttggggcagctggggtctttgggaccctccaccgggctcgccggtccgtcggacttttggctgagatccgtgtcagactcctccgaatagtcgtctgttggcatcgagggctgaacccctgaggtgctgcatgaacttgag

SEQ ID NO: 1573 - DNA, 369 bp, Rattus norvegicus
  Genbank Accession No. AI072603
tttttttttttttttttcaaaaaacacgctagtcattaaagggcagcagatactactgagggccacagccaggaaggcagcgggtccagaggaactgccccaagcaggaaccaaagggagccccacctgcaccttcacaaacaaggcaggagctccaggagcggccaaggggcgctgtggaggagaggcagccggctttcttccctatctttagcctatttctcttccttgaacatgttttaggacaataaatttcaaaatacataccaattaaaatatcacacaccagtccttttactttatcaaaatgcctacaagaccagatgacctgaaagcctgaggtgagacagcaaggacaaaatcctttac

SEQ ID NO: 1574 - DNA, 361 bp, Rattus norvegicus
  Genbank Accession No. AI072631
tttttttttttttttttccttccgcattagtttaaaacgatgaaaaatcaggacctcagactagcatgctgtgtgaatgagagaaatgaactggacgtggacacatgaggtggggcccggatagacagcaacacgaagagatgctttagctgccaatgtgggcagcagggtgggcatggacaaacttacagcagacctgaccaactctgccaagggcctgtcaggaacacagtacaggaatcaaaaacagagacaaactgcaattctgccaacgtgtaaacaaggaaagcatttcacagattcaaagttcaagggggagtaaacgtctttaaattattttctcagttcaaccctgatttat

SEQ ID NO: 1575 - DNA, 333 bp, Rattus norvegicus
  Genbank Accession No. AI072634
tttttttttttttttttggagtctaaacttttattggtccctcagtccccaaggggttcccttcttctgagccttagtgcctcagaactctggtatcattggtctcggacaccactttgccatccacgaccttacgggtagttgtcctctggacagtttgcatggagttgctggagtccagggcgtcgttgagactgaaatcgtccccatcctccaacaagcggcggtaggtggcaatctccgcctcaagcttgaccttgatgttcaacagggcttcgtattcctgggtctggcgctgtccttctgcccgagtttgtgccagctctgattcca

SEQ ID NO: 1576 - DNA, 434 bp, Rattus norvegicus
  Genbank Accession No. AI072712
tttttttttttttttttgggaagcaactgcttttatttgacagtggatgaggaggagatgggtgtcagaagagatggggagcattttctgtcctacgactaaatgacatgaatttactgtacaatgacagtgtacatggctagggtaagtagcgtcaccaaagattagttctctcgcttacactaagtaggcacgcacatcccaccccagcaccgacttcacagtcagctgtaaagagtggcatttcactggatgcctcgagagacagttctgttggagtatttgagtttaaagactttgaaaggaaagagaatttggctgaaaagtatccttttctttagttaaatcgaaacaagtctccagtcagcacccagtcaaacacagtgccttgaactttgggtaatttgtcggacagtatactccacgccactgtg

SEQ ID NO: 1577 - DNA, 324 bp, Rattus norvegicus
  Genbank Accession No. AI072744
  misc_feature (1)..(324): n = a or c or g or t
tttttttttttttttttgttacggactccgtcttcatgttgctccccaagtggctacctcagcccctctattgtaaactaagatagggagggcctatctgggtgagggtaagcgggtccctggattgccttgggtagagaggacaggggtgacccacctggggcctaagagtgtgtggagtgactggggcctaggctgagatgttctggggggggcattgtcaggggtcatggcgacctcaccagcaggccagtgggggaggagatggggggaaggccangggtggggagaccctcagatttttatctccgtccggaaggtctg

SEQ ID NO: 1578 - DNA, 320 bp, Rattus norvegicus
  Genbank Accession No. AI072775
tttttttttttttttttaccaataagaaagttcttcattctcatgtgaggaataaaccagtacaaaaaaacccagcttacatttgacctttgctgaaaggccaagaaactacaaaatacattttaggaaaatctcttagagataaaaacccagcccacactaccccaagcccaacccactagttcccctctcttcaggcactcaacaactcagggttgctgggccttctgcaggagctgaagcagggggtcgtcggtcctgagggcgaaagtaagagtgcgccgctgataatgcttggggtcacactccaggttctcgat

SEQ ID NO: 1579 - DNA, 499 bp, Rattus norvegicus
  Genbank Accession No. AI072812
tttttttttttttttttgggagcagtaaacatttattaaatacttcctagacacatcatatacaaaagaggtagccggggcagacgtgagcctgaagaactaacacaccatactaatcactaattctatagtagagaagtacaaagtctgcacaagtaagactttataacagaattttcaatcctgcccgaaggaaaataaactatacatatagttcaatttaaaaaacaaaaacaaaactttaaaagttgtgcttaacatagtggactgctacacagcatcaagtcttagagcactgatgtgctccagggacgacggcctgacagagtgaggacctggagtgctctctgagagctcctcccagaaacgccccagcatctgcagcttgccctcctgtggcgcccactgctctgcagttgactcatatgtcttttgtctgatcgtcttcttcaagctttctgatttcattttttaaacaatttatagtttccctcgtgcc

SEQ ID NO: 1580 - DNA, 506 bp, Rattus norvegicus
  Genbank Accession No. AI072959
tttttttttttttttttaaattcaagagatatttccccacagtctttgtgtggaaaatatactccctctttcataaagtgcctaccaattaaggtgatcagtggccagtagccatctatacaacaaattatcctttttcccccaaagtaaattgcactagggtactagggtttcttccaatttgtgattttttttttttttgagccagtcagcactgcccttcctcttcctgactcccctagaccacgagctggttccctagacagcacattcagggtagacacctagctcctgccactgctatcctgtgagacacccacgtatttatttcatggaggacagagttggtcacttccggaagctccttgtggagaacatggtaggcaccttcatacatcttgagtgttttgtcctgactcggggatgattccatgagcaggtatgcacctttgctgtcgcatagccggtcagcagaaccctgcagcagcaggaacggcagtgtcagc

SEQ ID NO: 1581 - DNA, 268 bp, Rattus norvegicus
  Genbank Accession No. AI073003
tttttttttttttttttgaatatattatacatatattctagttcactggtataaccctgggccggccaggcagaagacaaatggtcaccctattgacaagtgtcccctgctctgaactggccctagcagactaccttgattttacaagacccatctccatgttctacgtacttcctggaccttatcgctccttgggtccaatccttgaaccaggacttcatgggcctgaaaggaaaagcaagccttcatcctccacctcccatcgcag

SEQ ID NO: 1582 - DNA, 242 bp, Rattus norvegicus
  Genbank Accession No. AI073047
tttttttttttttttttaccaaaaataaatacatcattttaaatctggcgtcttcacaaacatcatatacacatggtacaggagcagctagagagctgcttttacacacagcttggttgacagctagcactgaatcgcagggctgcgacacaatgctatactggtgtggtgtcagtagcaagtaattactacaaagagaatttcttggcactgatggtttaatggagcttaagtcagaccta

SEQ ID NO: 1583 - DNA, 478 bp, Rattus norvegicus
  Genbank Accession No. AI073135
tttttttttttttttttgtgagggttccacatttatttcacagggcatcagcagggcaagaagaggccacagagctgcagcaggtggctggctgccctgggctttgctgaaggccattctcagccatgacaactcaggtctctggagccagctccgacttccgggatagaccaggcttctcttaagcaacagccagagtctgctaacgtgcctgtgggattacttcagcctcctcaggctgtcccatccctgtaggcagcagcttcaggtgaccccacacaatcacatacagtttctggggaacatacaggtccggggaaccccagttttaagacacttaacagaggaggagaatttcctaccagaaacagccagaatattcttacacttgttcctgaatctttcctttctgaatctctgagggagtggagcctgtttataaaacttaggctgcatctggtcatttgtacattgtgga

SEQ ID NO: 1584 - DNA, 158 bp, Rattus norvegicus
  Genbank Accession No. AI073161
tttttttttttttttttaggtttctggggttttactcagaacaacactggctggcggtgtggcttggtttccctatgcccatgccatctgggccatcagggaccagcgccttcagcaactaagagggggaagttcgttcacactgtacaaactgtaca

SEQ ID NO: 1585 - DNA, 428 bp, Rattus norvegicus
  Genbank Accession No. AI073180
tttttttttttttttttcagtattcacaggcctttaatgcacaacttcctggtcatactccatccctgccccaagctggcagggaaggatgaagacgcatgtaggccacaggatacactcaaggagggactggagtcagactgaagcctgggcagggaggtcctggccccaggagatgagggagttgctggcttgggcaagctcagtgatggacacccggccccgctgtcggatgaaactggccacagcagccagttcctctggggttatgtagatgaacttgccccggtcgtcaatcacacctgttagagtcccctccgtcagcaggtcctggatgcggtttatggcatcctgagtccttaggcccatctggaaagccaggtcttccaaaagcacaaccttggactgcttaatatagttgatgaatt

SEQ ID NO: 1586 - DNA, 242 bp, Rattus norvegicus
  Genbank Accession No. AI073248
tttttttttttttttttaagtagctatgtttattacttttttccagcaatcttgcaagaggcagaggtgacattgaactgagtgacacgagcatgtaggtgggctggtgaggagcccgtctcttgacgcgtgccgctggcttgtcaagagtggctgcctccaactctcagtcatgtttactcttttgcttgaaggaaaagggtttcttgagggaacaagtttacctccaataatgacttatt

SEQ ID NO: 1587 - DNA, 516 bp, Rattus norvegicus
  Genbank Accession No. AI100768
atgactccttcatattgtattttgatgttctaagctattgtagatcaaaacactttattatcaagaaatacactagtgagcatattttctaatacagaaaggaaataaatgacttggctctggagacgtgtttttcttatctcatattgataatatgatacagtcacattaataagtctgaaaactactttcattctttctacacataagcaacaggcagtatgtgcaaaagtatgaattccagaagctgtggtgtgtgcatgcacactgattttctttatagtgaacagccacttctaatatctcataacagcatgtatacagacaatggtcacagatctccatcaaagccgcagtaactgaagataatgcaggcttgaaggttaacaggaagctgccgctcaagagtttccactcctcatcaaaggactctgtgggaccaacgtcttcttccctgatgcaaatgggcttgtttcaagtttctctggctactgaaatgctgctcggatgactctg

SEQ ID NO: 1588 - DNA, 409 bp, Rattus norvegicus
  Genbank Accession No. AI100882
catggcaaaatcaaagtaaactttatttaaaaagctgaagtagctggtgagagtaggggtaggagaggagagaggccctggggtgacacccctcccctcaccccacctagtgccttcttaacggatgtgagcagctggctgggatgaatcaggaaggtggagtctggaccccacagcgcatatttgcaggaacggcaatgtctatctgatgtggcttgggcaagttcaggttgtccatgaccttgataaactcctcacagctgagagtgagccgtgggttcaaagtccgttcctcctccacagtagaaactgtgagcccgtggtaatcatgaccagggtagattagacagttgcctggaagtgtgaagatcttctcgtgcactgagtggtacaaagtcttcgctcaacc

SEQ ID NO: 1589 - DNA, 289 bp, Rattus norvegicus
  Genbank Accession No. AI101099
  misc_feature (1)..(289): n = a or c or g or t
acaccattgtgaggacgcccccacttcaggcgcagcagctgcacttgtccgaagcctctttgcagatgcagccctgggagcacttcgcacagcccacggggcagcaggaacagcagcctgggggaaaaaagttgagcgtgagcgagaaaccgagttagaggcaccctggacgctctgggaaggtgcggcgggctagggaccgcaggggcgcgaagggaaagggtagagaaaataaatccaactcacttttcttgcaggaggtgcatntgcattgtttgcatttgcagga

SEQ ID NO: 1590 - DNA, 364 bp, Rattus norvegicus
  Genbank Accession No. AI101103
tcctggtgggaggaggcagcagatcaggcagatgggagggagggagacccccgggaatgtcagctgaatgccccacacgaaaactggggagcaggaatgtagggagagaccccaagtggcagaattattggtccatcataacacactgaactccaagacacttacacaccagctgggggagggagaggagggtacaagaggtgtggaaaatggggtaagggaagcaaactagactagaggggctgggaggaggcaactttggggtcctagttccccaaaagcccaagctccccaccacctgcagataatgtcgtgcaaataaaagtgtgataagaggaccaatggaaactaactctttcgaaaa

SEQ ID NO: 1591 - DNA, 537 bp, Rattus norvegicus
  Genbank Accession No. AI101130
atttaagttaaaaatatttaatatcggataaaaacattgattgacagtttaacatggcacatttcatacatagtcaaagggtaaaacattgctgggaaaatttatagtctgtttggtaatttgttgtccaaataaaagcaatgaatagtgatatatttaatgccaattattacaaaacttttagagaaaactcagttatctctaacatgttctgctaagagagagaaaaaaaaacgtatcttttaagatccatatgattctgggctaaattatcagtgcttttctagtaatctagaaatttcttcaaacagcatttcttctgttggttaactgttcttactgattggctctcgcagtagggaatgaggacatacagcacttttcacactgttcagtaaaaccatataaattaaagatgggtgctaagcttaatattttatacagaaatgtgtaatatttcatttaattggactgaatatattttatgagtacttgggtacagtgttaagtcccccaaatctgtgatgttttgtgaga

SEQ ID NO: 1592 - DNA, 416 bp, Rattus norvegicus
  Genbank Accession No. AI101157
acgtgaaccagtcccgtcaccttttattggacactagttcttggttggggtgtgaaggttaagcagatcggagcgggccaggcggttacactcggccatgcagtgttctccacagtgacccctcttcagtggtacttgcgtcgccgttcgtgtttgagttccttgtaagaaatgcagtagctgaaaaccacgtaggctgccagcaccatgttaatccctgagatgctgcctttccgaacgttgatgtacttgttgtaataccggtcatagcctctccgaaaggctcctgcaataccactgggggtgaaatcccgcatcaatatccagcttggcagctctctaagtttaacctccatgagcttcttctccttcaatggcacgatagacgccatcttgaacctggtgcccctcgtgcc

SEQ ID NO: 1593 - DNA, 579 bp, Rattus norvegicus
  Genbank Accession No. AI101205
  misc_feature (1)..(579): n = a or c or g or t
aaagttccagaaacactttatttaaaaatggagttgtaaatgcataacaaaataacgtaataaatgtaacaaaaataaataaggagaatgtattcatacaaaataaaaataacatagtaaaaggccaaatgtttataattgaacaaaactgtgtaaacaaacaataatgtaagcagataatttaatactttcttagactcctcatcttgtactctgatgtggacagactcagtaccaaacttaactaaaggggacaatcatgattactatgcatgactttttcctgaaacggactgaccctgtttcaatgttttatttgttccttcaaagcatctcacttttccttttacatctgttgaaacccttctgaagttttacttcatgaaaactgtgaatttagctttacaaggagaataaatccttttctttttttttaatttaaagaaaaatatgagatccattacacagcagacttatgttttacatcttacaaaaggttttgcatttttattaactgatccagcgtcacaggatttcttagatcctaaagtcttgaagtacagctgactttnccttaaa

SEQ ID NO: 1594 - DNA, 374 bp, Rattus norvegicus
  Genbank Accession No. AI101256
aacaatcacataaggaagcatttatttgaggttgaacatgaagtcacacaaataaaaatttgtataaacacaaatccacattgagtcataacacagggaaggaacaaaggacagattaacaaaggaactaattggcagctatgtacagtgggacacaattgtgtcatgtacactacaaagtctttacaaaataatcatcttaggtcaacagaagatcaagcaaccttcaatgtcgtcctgtaagatggtttctttacacctcctgctctcccagcgtcctcctttagtagggctggtaattgttctggtgattgccaccccctcgggatgccttgccataagtgctctgctgaccgctgtagtctcctcgtgcc

SEQ ID NO: 1595 - DNA, 662 bp, Rattus norvegicus
  Genbank Accession No. AI101380
aagttgaaaaaacaaaattactcaaagaatctctctaaatgagtcagacacaaagttcctaagatcagcaactttggcgcccgagtcaaagatgccaatgaccaagttccaagtcgtggaaagttacacattacacatcttacagccgattcctaccactgagtagttcagctgccctcctgtgccacccgagagagaaccagggctaggggagggcaggaggtgaggtaaccataacagcatacatcactcctcttctccctagacggtcactctccaaagggcagtatggacaggattaagatacgaggggcagtaactgagatgtctctttatcaaaactgtaactctgtacgaaacacaaactcacgaacatcagatgaacagtgatctctagaaggcgagaacaaaggctcactcatgcagtagaaggactggtttaagaggtctccaggctgctcaagacctgtgaactatctgatatcaccttccggctacctagagagcctttcaccgtcaaggtacatacggtatggttgtctttctccttctaccttgaagtcagtattccagctttaaagcaagtgcttatccaggcagcagtgagactccaaaggttttccaatatttattttgaggtagtgctcatttatttgcattct

SEQ ID NO: 1596 - DNA, 610 bp, Rattus norvegicus
  Genbank Accession No. AI101527
gtgtattccaaactttattaaacatatatatctgaaatatgtttacacggaggacaaacagatagatatttcaagtaacttatgggacagtcattatctgttaaaaatattctttcttccacacacacaatttttctttttacatctaaaagctggatgcaaacttgtgatgtaaactgacttcattgttaactgttgaagatgggagacacacgttcgcagctcagttaaacaacacaacaaaaagctgttccctcacacgcaaagatgccatgtctctcccagcagaactgcacactgtatgtttacgccacatcatttcttcttctttcctttccctttcttactcccctctccctgctgaagacttgggtcagcacctcctgacttctgagtccttgtttttagcttgggtatcatttctgctacgtacagcatcaccgacttacgtgatgggaactgtacaagacagaggctgccatcttcctgtttgagctgtacccgaactctgcctctatactgaacatcacgattccattctctggaatacattttgtttttctccagaaacgcattcagtccaactgctgaacatacatcctgaatctaa

SEQ ID NO: 1597 - DNA, 465 bp, Rattus norvegicus
  Genbank Accession No. AI101582
ccccattgagccacaagccattcagagtgtgcagcctggtggccattttatttctctgtaagagatcagttcaaggtgtcgtctgcaagcctaaactccatggtgatgtctccagtgagggggtgaaactccacagcatagctgactgattgagggccatccagaggcgcgctaggatccagtgtggcactgaggaagtacacagcttgcttgcagtgggggttccagcagcagtcccccttgtcctctgcagggttcatgaggccggtgctgaccgtgctatctggagtcagctggtattccatccacaggacagctccatggctcttcccgggcctcctcagttccatcacgcccctggattgcataggctgctgggggatgggctgctggaaatcaaaagtcaggatctgtcgaggctctgagaggcttctgcatgggtattcccacagtggctgtggctct

SEQ ID NO: 1598 - DNA, 485 bp, Rattus norvegicus
  Genbank Accession No. AI101695
aataagtcagcctctaggtattgcttttacaggtttatggaaattcaaggatctacaccattcacactttacacaccactcacacttccaaaaatagatttctagccagacacagcatggccttccccagtgcagtatctcagttctgtcaacctggagaagttaaaccctgtcctgggccctggcatagccctccagagtgacaccctgaaactatgatcaacagtcttgggtctgaagtcttcccaggcttaaggtcaaccagcatcaaacaatgctgacgggaaaagcctaagcatgagtccgtttgccacctcagctctccgtgtccttcccggaggttgagtgggggaggcaggtgcggctgtgggtgacgtctggttgggttcctgtaaacatccatcacaaaggtggcaagtcacaagccaggtccagggcaacggaaagctgggtggcaggcgaagcgttcggaggatctggcaact

SEQ ID NO: 1599 - DNA, 512 bp, Rattus norvegicus
  Genbank Accession No. AI101743
attaagatacagatctatgaacagaacaattatttgctagctagattacagttccttgtaaaaataatatgtgaaaaattagtagaaaatgaaaatctgaaagttatctgaatctgaaaatgttaagcaatttctgctgcacattaccgtggatcgtttcaaagaaggctggagcatgactgcgtagacagaacgtaatgattctggttttattaaagcacgcagtgggtccttcagagcttggcatagtctttcagaatcatctgtagcttctggctcagcatgatgtttcgactgaatcgtaattggccaccgctttcccgcctctccttcttatttcttccacgaccttgtctgcggcagaagagcctttcccaacgcctttgaagtcccctcctaagtcattcacaacaactaatgctcctctttctgcaaaagccagggcataagctctgcccaaccctcccccggcgccggtgaccaggaccacacgcccgtcgaacctcagaggc

SEQ ID NO: 1600 - DNA, 595 bp, Rattus norvegicus
  Genbank Accession No. AI101901
  misc_feature (1)..(595): n = a or c or g or t
aagccatagaagaatatttattgatatgggaaaatgttaacaatatacttctatatgaaatatgtaggatacaaaacagtatatacgatttaataccatttttacggaaagaaaaatagccatatatacaaaatcatgcataataaaaaataaaaactgtatacaccattcatggtcatctctttagtggactggatgtgattacaattcactggagtgattacagcatccatcactcgcctgccctgtaaacagtgtctgcttcatctgtcctgtgattagtgcttccaacagtctgtctctgacagacgccttcccaagcagcttctccgatttgctcttatatactggcatgtagagaacatttcaactgatataatatagagattgccacagcagatgcctggctttagaaagttatttggagaactagaaaattctctacataggattttctctaatagagaaaaatatgcattgatggtatgtgaatacgtaatttcaggagttagaactgaagaatttaggatctncccttccacctgcagtgaaagaaggttaaggatctcaaccccataaaacgtgattagtaatc

SEQ ID NO: 1601 - DNA, 476 bp, Rattus norvegicus
  Genbank Accession No. AI101967
gtgttgtacaaaaatacaagcttaaaaaaaactgaagttctaataatcacaaatacaaagggatctatctgggtggtgtttgggttctccgtgccccaaagtccccggataagaaagtctccatttctgatgtaaaggacaagataaaattccttattttgctaacgctgagagtgcaccattggatgggtgcatttgatcagggaccagcagggaaggcatctcccacaggctcggctcacaccaatctgcgcatgcaccaactctccggaacagcctcctcccagcaacagcctgggctgccccgggtttccttcgtaggcaggcgcttccagcttgtgttctctagagacaaggtgccagcacttcggtattactgtcacgtttcgatagaatttggtttatttctctattcacttgttttcaaggcaagaaaaatgtagctaaaggaacaactagccctttcttccatttct

SEQ ID NO: 1602 - DNA, 625 bp, Rattus norvegicus
  Genbank Accession No. AI102045
aggtttttaaaccggcctttattaaaacaattgtaatacaaatattccaaaaatataaacagactcttaatggcatcctacagttcaagtttttgaatacaacaaatgtatcaaatcatgaagcaaggtggtcaaggatcccatagcccagtcacagtgggaagcagacccctccccttcaaatggcatcttggaaataggcagatctggagtaatcacaggtaaggagaatcaccagcttgcagagcagagcagagcagttctgggagctgaccctgcactaaaggatggggcagctggccagacctgtgacctcttctcccctgaatatatttaactaatgatgttttctagaaagagggactggggatgtagcttagctgggagtgtgtgcttaacacacacgatgccctgggttgttcccagcacctcctaaagcagcaaggtgatcacacctgtaaccccagcactcaggaggtcagttcaagatcattcctggctaaatgtgagttgaggcccctgcttggaattcatgaaaccctgtctaggggtagaggtaagggagaaggctaagctattttaaaaaaggaactgaagagtagccccaaatggaaatggctcacac

SEQ ID NO: 1603 - DNA, 657 bp, Rattus norvegicus
  Genbank Accession No. AI102065
actgcataagtcaaagatttatatttttgggttctttctagacaaagttcttaaaagaatcacagacgaaagctcatgcataaatcacatatttcctcactaacaaaaatacaaaattgataattttaaaaagatcagttttcagtgacccagatggctgaggaaatgctgcttggcattttttttttcctgatctgacgcagaacatcctaacttgagaacaatgctgccagtcttcacttatttcagaaaaccggcagcgagggatttttgaaggaaagctggaactgaagaagtactgccccttcttgaccccaagtcaggggacacatggcactcttccacgatgttctcagttcagccagtgactcacaccttcacaagccagacctcattacgacgtccatagggcttcatgggagggtcatacccggcgcagtagtagacatcaccctggtaggtggctggtgtgccctccagggtggtacgtagctgggtggcgtgagcaacatagtcggcttccttggcataaccaccgaattgcgtagaatagacagtgatgccctcccgctcctcgattttcacgctctggtcactgggcgttggcgggctgccttgaaattggttcggaatccggaaccagactttcagtttctt

SEQ ID NO: 1604 - DNA, 651 bp, Rattus norvegicus
  Genbank Accession No. AI102073
atcaaatgaatactttattagagttgtaacacttataaaataaatttatcagattttaagaccaaccaacactttttcatttttatagctaagatacataacgagaatcttaaacgccatcatctctgttcaagtgctttgtcattcagctcacaaatgtagaatgtagttcatctccagttctaagtattcacagtcagtcagctttgggcttggtccttgctaatctagtagcaatccatttatagaagtcccaccaatacatctgaatgaattaattagttaataccacactgaacatggcctgttacaccttgggaaaaataaaacctccactaaattctagtgtactacactttagtgattccaagtacaatgtacaatgtatctttatggcacatttgtgacttcatagtattcataatacaggtttcaggtgtgtggtctggagctggaaaaatatgaaggaagtcaggcattttagaagagataagacatgagtgtaaggccataagactggtttcatcacgcaacatatagaaatatatctcttcttcagctgtgttacaaactgagcttctagttggttcttcttctggaggagtattagataaacagcacttgatcactgggcattggttatgttattca

SEQ ID NO: 1605 - DNA, 597 bp, Rattus norvegicus
  Genbank Accession No. AI102076
tttattgaatacagtgccaggtttataaataaaacttatttacagtttccatagagttggtcccccgtcagagaggtggttaaatctccaagacagtttatctcaagatatacacaacgtccaagtacatctccttttcagacagccacagtgaagggtgacttcggtaacagaaggaccaccaccatccttgctataggtgtttaatgaacattgcaggtctaggggaagagcacacatccctgatttctaactcaaggggagagagagcaaataatctgtctcctactggacaacttcaaggggtgttgaagaaaataaataggtggttgccagccgagtgggtcggttgagacacatcagtgtaactctggtcgctgccaaagagaaatacacgcaggacacacagtcaatcattcaaatggttaaggaaaccgaactaagagttgacttgaccaaatttacagtcttcattcaagaagaagctcccaggatgctgaggggtgaatggtagatgctatccctctcgtgtgacagaaacactaggcctactggacagccattccgtacaatattggttacaagttggagacatgc

SEQ ID NO: 1606 - DNA, 600 bp, Rattus norvegicus
  Genbank Accession No. AI102080
caaatgtccatacgattggtttaatttgtttcagcaggagaaaaaaaagaataaagttacaagattcttttaatatttccacaatgttaaactaaaactgagctctaggctatgtgtgtaagtcaatctaggacacaaagggttaaataagatttcctctttaagatacaagaatttcagcttcccttacatttaacaaacttcacagaacagatactgtagggaacaagcccttcctcccctgcccagctcccccagcaggcgtgaacctggctgcggtccctgggcacatggtccccagcaccccctcctagtgctctggggacctgagggcctaagaagggtacacggcgcctaaccgaggacggccatgtggggccagagagctgtggcttaacagcagtggtaaacgctaggcagacctgcaccgtaccctgggttgccctcgagtgaggggctggtctgggtcctgaagcaagaattaaggctggagcttctgcactgggtcccctctgctggggtgcaaactgggtgcagggtgggaagaacatgatttcctattcgctatcttggatcacgacattatacttgcagatctgt

SEQ ID NO: 1607 - DNA, 571 bp, Rattus norvegicus
  Genbank Accession No. AI102097
ggaagtcgttcactcatcttgtttattacagaaatttctagctctgcatcaagcacaacgcaatgaaatattacattgatttcttttccgtcatcacaccggcatttgcaaacacacagccaacgttgtaaataaaatatactgaagtagtgatctgaacctgaagtccaaaggggacatgtctgtgacgacagaagcctgtctctgcagtgtgccaagtgagttcacctccatgtgtgtgatcggcatttgaggacatgtcactacagagcaagtcgctcatttgcatgagcaactctgaaatgtatggcacccatatagtttcccagcatgggaccttgggacccctggggtttagtgcatatgcagataagtgacttgagagaacctgggtgcaactcccatttggccctcacaagggagcctcataggaagtgtcggcatcactgcctgtccagggctcccaaagaacttcacaaggtagagtgcggttttgtggtaggtgtgctctgttggagggtagactgatggggaagtttaaggtaaatcagaactaggttccagagtcaag

SEQ ID NO: 1608 - DNA, 602 bp, Rattus norvegicus
  Genbank Accession No. AI102103
gatggctaactaaggactttatttcaaacaaaaattaaaaattaaaaaaaaaaaaaaatgagagctatttccctgggtgtgaggaaaggatcagggtgagaaatttccccatggctaagccaataccctcaatatattagagggatcgtgtcagttcccttccttacccccatgatggggaacctaagcaagtgcaggacccacctgtcgggaatgtgggctaggggtcagcccccaaatggggacagagttgggcagcagcatggccaaacataggattaagtcctaagtaccaagaacccactcctcccatcttgctgggacccagggaaagtaaaagatggttttgtagaaaacctctgagatccccgaggggaagaaggttccagtcctcctcatgttcatcatctctgttctctggagggcagtgagtcctgggatctgtcaggtggcaatactgacacagcaagaggtggggaagccccagcaagtctggaccccatggttggctctcctaccctttggccagctctcatggttaccacatgatcctttgtgttttttgccttccatttcccttgggtaggtggttaggtaggtgg

SEQ ID NO: 1609 - DNA, 603 bp, Rattus norvegicus
  Genbank Accession No. AI102105
aaatatggagagaaaataggaaattttttaatgtcagactttttatctgaacaaaactcatttatatttcaccctatgtcagtgtgacagggtgacaaatgaattcacacatgaggacaacgatggagccttccttctccacagtgtcaacttgagcctaaaaagttctggaagattctgagacagattttaattttgaatacaccctcctaaaaagcgaggtataaaactatcttcagtttctaacttgcaaacgtgttgacactatcaatgcgtgtatttaactggtgcataaaagcctttttcctcaaaaggctggtattttactaaaattgtcacttttaaaagaaagtttatggctaagatgcttgtggctgttttcagcaggagtgtgactgtgcagggtccatcactggagagctgggcttcacgccagtcgcttcacagcgtctttcttctggtgattcaacagtgagctcttgggagtgatcagcttttatttttacaggacgtcttgctttgatgttggagcccactctggagttcactgacctgggcaaactgccttctaagaactgcagttcttgagtccaacctcctgga

SEQ ID NO: 1610 - DNA, 533 bp, Rattus norvegicus
  Genbank Accession No. AI102191
caagttttgtctgtttattttacttctttcctccatgatttttggacacagcagtacaaacacaagctgtgtggctgggagactgctgcaccccacctttatccagacatgtgacccacgctcccctgggctgacagcaagaaagggaggagcaaaaatgtcacatttctacccctgagtgccctagtacctgaaatgtcccccaacccagtcagctgtgagagtccaacaggtccccagctgaggtccaactccaggctctccaacagctggccggtgctcacggttggatcctcttgcggtataagtaggcattgctcacttggttcatgattaccaaactggtgaggatggggcacaacacagccaggtaccaggcaccaccagtgacattggcggtgaaccagagtgaacacatgcccagtaggaggctggtactacccagcaggtagcccactaacccagaagtggcatggtagagtttcagttttgccaagggccaccggggcagcaactttgggtagagcagcccc

SEQ ID NO: 1611 - DNA, 488 bp, Rattus norvegicus
  Genbank Accession No. AI102437
gaatatgaaaacttgttttaatttgtataaataagacgaagtgttctacttaaataaaaatgcatctgggtcttcttgtataacacagaattcttccatgggcatctgctgatttggaggccagcaactctgcttacaggtgtaaaccagaatcgtcccaaattccacagtgagacctagattagtactgttgagcatgctgaccagtgctggcataagctgaaactcaaacgccctctggcctccgcagccactgcagactgggacctccgagacttcaaatgtggggcaggacagaaagagaggctctccactccatgaatacctcagaatctgcccctggcaaacagagatcctcttcatgaacttgtaaaacgttggatctccactgctaactttggtcttctcgtatttttcatccccatcactgcaacccacggagagcagctgctgcatgtcaacaccttctctctgctggtactcctgca

SEQ ID NO: 1612 - DNA, 536 bp, Rattus norvegicus
  Genbank Accession No. AI102505
gagcaaggtttaaatagactttattgttacaaagggggaccccatcaagcagaaccaatatatgtggtcccagttgtcaccatggagacatcgagaggtcatgattgcagaagaggtgactggaattgaataacatgatcccagggtaagccagccaggaatgcaggaaacatgatcaaggtgggctggcaagagtggtctagtcaaaggatgagggaagacgctcccttcactcccgcttcttgtagctttccaggtgtgacaggacccagcccgcaggtagaagacaacacacgaagcaggaagtgagcccaatggtgatatccaggaccccgagctgctcccgcggcggcttcgagtggacctgagcccgcggcaccataagccgccgggccgggccggtcaggctcctcagcagcagcggcgtcagggaagacatgacggcgcggagtgaccaaggacaaggaccagccgaagcccaaggtcaggaagtcaacctagtgccgaattcttggcctcgagggccaaattcccta

SEQ ID NO: 1613 - DNA, 599 bp, Rattus norvegicus
  Genbank Accession No. AI102520
aaggtaagcaattattttatttccctggcctgacagcaattgacttcaaagtcccagaacctgatgccgacaaagcgaacatacagatagctcccaacagggaggacgctcttcatttgtagagatgaattgaaatgtcatgtgtgaatgcgattcctgatgtcttcaccttgcgtctcctccatggttgggagccctccctctggttccccaagtcccacacgcacccctcccctacccccaagtccaggtgctcccatctgctgggcttctgcctcatttcccatagacactttcatcactgtaggccacatacagaaaatagtcttcctcgtggttgtcctcatacagctgtcccatggtagcactggtgggagggatagtgttgttgacaaagaagaataaggcgtcctcaggtctcaggtggatcctcttccggattaagaagtagaactccactttaacgccatccaaactgctggcaatcataaccacattccgaacagccctattttccaagaggactccatctaaatgtccgtgcgaatgtctactgccacaactggggcggtgctatgacacctgggcggaggaaaagg

SEQ ID NO: 1614 - DNA, 405 bp, Rattus norvegicus
  Genbank Accession No. AI102562
ggcttttattattcacatgctcggtagaaaacggggtttagtaaactgggtggaggtgtacggcaagactctgagttggtccggaaattatttacacctgagggcagcagcactgttcgtcacttcaggcacagcacgtgcacttgtccgaggcacctttgcaaacacagccctgggcacatttggagcagcccacggggcagcaggagcagcagctcttcttgcaggaggtgcatttgcagtttttgcagccgcaggagctggaccaggtgcaggagccgccggtggagcaggaccagttggggtccattccgagatctggtgaatctggagcaacggggtaagctacaagaaggcagtccctcgtgccgaattcttggcctctagggccaaattccctatagg

SEQ ID NO: 1615 - DNA, 537 bp, Rattus norvegicus
  Genbank Accession No. AI102574
cccttaaaatgcaagtttattgaataaagctgagaggagcagtaaacagacaaaaaatgcatccacacctaaataaaaaatgtacgtatttacaaagttcagtaactgttaggttttcacatgcagaggttatgcacaggaaaatgttggtagtagcttttagatgtcctgaaatgctggaaagcaatggaaagacacataaacaaattaaggtttctataggtcaattaacaaaaagctacacagtccccgcttagttaaacattctggttccaatccctccttctaggcacaagcaagttgccacattctttgaaatggttcacaatgaccattagtcatgtccggctacaggagcaaagtttaaatatccttttatttaaaccacctatcccattcaggaagagtgcaacatgcctccatgaaaataagaagagaactttaaagcccagattctactcattaaaaacgtgaatggagaaaacaagtagtgtctgtgcaacacagtgcagttatttgtacagaatgttctttaag

SEQ ID NO: 1616 - DNA, 422 bp, Rattus norvegicus
  Genbank Accession No. AI102579
gttcagctcttttaatcagccagccagcttgctagcaaccagggatggtttccgctgagggaggtcctgtggagtgggaatgtggtcaccagtgacctctgtcttatccggggctgcagcatgaagctgcttgttcttcatctttgcttttgccatgttgtaatccccagaatcaaaatacttttgccctttctgcaatcttttccttaaaaagtcagaaccaccaggcttttgtcccaaatgaggataccttgcttttaactttgcttcttcagctttctctggactagttactttatcttccatttctttttgctcctccgccgacgctgcctcggggacttccgcggacatggtgctccttctatccccgtgcctacggccctcgtgccgaattcttggcctcgagggccaaattccct

SEQ ID NO: 1617 - DNA, 531 bp, Rattus norvegicus
  Genbank Accession No. AI102618
gggggggaaaaggtttattttttcctcagaagaaacagactggggaacatttacaacccacattaacttgcagttggtcctaaccctttcgggaacaggtgttaaaatgttaggtgctctacggaatgaaggtgttcaccccagacagaatgtacatggacgatgcttgaagactgcatgttttttccctgagagacgtgtaagacaaacagaatttgctgagagccatctttccaaacagcccctccctcttcacactttggaggatgtgcctcaactattcatctagtcagcactcagaccacatgctgctttccttctaaatcaatccctttcccaaccatttgaactctccaagtcttcatagccctggaccgaaaatacctactaagatcctatctgtacttcagctttcacaccttgtgagctgggaagtcaggctcctagtaaacaaaacttccataactggattatgaggccaaccttttagttaccttaacctatagggtttattcaactacataaagtgct

SEQ ID NO: 1618 - DNA, 530 bp, Rattus norvegicus
  Genbank Accession No. AI102652
gaaaactggaaacctgtttatttcactgagagaagacaccagtatcttctccacatttggaaatgcagggcactctggtcaagaggacgctgacaggaggggcatggacaccatcagttgctttctcctgtggtgaaaagcagccctgcttgcctcactgttgatccgcagggggatgcaggcatcaaggtgatacagttgctgggggcctcccaccaccaggcggttctctcctatctccagtgccagcccctgggctccatccagtttaggaaggtcaacttcagccaagaggaggtcaggggcttccaaccagaggttcaggtgaggccgctctgggccatgccgggttccgagtgagtcatgggtatccagggtccccagctcctggatccgagggcgctgctgggaacggatgctctgctgtgagatggagcccaggaaagaccggtactttaacatgcgccattcggggtttagttgtaggccatacttgtctttaaggcccttcctggcaatggtgaccacta

SEQ ID NO: 1619 - DNA, 419 bp, Rattus norvegicus
  Genbank Accession No. AI102670
ctatgacaaactttaatgactcactgtgtgcagcttgaatgacaaggcctgggaattacccacaagcctaacattcgggtggcctagcagcaccaccaccctggcctcctagaggctggtggagaacaaaaagtcaactgagagaacatgtcctggtgtgccaagcagagcacaccgtggttagtgctggtgtcacaaggacagtgatgtttacacagggtaagagacgacacacatgaaaagacataagggtaggagctgactagggcagccgtggtatctgcatgacaacatacacaggaaatgccagaggacagtagagccgcgtggtgctgggcaaggctgggtacacagacccaggctgaggaccccagtgacctgacacacccaggtggaggaaccaaactggacctcgtgcc

SEQ ID NO: 1620 - DNA, 479 bp, Rattus norvegicus
  Genbank Accession No. AI102706
ggaagcatcctaaaagcttaggagggtggacacaaaagctacagaacggacaaaaataaatatacaaatctacccagtcactggtgactaagccgccctcctgaggaaggcgacctgaagtcataaatagaagaaaaatcccttacagatcatcatccgacaccaggcacagaacttctcataacttaattttgtcctaacatataaaagctttatacacgtgacggggacagtcctgtaccctggtggcccagcttcaatccctattagtgtagagatgtgtgttaagcggtgggttacagcccagagccagtggcggacgtgaagccgagggaggggcaatcctggactcccggttgggtccataagaactgcctagttttttactatctttaattgtcatagggccctgatatagaaacctgaatggctatggagcacagacaggcagaagggaccagtgcaagtgtgcaccgtaa

SEQ ID NO: 1621 - DNA, 523 bp, Rattus norvegicus
  Genbank Accession No. AI102711
acaaagaagcaactttattactcgttcttattactcattcccagtcaggttctcttcttgctcttgccagtgactttggccggcgtgagggctggagctgtagcctggtacagagtggaggatatcttgttgatgtagtacagaccaaccatggagaagatgaagcaagtggtgacacagactcggtggatgaggccagatgcgaagagtgccaacagcaagcagaggagaatctcagggaagatttttgcttggaagcctttaccaaagaccagattctccagattattgaaggcagttagggagaagacgaaaaggccggagcccagcaggcccccctgaatggtgagccactcggtggaggccaactggcggctgtatatctgcatgccagcgaagagcagcagggacaggagggaggacagcgccaaggaggtcccggtaccgactaccatcacgccccgtccgtgggtccaatccgtgcctctggagaaagaggggagccaaagccggccctcgtgcc

SEQ ID NO: 1622 - DNA, 575 bp, Rattus norvegicus
  Genbank Accession No. AI102727
ctaaaaactgtaggctttttattcagttaagaggtagacagatgaacatggaaggctgtcccattgaatttgcccaaagttcccattccacttcattcacccatcccacactgccagaaatctcaaaagaataaccacaaccaccaggctttgtcttcctacttcttagcaacacgtccacgaactgtttgcaaagaagttactacaaacttaaattttcactgtgccaaagattctcggccctctaagaagttgtcacatgtcaacagaacctgccactagtgacagggagcagagtgccgtgactatttctatgagagactacaagggaagcttcagttacatgtttgttaaatccctgtgcacgctggggaagaagctggtgaggccaacaaagcagtatatgccatcaaatggctctgcttggctgtttaaaaagaatccacattaagttatctcacagacgacattaaaacataatggaattgatgcctgatacaaaagttgagaaatatgtacaggaagtcatagcccaagagaaaagggaccttagaatgaatcaatggaaacctggc

SEQ ID NO: 1623 - DNA, 564 bp, Rattus norvegicus
  Genbank Accession No. AI102734
gaagttagaaaagtcttttaagtttttaaattaaaattgcaccctggtgcattgattttaatttgggaactcaatccaaggcagtttctccttagtggtggccctctggccctggacacacacacacagactgggggcccgcagaatagctggaacagcaagggatgggacaatcaaatatccattcatcagagggcagccaagtcttcagttctgcacaccttgctggtgattgggtgacaagtttcagagtcaacaagaggccaccaccagcagagatgaaaattgtctaccagtaatggggtagaaagtccatgattctgaggacccttctgggaccacctcccttgggggtggagcttttcaatggctggtgtgccttctccttcccagagtagcacggctatccagctgcatgctcactccatctacgatcaccctttgttccccacaactgggcagaggtgagccttgccctttgactggaacatgtgtataggccccactctcttacaaacattagctaaatttatattcatatattattatagttatttattaaaa

SEQ ID NO: 1624 - DNA, 587 bp, Rattus norvegicus
  Genbank Accession No. AI102750
ccaagtaaccttaatttttatttaaataacctccagtgagagcacagttaagactaaccatttttctcaccccccaatacacctcacaaggaggtatgcggactgcctctcaatggaagcggccctggcctctgccccggccagctgctggagctggagcatccacagtggagcgggggttcttgatagtctcatccacagacacaatcaggcacgcagcctcagaagctgctgtcagagcgttgatgcgcaccatggctggctcccacacaaatgcctggaagttgtcagcaatgtcctcgttgttgatgtccaccccataccacatgcccccctgtgcatgtcgagcccgcagtttgttgaggatgtttgtggcatcaaagccagcgttgtcacacagctgtcgtggaataatctccagggccttggcatatgccccgatcaacatttaagagggcaatcttggggttcttatacttcttgggctgcatttcaaacccagcataagagaacgtcttcttgaacgcaacaccagccactagtcgagactcctccagggctccaccctgcaccttcttcctcgtgcc

SEQ ID NO: 1625 - DNA, 700 bp, Rattus norvegicus
  Genbank Accession No. AI102753
tgtttatttccatctttaatactagtccaaaacagactgatacccatgagcatagtttaaatgtaacaaagaaaagagttaaactatatacattaaggaaaaaggaaagaaaacctttttttataccaaccttttcctattaatgcagtttctgattagaactaaacatgtctctttctcaatttaatttaggatgaagtaatagaacttttatgatcaacttcataaactgtctttaaggagaaaacgaatttttaagtgggtgtcaccatatttaccagtgaactggctgcatggttgccttgtctccttgaagtctggctatcattagaactaacaagatcaagtccatgaggccctcggggaactcaatggctgtgacatccaaggggagggcacataccatacatcacaatgatgaaagttaatgctcttaccctctgagtccatgtaaaaaaacttattactctcattcaaactaactgaagtcaaacagttaaaaagtcagaatgaagaataaaactattttcttttcacagagaggagggacactccttcagctccatttaaagtgaattctgtgctgagtccctgctccttcagaacagtaaactgaaagtcagttattgctagcaaagctccagtggtctctttcctacctcaaagatgttccacacaaaaaggctattggtttgacttg

SEQ ID NO: 1626 - DNA, 586 bp, Rattus norvegicus
  Genbank Accession No. AI102758
ggcagtttatcaactttattagcctgaactcctccctgccagccccaggggcttgtccctgggcacagtgagcaggactgaggttagataggtttgacccctgactctggcatcttgggacagccaagccaagggaacaacaggtgcaaaagtccaaatgttggcacttcaggtgtggccggtacccagccaagccacaaggtggaccagcgcaccatggtcctcttctggcaaagggtccactatggcaacattccttcccggacagctgttaggaacagttggtgattttagccaggaactgctgtgcccaccactcatccaggtcaataggtacaaagttctgtagccggggatcaggagtgctctccacatactgcacaggccgtgggccaccgtcatcggcagggcagccatccagctgtcgctctacctgctgccaggcttcggacacaaatcggacgttctcctcgtgggccactgtgtaggtctcttgggtcccctcgagggatggggaggtggtgaggggccctcggccattcacttgattgaacacaagccttggccccggacttgcaaggggcca

SEQ ID NO: 1627 - DNA, 521 bp, Rattus norvegicus
  Genbank Accession No. AI102760
ctaatgagataaaaatattttttattttataaaacatgctgttttaagcaaattttttaaaaaataaaatgaaactccagatagaatgtatggaagacagatacttctcagatgtgatcaggaatgaagccagtagatcagcttcctccacactggtttgattggcccatggagactctacaagctggtccacccagccactgtttgtcaagcagctggatgcttgaactgtctggatctcggtaccctgtgactgtccaggacttcatttccctagctggctgagctgagagtctgggtagagctcttgtgtagaggatgagttacccaggatctattaccaagggcagtcactgcacctgggtcccttaggctttgcttctggcccactgtttgcacagtttggataaggggaatctggcagttggaacctttgcaacaatcttgctgctttccagttctattaatagcaccatctgtagaccctgagcagatccagttctggaagtggacagggtaaa

SEQ ID NO: 1628 - DNA, 523 bp, Rattus norvegicus
  Genbank Accession No. AI102771
gaagcaactttctggttttattgagtttgagaattacaaggtagatccattaactgggatgggacatcagggcaaagggatctgtggttcttcaaatgggccacattttgagtataaagagttattacctcttcctgattccccatgaatggctggcaaaattcctgtctcagtaaaaatatctcagtttactccgaatgaccatgtgctgtggagtgacagcactacaggacagctcagcaggacttgggttatgtgcctgaagttccattgtggcgagagctgtgtgactcaatacacgtcacttcacttttctggattcagtttcagtctgttcatgcacagcaaggagactgggaaacatctgtagtcacttaaatttgagaagaatcacagatgagttataatggactatctactccactgttccattatcgcagtagcttccagggctgctcctcagaacatgcactgtgggccagtaaggaaatcagaagattcagattccatcctgtgtaacctt

SEQ ID NO: 1629 - DNA, 496 bp, Rattus norvegicus
  Genbank Accession No. AI102849
gaaaggcatggatggattttatttattaccctatatctacaatctgaggtaaaatataaggaacacataaaatgcctatttctgctaccgtgtgatataatttcccatggtgaacatcgtggtgacgctactgagagcggtgccctcacaccctctaactgctgagagctgctgccttatacagtggcatcgtctgcgagctcccacgtggagccccacagagggcgaggacaccaaggtaccccactccccaccctggcaccgaggccagacaggtggttagagacaaccaaccaggcagacacaaggccagcctgactccacccagagcaccccaggtcactgcaggtcctggtggttagggagggttgagtcatccagctgctcaagcatgcacacctgaccactggcctctgaccttctggatacgcccagaaatttacttgctgcaaagtaacctcgagagagactccgaggtcagcctctccagttgcac

SEQ ID NO: 1630 - DNA, 489 bp, Rattus norvegicus
  Genbank Accession No. AI102868
agatgactcaggactttaatgttcttcatatcgtcaatcgaaaacactaacacatgaacaaccagaaaagacctcagcaaagatctggaatgtacagattgccctggttaaactacaaaaacagccatgcgatcacagtttgggggtgggggtgtaactgagttttgtttaacggtctaaccgaaaagcaaagaaacaaccatttcttctacttgtggcaagaaaagttaatcatggaactcctagatccttctcatgaagcagctttaaaagaaatcgcttctccagagcttcatcccctttgctgttaccaatgcgaaacggaatgttcatcctgcttctattctggcgctccaccggacacacataaaatccttgagaattatcaataatctcataaatcatttgggatttgacggagctgagcttctccatggctgcggacccaccattgttactgatccattccaggatcatgcccatgacgta

SEQ ID NO: 1631 - DNA, 562 bp, Rattus norvegicus
  Genbank Accession No. AI102871
tcttttgttttggtttattgtacatgctttattaaaacggtactcgtatttacagcattgcaggaagagtccctcccaaggtgctctcacagacatccagactcactcacacagacattcataccgctcggccccactcactcacaccagtgacatgtgagggtcagacccctaaaatttaggcagctgttggggaagaactgttggttttcaatctttcttagaaaagaaaaaagcacagggatgcacttggccatcacgatgctagcgatgtttgtgcactaactcatggcagttaacactgagaactcctcctccactccacacacagtgacatcagcctcagtctcagtgctgcttgtactgacttctcaattcacaggggctttcccaaaaagtaattcaagtttatggaagtgaaataaggcacaattaatattgttttgacctaacggaaggaaaggaaagaaataaaactggtttcaaaatatcttagctgggaactgttgactttaatctactggaaatcccttcttcaaatcttataaagacatttttccct

SEQ ID NO: 1632 - DNA, 585 bp, Rattus norvegicus
  Genbank Accession No. AI102905
tgaaaaaatgcttttattctttccaaagaacagagttccaaataatgatcacagttttaaagtgattaagatgctggatgaatagccaaagaatattatcaaataacaaaatctcaacaacaatttatcaaatgaaactttactgagacataagagaatatgtgttaagagttaacatggctaaaaatgagacatcacagaaatagtaagtccataaacctagaacaggcactcaataacagaagtgattaggtgagcacacactacaaaccggtatttgaagcagcttctagcaccaacacattggcaggaccagcagcgaggcaggtcattcaaccaaggcatctgggaatagggaggagatctcagccaccttctgcttctactcccttgtgacaaagggggagggggaggctcagagagctgatgttcctggtcctaagtcgcctggcccaggactgacattgaccaccggaaagtgctctattcgatttaacttgacatatttttcctactgacaggcatacgatgaaagaaaacaacaagctttatagcatagttcaggatgacatttatttcgttgga

SEQ ID NO: 1633 - DNA, 531 bp, Rattus norvegicus
  Genbank Accession No. AI102972
ccaggccatactttattttacacaagtggtggccccagagccacagggacgtgttctggagagtaggcacagtgcccaaggctgcaggagcctgacaaggggaattcatgccttctccttggtccccatgaccaaattaaaaaatatcacacagcacacactgccacacccatccccctcttccctttcagcatcagccaattcagctttctagccagacagtggctataactggatttacagagaaccatgcagccaagaaaccagagccatgaaggggagaggctttgcattgacttcctacacgcactgtcccacaggagcaaagtgactccaccaagccactgcgtggctggatgatgacaggacaggctttaagacaaggctgggaccccgtacaccatgcctggaagaccaccacttttcaggcaagatattaccagagccaaacacgaacctgaggctactgtgatgcaaagtcccttccctccccaggtcctaggcagtgcccgtggagggctggataatttt

SEQ ID NO: 1634 - DNA, 322 bp, Rattus norvegicus
  Genbank Accession No. AI103008
aggtctaattacttttatttttttaaaccccagatagaacaaagaatcattactttgggcattactaacagttgtcttttaaagttacatcaacatgtttaatctctctccatatatgtagttttctgcaaattaaaatctaaagctaacctttgttaactctcacagatggggattatggttaagaagtgggtaatgtaagctaatgggtgaaactccgaaagaatatactacacgttgtaatgtgacaagaccgcaggcggatgtggagagaaagctgtgatgatcacatctctacccatgtgagatcgaagctcatgaa

SEQ ID NO: 1635 - DNA, 461 bp, Rattus norvegicus
  Genbank Accession No. AI103059
aacactgcatatattccttatcgttctgttgatacaacatggagaactttgtaaggagaaaaaccaaaaggtgctaagagaaaaagaggtgcagaaaccaggtaagaagccaggaagaggctaagataaaccagagacaagaaaggtgggtaggtaagcatggcgatgcacacctttaatgccggaaacatttgggaagcagctagtaaatcctaggccagtctgagctacataatgaaacattctcaaaatatcaaagtaagtaaacagaaaagtgtgggtggagagaagccccctcatctgctgcaacatttaacccttgcagtcccagaagcctagacagaaagctgctgggacaccccattctggcttctcagtacaagtgagaggtcaccgataagacagatccatcaggaaaaggaatacacatgtaggagctgagacagcagccagccttgctg

SEQ ID NO: 1636 - DNA, 528 bp, Rattus norvegicus
  Genbank Accession No. AI103074
gccaaaattttatttattcatttcttgcatttgaagtactcctcgatgacatccttggcctgagattctttgccatagtccttaactacaacgcaactgcaaccaaccactttccgtggcttcccctctcgatcgattttacagaggcctacccattcccctagtttcttgttgtcatcaacctttatcaggttgatctggtgctcggcacagagcgcctccaccagcttgacatacatgggctcatcacagttggatgcaagcacgcagagatgggcttggcgcttgtctaaggctttggcagcttcgcgtatgccacgtgctaggccatcgtggatgagggcggtcttcagcacctcttgtagagcagtgttgacgtccattacacctccagcagctatgccttcctcggccatggcggtggattacgggtgacgccgaatcttgaacgcacccgagcttccgcctccgcggaacttggcgcctcgtgccgaattcttggcctcgagggccaaattccctatagtg

SEQ ID NO: 1637 - DNA, 604 bp, Rattus norvegicus
  Genbank Accession No. AI103094
gatattacttccaataagtacaatatttattaaacatatcttcagttttgttacatagtgtgcaacaaattacaatattctgcagccacaaattatatgcagagtatgaagaaactattaatcagatagtgtaatctttccatttataactctaccaggaagaactagcaaatcagatcttacatataacgtctcactaaactttatgcatggaaactgacagacactggttgtgctgtttgatacaaaatggctgaacttcatcttcagaagactaaacccaacatctaaacatgccaatataaacatcaaaacaaaatatattctaaccaaccacgggaaacgatctggtatcaggaaagcaacaaggattacacacattattttataaaccagcacacaaaggtttaaaacagttctgaaaatgaagttagctgtcttgagtcaagggaataaaaaaaaaagtcagtattgaccatttacaatctctgaccttgtggaaacggtaagaatctgttgtaatgcagctacatacagtacaattcaggcaatttgttttttcacttgggttcaaattgcgaattcattgctgtgagaaaaggac

SEQ ID NO: 1638 - DNA, 536 bp, Rattus norvegicus
  Genbank Accession No. AI103105
  misc_feature (1)..(536): n = a or c or g or t
atcagatagtcttttatttaaatattttcttgttgcttcttttttttttttcggagctggggaccgaacccagggccttggcaagcgctaccactgagttaaattcccaaccccttctcgttgcttcttaactagctgggcactccaccgcaccgctgttgatgtcatctatgatgtcatgagggtggcggccgtccacattgcagcccacagactgtgcagtacccaggatctccttgatagttccagaaagttctctggccaaagaccggtgtctcatctgccgggcaatgttgacaatctcatcaaaagtgatgtttccattgtgtttaatgtttttctgcttcttcctgtctcttggtggctccttgagggctttgatgatcagggcagaggcagagggcaccacctcaatctgggcctgtctgttctggatggtcagtttcactgtaatcctgaggcctttccagtcaccggtagccttggcgatgtcatcaccaacttttttgggagacagacccanaggaccgatctta

SEQ ID NO: 1639 - DNA, 674 bp, Rattus norvegicus
  Genbank Accession No. AI103129
tttttttttcagttccgatgcagcttttgctgcctgttatttaatttcagatggaaaaagaacattaaacctgaccagtgcaggcggtaccagcccctcggctttaaggcccacacgagcccgtgttcagcccccctggctcacatgtctgatttactgaaggcagttcaggagctgtaatacttgagaagattctcatctgtaggttttagaattttcttatctgccatattcactatccagccaggagcaagaccaaagaaaatctgccttggatccttgcgggtgctgagcattctgaagagttcgtctttcgtgacatcaggaaggacatagccatacttcatggcaagttccagtcttgcttcaggaaacttggcagggtcggccaggtacccccggtttttcgcatcggtataatagggcaccagcgcctcgggtggaagcattctctttggaatgggttgtccgcgcagaaagaatggaacaggcttgcacagaatttctagacttcttgggtcatagaaggctgtagtaacaacaccaccatttttttcaattgcagcaatggctaattctgaagccatctgcacctcaatattaacttttgcttgaaaagtatcagcacccttttcaaccagctggaccccataatcccttttaagtggctggat

SEQ ID NO: 1640 - DNA, 551 bp, Rattus norvegicus
  Genbank Accession No. AI103146
gagattgtgaagtttatagaattttaaaaattgagaactcagaggtaaatacaagattcccatttatatggtggcacgtacgcattaggactcacaagtcatggaccctgagccagcacccatctcattgtgtcggtctccttaccagggaggtgggtgtctgggaagcaggctgccacaggggagcacatgacacggtgtcacagcacctcgcccctctgcattaacccacaggtgttcaaatctcggacaccacctgaggccatcgcactctgctctagcctgctggagtacactccatcctcaaggctctccccactagaggcctgtgcccacagtttctttgatgaactgcggagtctcggaacccagctccccaacaaccgcccgcttccccccctcttcaacttcagtcctggtggtgagcatagctggggccagtggaggtgttggggatgtggagaggcttggtgttgaacaagactggggagctaagagggtacaaggtggtcctgggctcagctaggtgtctccacattgtggcttgacct

SEQ ID NO: 1641 - DNA, 499 bp, Rattus norvegicus
  Genbank Accession No. AI103212
gactttaaaattttattcataaccagtgacataaaagatttattttccacacttagaaagcacagggttagggagttgtcttcagcctgtctctggcttctactttattccttgtagcaacctgtttcctgttcttaattatcaatgtcccttgagagctacagtgccatccatgcaatgtcacaggcaaagcttggcatcatttatcaaagatggatagcctcaaatgaaccatgcaggacctgtttctaagaagtcttcctttcaggactactctgtacaacatatgagccattgccatagtcactatcaaaggagctgtgggcatatgcagtactctgagcatgggtgtttccccagaagttaaccttgaatgtagttaaaatttggcaagccctttcaaactagtgcctaccatactccatgtaaattttaatatgaaccatgggaagagaggagaacagaaaggatgggccttatcctggagaaataagacttc

SEQ ID NO: 1642 - DNA, 444 bp, Rattus norvegicus
  Genbank Accession No. AI103236
gaaaaaaatacaagagcacaaatctacttttatttatttactctccattagtttaaatccgggatgggtacagcatcacacggattctgtgtccaatggcctttgcaggaaggttgcttgggaatttggcacgaaccatgccactgtttccatgggcccgagttactttttcccagatcactctggttttgcttggtttgcctccaggagtcactggattggtttttgctttgtatacataagcacacctcttgcctaagtagaactcagtttcatctcaggcataaacaccttcaattttaagaagagccgtgtgctctctttggttccggaggcctctcttgtatccagcaaaaatggccttgcaccacaggcttccagacatacttgtttttttagaagtgctgttcccagcaggcctccaaagacgccaagcctcgtgcc

SEQ ID NO: 1643 - DNA, 590 bp, Rattus norvegicus
  Genbank Accession No. AI103282
acttttctgaaatgatttattttattttataaaatctcaacccaaaccaagcaaacacaaacccacgcttcagaaatactgggctaacattacacataggcaacccattctctgcggttttaggcaggaagattaaagccataaaatataaaaaactatttgaggtaaaagagatttcaaaaacaaaactaataatacagataaacactacttaaaacggatgggaaggcacaccttacaggcttgatgtggccagtttgtttctgtgaatgttttattgatacacagtggtatccagttctctcctgaccagaacatactgacgttttggagtctgacatcatttgttttgggggctgtgtagtgcaccacaggacactgaaaaggatctctggcctctgcccactagacataagcagcagtcatctttaaagtgacaaaaatacccctggacgttggtgaatgtctcctggggacgtgggagaagtggctgagaatggcagtgtggcacccgttattagcactcaggaaacagtgcacgcatgccggtttctaagtaactcactgcaggatattttttgtttcaaggg

SEQ ID NO: 1644 - DNA, 567 bp, Rattus norvegicus
  Genbank Accession No. AI103314
cagactactttatattttcataacattttaacatttaatagaaactatatacaataacttcactatatcttacatgaaggagccaccacagaaatttacataaattaaaagcaagaataattaaggagaacccagacctgtgaactgcttttctcagtcggttcactaggaaagggggtttatattgcccaatgatgtggagcagaggaaaggcttaaatacagctttagatacggctacagagactaagagccaacacctgaagagcaccgttcttcaccacagccaaccccgcctagacatccacgtggatctcagcccatggctcagaagtcccagtataaatgtctccaataggcactgcatctcaaaggcagggagcacctcacgctcttcctcgcaaaaaatcccaaaacttaaatactaacttgtcatcacagagacttgggttatgtttgtctacagcactctcaagccccgaaggaaacaacgtggtctgagctgtccctgttcagtgagagatgatcaaagatacacttgtctgaaaaatggagagttcaaatccaa

SEQ ID NO: 1645 - DNA, 472 bp, Rattus norvegicus
  Genbank Accession No. AI103316
ctcaaaactcagctttatttgcctccattttcccacagtctgagctcagctcatctggctttgatgggtctcagaggcccagtgttacagaggccggtcacagcctgctccaccaatccccttgctggccttgggcaaaggttgtggacgtagaaacagagcggaaagcaccagcccccgggctgaaggagaaagacgaggaggagaaatcagagttgccaggaaaggaggaagagaaagtaaagaaagggccggtgagtcgggaaccctggttctgaagctccgagaaggcacccaagtcatcaaagagctccgaaaaggggtctccactcccgaagaactcccggaagacttcctcagggctacggaaggtggccctcctccaggctcctctgcccggagtcccgcccctgcccgttctccatgattctgcgtgtggtgatgcggcggccttggacaaaggcctcgtgcc

SEQ ID NO: 1646 - DNA, 691 bp, Rattus norvegicus
  Genbank Accession No. AI103370
aaagctaaagtattttattaataatttattgtcagtaagaaaggctggctaatgatagttttcagtaaaaacctttacgagaccattgcatcacaaatatacagacactataaaaaccgtgtcgtggtggtttgggttctaaacaggtatgcagaaggtcccctttacactttccaataatgaaaaatgtttataatccgaatacagcaacccatttaagacatgtccagtaacaggttgtcctcaccccatatgtacagctacactggaccgaaatgtgtcaatgaaatgtcatacttcagtgggaaagaacggtatgaaaccctggttacatcagaaaatcggtgctaggcgacgacgctaacaccacacagatccagcagaaaacaaacacgcgatgcgtcctgaaaaacctagtaaaaaactatgggggggaaaatcaaatctgtacataaaatttacacaaagaaaacaaaattaaaataatcgaatctatataaatacatgaatcatgctaacaagacgacaggaccgatttctgtttcatcattttttaacagagacaaatctaaatacgcaaagatgctcaagatggacaggggatgaaaacccggtcaatcacagtcagttaggacactggaaatggctaacacgtcgagaggcatgtgactccgtgcaaccgtgcctaccg

SEQ ID NO: 1647 - DNA, 686 bp, Rattus norvegicus
  Genbank Accession No. AI103376
atacactatttgtttattttaggtcaaaaagtatttaggaaaagttctccatgttcaaaattaaataggaattgtcttctatatacaggaattatattggaaatatgaagtaaaagtttaattctgcagaattaaaacacaattatagtcattcaaaaagtaaaaaaaaatactgaattttttgtgttaaattcttataattttttagtaacaagtgaacttttctaacatttaaaaaagtattcttttatcaatataaaactattcaaataattatgagaatctcttacaccagaaaaattcacatgatacactcgtgaccccaagagttagatcagcagagcgagcggtgtccctgaaacaaagcgcttctccttttgtctcctccatccctacagataagccttatttcacatcatttacatagaactagaccacactctgagagataagtaactctttctttttgcctctggagctcagggacaatcctcagtcttctttcttggcgtgtctcttagcactacttggaggctctgtgccccgcttggacgctgaggaggcagaaccattggaagacggtttgacttcagctttcttttcactcaacgaaaactgctgctgctgccggccaaacagcatccgagtcaaggtgtcctcgaagggcgtgagagtcacagcagcat

SEQ ID NO: 1648 - DNA, 386 bp, Rattus norvegicus
  Genbank Accession No. AI103377
tgactttttggtgggaacttcatcggtaggatctgtttgtacagatacacatctactttttctggaggcctctttcaagtccggcttgtatcgcagttctgtgtctaggaccccagagaggacctcctctatcttctgcactatctcttcatttgggagactccttgcagaggcagctgtgtcacctgcctggttcccttcaatgggtgcattcgtttcaccattcagctggccttcactccttccactggaaagctcctgttgtatttcccggaatttactgaccacgaaagacctaaaaacctgctcgatgtcggccgccatggcgtccgctccgttctctcaactcctcctcgctagtcctccaggctcccagccctcgtgcc

SEQ ID NO: 1649 - DNA, 660 bp, Rattus norvegicus
  Genbank Accession No. AI103388
aggatcagtccagaagtaaaactctttattttcactgtccaaacatcagtcaatatactgggaaagccagcggaaaccctcgccgtagccttgcctcttgagcacactgcacatgaacacttccatggggcgggcgttcagctccttcagagtcacattcccctttcctgtggtttgcccatagagcccaaatatttcacggagtttttcttcactgattgcatctgtcctgtcaattttgtttcccaagataaggattggcacgttggatattgtctcatcagtcattaaagcattaagttcaactttggattccatgagacgagaatgatctgcacagtccaccagaaaaactattccattaattgctgggaggtaatttttccaaacccgacgtgcttgctcgtgcccaccaagatcaaaagtggtgaaagtcattccagcaatcgtcagttcttctgaagtgggatggagtgttggtacgtgctggcctagtctgtcatctttcagcatgtgaagaagagtggttttgcccgcattgtccaaacctaagaatacaagttttccagatttcttgtagagtcctaggaactgaagcacactgctgaagccattgtagatccactcaaagatgaaagacattattgatgcttacaacgg

SEQ ID NO: 1650 - DNA, 443 bp, Rattus norvegicus
  Genbank Accession No. AI103396
attaatttcattttaacattttgtcttcaacaattccagagattggtatgagaatgaggataattgaaaagtagctgatggaggctagttggccaataatgataaatgggtgttctactggttggcctccgattcatgttaagactaggaggttggctactaggattcagtaaaggatttgggtgattgggcggaatgttaagctgcgttgttttgaagtatgcaggaatggtaggaaggctaagattaggattgataagattagggctacgactcctcctagtttgttgggaatggagcgtagaatagcggccgcaaaggtccttgtcctttttatcactttttaaaaacccgtgagatgggatcaacattgaaagtggggatttttttttctaaagcaatcattacatgagaaataaatttatataacccctcctcgtgcc

SEQ ID NO: 1651 - DNA, 541 bp, Rattus norvegicus
  Genbank Accession No. AI103441
atatatatatctatatttttgtattggggggagggagtagaaaagaaagcagcccctatactgggccctattcagtggcagcttcttgttccatagggttaaggaagactttgaggaaataaaagttgtttggaaaaatccaggtgtagttgctttgtatgctgtgatgggtaggagagatgaagtgaagtgtgaaggcccctcacaccctccatcttgcctcagactatgtcctggaagcctggggcggagaaaacgccactttcattcctgcttcttggggttatttactgccacgtagtgatagaggaccacaagcaagaaaagcgacacgcccagcatgttggcgaagatggcgagctgcacgtccgtgatcatcctgtggacaaggggaaggactgagcctcggttcggacactccttgctctctcaccaggctagatccttgccaccacgatccaacctcctccgggttcgcctgtgaaacgaagcctgggagcgtctcacctgactagcttcacccgactccgaccctcgtgcc

SEQ ID NO: 1652 - DNA, 519 bp, Rattus norvegicus
  Genbank Accession No. AI103500
ggaagcttcttcatctgccatttatttttttcaaaaacaaaacaaaacaaagcaaaaccccaaaacaaaaaacctctaagtattctcaatccagtaattaaaaagccatccacacttgggtcaaggatgtgaacaatcaagttcacactcagagtcttattctcagtgtggagtgaggcatgtgtaattctgctccttcccaagaggcaccaccacagatgcccacttctggaaggttccatcccctgcaggcctggtctccacaagctccatgtcctgggtcaggtcctccccattcaactgccaggtcagggtgatgtcagcagggtagaagcccagggcccagcacctcagggtgacatcaccttcaggtctggggtgaagggtcacatgtgcctctggaccaacaaagttggcagtggaaaggaatgcaggcagtgcagggacagggtccaggtgtgcagggcaggctgggctccacagttcttcacactgaagccatagaatcacagggaacat

SEQ ID NO: 1653 - DNA, 535 bp, Rattus norvegicus
  Genbank Accession No. AI103521
ctaaaatcttaatcctttaattagtttccctctttccttctctttgcttccccgaggagagaagagggacctctgtcgcctgcacatggttcatggcccctgggtgccaggcaggtcctgggctccgggtcacatgcagccccggcaggaggcccgcgtactgctgaggtccctgtggcttggttaggtgcgttggctgggcagctcctgggagatgaagcggcgtaggcgctccaggtattgactatacagctcaatgtcgttgtgcccagcaccctccacccacagcggctccacggcctttggacagcgctcatacagtgccagcccgtgtgagaagtcgatcacctcgtcttctgtgccgtggatgatgagcaccggtgacgtgatcttcgacaccttctcgatgttagggaaagcatcgaagcagtaggtcttcttggtgtcagggaaggccacccgcatgccggaggtgagaggcgagtgcaggaccactgcagcacacttcataacgggacgccagatccactgtggg

SEQ ID NO: 1654 - DNA, 483 bp, Rattus norvegicus
  Genbank Accession No. AI103552
cgttttaaaatggctttattaaaggctagagtataaaataggaccaagttacaagctgtcagtaagaatttacgatttcgaaagtatgtatcaaaggagagggcagggtgaggaatggaaggccacccccacactggcatgtggggtgcacctggccgaggggcagattctgctgctcctgacaggaccggaaccaacccagagggcagaccagacgcacagagcctgggttcctgagggcttctgttggacacagccaccaagagcaagacacggagccctggagctgcctcccaggtgccgagcgtgggcgtgtggtagaacccagcatcatacactggcttcagccaaagagtgtgcttcagagcagagtaacgagtgtatgtcatcgtgatgtacaggggaagggaaagtgggaattacagttccggtttcctggccactgccgcatgttccctgggggaggccaagacgccagcgtaa

SEQ ID NO: 1655 - DNA, 499 bp, Rattus norvegicus
  Genbank Accession No. AI103572
gagacagacatggttacttttttatttgaagcaaaaaaaaaaaaaacccataagttttaataaatactgtggaaaacactgaccaaacaaacatacaaagtgacttcaacattaaaaaaaaaaagcaaaaaaagttctgctttataaccgttataacttattttctttttacaatatttaaatacagaaagcacttgccagcgattttgtaatactgcccaaagcatgacgctgtaccagtcagagcatatttgttggtaatgtctgagtttcatgggaaatgactgaaatggcattttcttgcagagacaaaacaaaatacttgtgaagacacagaactgggtgtcggaactaccttaatctccccttctgccccagtttaatggggacacagcttcaacacttcaaaaatgaagcgtcatcattgggggaaagaaaagcttgttttcaacaagcacggactataaaagatcaaaactgatttcttctctgaaaagaa

SEQ ID NO: 1656 - DNA, 388 bp, Rattus norvegicus
  Genbank Accession No. AI103584
attggcaaagtaaatatattttttatgaaggaccaaagaaaatatacataattgtaacatatgtacactgacttcatagaatttttttaaatttcaaatttacacaaatgtcaacgtgttattaaaagatattttatgtagatgcgcacctatgtacagtttatttacatacattcataggatgtgaaacagacctgtcgaaacaagctagttcaattggtactaatttctagacctgacgaggaatgcggatctaagtcagactgggaggcgctagctagtcgctttgcatccaccatacctgctcctttcgcttcccaccacagccaggaggttggcgtctggaggagggtgagccacgctgggtatggatggatatggctccatt

SEQ ID NO: 1657 - DNA, 478 bp, Rattus norvegicus
  Genbank Accession No. AI103602
ttaagaagatttattgacagactagtcttgcagtccagaaccgggctgacggaggctcaggaagttgtcatggtacaacccggtgtgggatccactctctacatgggacccctgttccacaaggtggctaaaacgaagaggtggggtgagcatagcttcaggaggcccatgttgggccagcttgaacttaagattccataacatgttggttcccattccttgactgtttgggacatgagagaaactcttagaaagttggtaggggtgcgaaggagcatggcgtacagcccaacagatgtcgagacccgcctggtccatcctccctcaggtcaggttgtcgtgatttgcagaaagggtagagaaccatagaacggagttagaggcaggcagctctgggccccggaacacagaagaagaagcatgccttcctggtgccctttcattctatggtggctgctgcctggttatttgcccttga

SEQ ID NO: 1658 - DNA, 568 bp, Rattus norvegicus
  Genbank Accession No. AI103616
gtcattttagggctgaattttaatagactgtaagttggaattcttacatttaaaacagaaccttaaaattactgactggttcattggttcaaaatggttttatggaaaaattaatctgtaacaaaaacttggcatcagacgcgaagactccgccattttctgagcaaagcgtacaaaggctccagggaccaagaccgagggaggggctcagacatttacaacagcaggcattttctcttcctcttcttaacaggagggggacagagaacggctcggatagcttcatcaaacactgtcttgagtcctcgctgtgtgagtgctgagcactccaggtatttgacagcaccgatctctttcgccatggctagcccctgcgggtaggtaatgggagtcagcttcttctccttcagcttctcaatcgtgtccttatcatccctaagatcaagcttcgtccccactaggatgatgggagtattgggacagtggtgtcgtacttcaggataccactttgcacggacattttcaaatgatgcatgactcacaagggaaaagcaaattaagaacacgt

SEQ ID NO: 1659 - DNA, 476 bp, Rattus norvegicus
  Genbank Accession No. AI103637
ctgcttcatctatgaactttagtgtaaaacatttatgtacaagactgttctctaattcatgccaaggcagccacatctgcatgaacatgggtatgactgtcttcaaaaccagctcttcactgtcctggctggttgctctgtcatgcagagttgcagctgtgatgatgagggtgtgcttctgtattctgtggctggcaagctatggcaggcttagaaaggcgcatgatccggcaatgtctggtcaccacttccaggtgaggaagggagggtatcgctgccattctctctgccgcccacaaccttagactttatggtccccactcgatcttcaaatgacttgaaggttgcagagttcctcatgacaggcatacttatcgagtgtcggatggagtagctgctcatatctccgaacttcctgctgatggcagagcccatggtggacagagcagctgatgttttctgccctgcctgtgaaa

SEQ ID NO: 1660 - DNA, 575 bp, Rattus norvegicus
  Genbank Accession No. AI103641
aacggtttcgtaaaattttattaacttgacctttttccggcacagtgtgtggtgtgtgaatctatgaagattcagagcccacccaggacaattgtgcccacatctcccttctgctgacttctttgggtttaagacacccaactccatactgcaatggcctccttctctcctagactacaaggcacataaggctacacggtgatctttgtttggggagctacagcagcccgatttctcagtcagggcgtgagacagaggaagaaggttgggtctacagaaaagtgatggctgttcaccccaggaaggagaggcagggtgcccctgatatgaggacatatgtggatggttacacagggtgggagaagaggccactctatctcacaaagcagaactggagcagcccctcactagagcttgatcaggaagctatgcatctgtgacagaaataaaaagtccttggaaacatacactgcagctggtgggtggaaaaggggaaggcttcattgctcaggtcagcatcaagcacatcctggagaatgtcacggctggctgggccctggatactgagcatgccc

SEQ ID NO: 1661 - DNA, 365 bp, Rattus norvegicus
  Genbank Accession No. AI103646
tccaacatcagaatggtaacgcgtgcgcgagtcaggggctcgtccgaaagccgccgtggcgcaatgaaggtgaaggtccccttgctgctggcctggggcccctggtccctggcaaggtggctgccaccagcgtcatcacaatagtaaagtccaagacagatgctcggtcatagggacacgtgcagttgccaggcaggtctttgaggggccactaggtgcgtggcaaagttggcagccccgtccctcttcctttcttttcccttcctttctactttcccttccctctttccttccctgcaaagcacaacctgcacccaggggcaccgggctgagccccttgatatcatctttgttgtcacgcctgt

SEQ ID NO: 1662 - DNA, 604 bp, Rattus norvegicus
  Genbank Accession No. AI103651
agaacaattccatgataaaaatggagacgtgaatacaaggttatgaggtttctggaatgagaaacactgagcacatcaactgaaataaaaagactcttacacacaaaagaggaactcggggagggcagggtaagcgtgggaaggcggggctgaagccgcccaagggacttgtttactcagaattcttcaaacacaaaattaggattcttgacgctggaaaagctgaagagaatgagtgtcggggatacaggggaaaaaaccgccaaaacaaaccaccctttccctagggacctagtatagtgtcttcttttgaccccagagaatacaaagctcttccggcctcttctagccgctgtcggtattcgagcttctcatagttagaagggtttacccctttgaaaccgtgcataactccccaccagcatccagcaatggtggccgtggaatcactgtctccaccatggaaaaaggctctgtgtgcgagctccttccaggaatcccctgcagccaagaaggcatcataagcaatcatgggggcatcgtgtccactgctgccaccccaacctgagtagcttacttcgatatagaactgatccttttcctt

SEQ ID NO: 1663 - DNA, 355 bp, Rattus norvegicus
  Genbank Accession No. AI103652
aagtcctccgtcctaaaggactcttttggacctaagcatcttctgttgtttacgattgagcctctcttccaggagagttttgtttggacagcatctaaggggttgtgggttggccacgaagacagggtggaccatccggtgtttaggtctaagttctgcgtttaagttctttctccagtgtaatgcacatgtgtttgtacataatgtctaaagggctatgggatgatcaggcctgctagggtataggcattccagccactgtgtggcttacatgagtttttctaatgcaataaatgtgaatatatgtgtatgtaaaaacctcgtgccgaattcttggcctcgagggccaaattcc

SEQ ID NO: 1664 - DNA, 575 bp, Rattus norvegicus
  Genbank Accession No. AI103708
accaaaagataagtagaaatttatttcaaaatttaatacaaagaatacaaacctcatggttcctcaaagacatcaaattactcttctataattttctcctaacttttgagctggcaggtagagaccatagaagaaaatgttacacagaccgaatcccaagcgttgcgtatttaagcatcactaactgtactgtattttcccaaaccatctggggagtttcgatgggattgttccagcgtgcactgaacagtagtgaattatcatttccatcctaaacccagtaagccgtctccggctgtatttcacccagctgaaagcacataagccataggacatgaaaggaactgtcactagggccagagggcctgataccttggtcagccaccaaacactcttgttgctacagcaaccagtttgcaaacagaaacgatacaggataaaccaaggctctgtgataacatcagggctaagtatccctttcaaagggtgtaatagtagcaaggtaacttagaaattctatccattggtatggatgaattttacctgagatgaggacagtgatggacattaaatgc

SEQ ID NO: 1665 - DNA, 457 bp, Rattus norvegicus
  Genbank Accession No. AI103828
gagcttcaatctcaaacctttattttgctgtaaaggggagaaaaatgattagtggggggtttgtacacaacactttcatacaaagaaatgggtgccgcaggcctgatgtccagctttcttcacatttccccattccaatgtgaccagcaagcatgttgctgttccaatgacagtgaccatgccctggtcacaccatttttaagcactcataaaacgaatacacaaacagggttttcagagccaatttttagagaacattatctagtaagcggttcacgcccagccccctgcccttgcccagttttcacttttatttccttaatgttttgactgacagtttcccctctgctcggggtttaaagcaccattcaagcccagcccacaatgtattcagcagtgcagccttagccaagtacatgagtgaggttttctaccaaacatcacaatgacctcatag

SEQ ID NO: 1666 - DNA, 576 bp, Rattus norvegicus
  Genbank Accession No. AI103911
ttgtgaaaagtttaatatcaaagcagaaaaatattacttatcaaaaatgatttccccatccattttgaagtagaaaatgatgtccccaccttttctcaagtccaagatatgaaaagaaatttagataatgacaactccaattatagatttcacaactatcttgtacaacaatctgtaatgttttattagaattcactatcaaagacattgcacctttccagtctgtgactgaatttaatgatgttcaacagtggttttattatgctaatgcttgataatatttaacagtgaattcaattacttcacattaatgtttgccaatagttattaacaattcttaaatattttaaatcaaccaacctagaagtacacaaggcttactctcaactcttctgaggggacatgaagaccgaaagaaacctaggccctgagtccaagtgtctaacccacaacaactacatcatcactggtgaactcataggtaggtacttccaggttgagaggtgcagggcccttcctgatcctgccagaagcatcatagtgtgacccatggcaagggcaatagtagccaccaaa

SEQ ID NO: 1667 - DNA, 612 bp, Rattus norvegicus
  Genbank Accession No. AI103954
atctatcatagaaaacatgtatcgtttattacatggacttagaaatcaacacaaatcaatgtcaggcactttttaagtacacactatgagaaatgtctaccaaggatatgcacattgagcaggcaacaccacagagactcactcatccatttttaggaacagtacagagttagagaattagaaagaagaaatattgcataattagcccacctgtatcctgtattacatctctccccgatttcaatccactttagggttaaatataagctctcactttgagtgttggatttcactctttcccttagcctactgtcatggtcttaaaggagcgcacctgctttaaggaacatgacacagatgttttataagaagcatcctgaatctatcacatctgaatctacagaaacacatgatggttgactgctggcttttccttccttcttcttttcctttgtgacagtctttccctttgtagtcatggtggctgatactatttatcccaggttgaccttgtatgcccagcgagtctcctgtctcagcttcctgagtgctgggattagttttaacaccactacatatggcttattttgctgtcttttaaagcccgtttta

SEQ ID NO: 1668 - DNA, 652 bp, Rattus norvegicus
  Genbank Accession No. AI103957
agcatgcctgattttttcctcctttattaaatgactgtttcaagatttaattacagttgaaggttacacgttagaaagaataagtgcattgaaggcataagagtgcttacaaacccagctcttgaaatggaggcaggaaagggacaaggattaaaaagatgggagcgatgtgacccacagtgggcagagtgggtggacatggccttctagcttggctatgtggcctctggacaagtagctatggaggaggtttggctcagcaggcagaactctccaggggtcccagaagtacagggccctgccagctagggccagctccacctctacgtccccacatacgccacctatgtgtggtgtcggctccaaaaggtgacaggaaaagttcagaacaaaaaagactcaaaagtaaaaaggctaagtgtagcagagtaatacagaaatagtatatacacaggccatggcccccaaggtggccgctggtcattccagggaccatctggtgcgaagcgaagggcctcagtacacggagctgttccggatgccacagcacagcaccatgctcagaatcatctcgaagatcataatgacagctaccacaatggctgcaattccaataaggtacagcttcccagaaaagagctcatcgattttc

SEQ ID NO: 1669 - DNA, 618 bp, Rattus norvegicus
  Genbank Accession No. AI103983
gaaacagatagtaacattttttattaaatattacagtggatcaaaaagtacaaaatatctcttgcctgctatgtgactgggaaactattggcacagaatacagtatcaaaagcagtaataagtacaatttggaaaacatacaaagttgagtgtttattgttggctcagcattcttctggtagtgtttaaaactaaacgccaaggctacccaataacctctccattgggaaattatataacatcactgggccaggttgctatatacaaatatcaccttacagagcatcaaggttacagagctggggttactcagagtgtacaatatttacagcatggggaggtttaaaaaagtataaacagccaagagattacgctgctattttttttttcagagtcctttccgccaaggggagacgagcagaatatcaatacatcgacagtcaacaccagagtggaggtgctcaaagtccctactccagcggtgtgggtctcactggggcaaaaccattcccgttactttctcagctcgggataatgagtcagatcagaccccacaggacttggctggccaccaccaaatgtaacttagtgggacaacacgagaagagagataaatgg

SEQ ID NO: 1670 - DNA, 477 bp, Rattus norvegicus
  Genbank Accession No. AI104034
ggaaacgggatctgctcaacctttatgtcccgtggggtcagcgtccctccagggcccgatctcgggcaataacagcctcttcaaacttgatcatgagtgtggtccccttgtgccagtgcgctgtaactttggcggggaagccgctgtgcgtgagcacagcctccacgatgcccgctgtgaagctggcacagttcagcgtgctgttctccttgggcacggagatgtaggtgttaatgagaggctccctctcaatgatgtagaaagtgcgggcgtcgtcgttggcctgctccagcttgtccgcctccttgccgaacagtgccttccacaccgcacccttgacgaacagcagcgcacccagcaccttggtctcacgccgagcacccttttcacgggccaccagggcatctaggactcgggcgcccacctggcggcccaaggcagccaagcgtgcctggagctctgccacatagaaaacgc

SEQ ID NO: 1671 - DNA, 315 bp, Rattus norvegicus
  Genbank Accession No. AI104035
tttccagtgggtttttattagtagttgcatcatgattcagggtcccagggtagggaccatcatatactgagggcccccttttctaacggggagaagggcaaagagcagaggaaaggtgggcggagccaggtcagatcttcccaggaaatgtgccttcggctatgcgggcatcccaggctgagacccatgagacggggcaaagggacttgtacactcgccgggaccactcccaccctcgtgccgaattcttggcctcgagggccaaattccctatagggagtcgtattaaattcggaatcatgtcaaagctgtttc

SEQ ID NO: 1672 - DNA, 394 bp, Rattus norvegicus
  Genbank Accession No. AI104104
aagggcagtgtataaaaataatttaaacatacatactagcaacaaagcaacacgactctctagttataactacaaacttgcccaagattttttttctccccaaaggttttaaatacattggagacaatgagacagacaggcatgtacacatgtacacatgtacacacacacacacacacgcgcgcacgcacgcacgcacgcatgcacacgctcacacacacatgctcacacacatatatacagctcaagtatgttttctgtgcactttagctaactgctacagctaacgtgaagaactggattcctgagtgacctcgaagtggaaccaaaccccccatcagtgtcagatgccaacttcggagaacaagacgtgatttcccctcccaatcttatt

SEQ ID NO: 1673 - DNA, 493 bp, Rattus norvegicus
  Genbank Accession No. AI104127
ggttcatcaaatttcaaatatattttactgcgttgaatatattctggtgctgtctaaaacacagccaaattagtttatcgatttacatctatcctgtaacttttggaacatcaaggtcaagataaaaaaatattaacaaaactacccaattataatcaccctctccccgggtctgagcctcgtcctgatgccacagtgccgtccttctcagcttgtgctcctggaactgctgatgtctaagtgcacttgggagccctcagctggcctcgttcatcctctcacagggcgacaccctatctgttcccaggtggcagtgaactcctttggcatcatggaagctcatgtttgttaaaggaactgactgggaaacacttaagagtagagaatgtacaaaataatttacagagtgacagatggctttacgtgtgtgttgtctgaaaacttgttgtgtggggacacacacaggaagcaatctgtcatcaaggggctgggc

SEQ ID NO: 1674 - DNA, 620 bp, Rattus norvegicus
  Genbank Accession No. AI104247
atatgtaatgactgtagtaatcagtttattacacagattaatcattcttgaacgtacaagctccagaggagcaactgggtctttaaatatacacaagtgtttccatcaaatgaatgttcacccttacatcgaaataggcctaaagcagttaaaaacataagaaaaataagagctattagctatgtattaactgagaaaccacatacaaaccaaagattatggaaaggggctaaaaggaggaaggctgaaagggcagggagatatgaaagtgttgggaacaaagtccatcacactttatgtactaacagctccagtccatttaaatgttgatcagttaaacttagaccttaaaatacagcatgtagtttactctgcttggtcataactttctcctaagctgtaggtctttcaggatgaaaggaatacagaaacagcttcacgctcttcaccatgctgttcacgactgttaggggattagatggagtccacttaaggaccatctcctatgggtcactggagctttttcctcccattcaagcacacgctgtgtacccactacccatcacatcttgccattatccaaagttaagtcaataaggaaagcttttagtctcacacct

SEQ ID NO: 1675 - DNA, 580 bp, Rattus norvegicus
  Genbank Accession No. AI104279
ggtgggaggcagtcctttaatggggtggggcacaagatagcagaacttccatccaagagccacaggaactgaagccagcgtgacgcggcaggcttttcggtaacaatagttgagatggcacaggtgaagggttgggcaaacaattcagctctggtgagctctgccacgccccactgacagcatctggtacagactaactcaggcgtggaaaacgagccaaagtccagaggcaggagcccacacgacagcacggaaggtgactcatgtgaggctgtcaatgagggagtcccgcatgctggtggcaatggtgctaggtttggcttcattcagcttgaagacactctccaccactgacagctctgtgctggtcgtgtccaggccacagaaagcacaccaatcattcactaccatcccggcagcaatcacctcgctccctcggttcacagtgcctgccacaaggggaacctgaagaagggaggacagctcatcctgatcctcgatcgaagttttagggtgcaccagacctccttgattactgaagacacagtagcttccaactaacacctggtcagcaaccgtc

SEQ ID NO: 1676 - DNA, 580 bp, Rattus norvegicus
  Genbank Accession No. AI104283
tattttatagtggttaggaacaggttcattattttcacacacctggtgtccgacgcacaaattttcggaaccacaagtatgatgtagctgcacaaagtccataccaggtaatgatgtactgcatgtgctcattccgaagggttactctggtttgacctccaatgggccctccgggtgttgtgctattgaagtctgcatcaatgaagatggggtccgttcctgttctcttggccatagcgtccaggtcccggtaataccagagactcctctctgggttgttctcaggaacaaagggcttcctgttttctgtcagcctcactatgcctactaggtctacttctcccagaacctggccttgctgcctggtctccggattcactttcttcctgggaacaaaccctctattgaccaggatggtgactcccaagtcagagcaatggaaaggagtaacaacataggccccactttcagttgaggataatctgccagcatcacgtgcctctcggacagggtccaccatggtccgaggcattatgtacaactccttggagtggtcaaaatgccccctgaccttcaatgg

SEQ ID NO: 1677 - DNA, 584 bp, Rattus norvegicus
  Genbank Accession No. AI104388
aatgagtccttccaacgtttattataaaaggtgggtagcggcggtgagagggccagagggacgggaacctagacttatttgttcttcatgtagatctttggggtctgccagttctcaggggcttccttcaggcctgccttcagccagatgcgcttcaagtctttctcaaacttgatctgcttccttttcaaacgtccttcccggactttacgtcgtagaaaccgtgtcctcttgatcagtttacggtacttgtggtggttcatcttccgccttcggatcttcagcacatttttgcactgcattggagtggcatcccagacttccctgtctccctgtttggcttcctcctccccctggctaggtggacatttgtagaattgggagggagccagagtcactgggacctcaacattcagtctgggcaacaggtattgaacagtcagccagctctctagaggactgatggccatcttcctggggaccaggaactcttcaagctctaactgggccctcttaccagggagggaggcagcccgacttgggcttgcaggctgcaaactgtaaaggggtcgaaaagcatggct

SEQ ID NO: 1678 - DNA, 530 bp, Rattus norvegicus
  Genbank Accession No. AI104399
gtcacagaacgtgtttcattattggttctttttacattccacttgcccccccccctcgaggctagagccccctcactgtcttaaaattatgacaaaccatgtttaggcccaggtgtttatttcccttatatgtaggatggttcacaaacacaatacaagggcttcggcactacagggaggggatatcccaggcctctaagagtaaaaggatcttggccttaatgtacactgaaattcagacccgaagactctgaatctctgcatcacacatccagtagggcttgggagtgaagctagagccaaggccatctaagtgacaggccaaagtgacaagaagcctacttcctgtggtccagctatgagtttccatcccaaaccaatggaaggccgttttcacccattagggcccaaagggacagctagttctactccttcccctccttaagaagccatcttggtgacatatttgattttacccattgtaagtggtaaagggattggcctggtccaactattatggcgaggtaaga

SEQ ID NO: 1679 - DNA, 636 bp, Rattus norvegicus
  Genbank Accession No. AI104479
acagaaaaccagtttattttagcaaagacgccacccagcagctacacagttcagggcaggtggcggcagcactgtgcccatgctggctttcgggcagagctgtgaccgaagaacccaacagtgcagacgactggctggtaaggcaggtgaccccaaggaaaggcacacgctatacacagctcacttctcaggacccactcagcaccagggcagacaccaggcggttcaccctgtcctacagagatgagcagagcctcacatgtactctccacagtcagcaatgatcaccttctgctttggcttcccgtccttgctgccctgcgcctcaatctgccgcaagacatccaggccgtccgtgatctccccaaacaccacgtgcttgccgtccagccaatctgtcttatcacaggtcaggaagaactgggagccattggtgtttggaccagaattggccatggagaggaggcctggccctgtgtgtttaaggatgaagttttcatcatcgaacttcttgccatagatggacttgccccctgtgccgttgtggtttgtgaagtcaccgccctggcacatgaactgggggatgatgcggtggaagctgtcatgggcacaacgtcagaccgtaagagcatttga

SEQ ID NO: 1680 - DNA, 577 bp, Rattus norvegicus
  Genbank Accession No. AI104482
gtttaaaatctttttaatatttattatatgtaagtacactgtagctgtcttcagacacaccagaagaaggcatcagatctcattacagatggttgcgagccaccatgtggttgcgagccaccatgtggttgctgggatttgaactctggacctctagaagagcagttagtgctcttaaccactgagccatctttccagccccagacatgaattcttaaggcttgatttatgaaaagttctatttatcagtgctgtgaagcaatctcatcatagttgctaagttaatccaggaaaaggctcagagaagtatgtgccattcaagtccttggaactggaactcacagtctgtccttcttgtgaggagtcttgccattgtcgtggacttcacagctttggctttctggtaacaaagctcatgattgcgttgatgcactcctctgacagccaccttgctcgtaaagtagtgcactcctcctcgttaactgcatggagcttttctttctcattgttcctgattaactctttggaaattctcatggagtttggcgggagctttcgcatatgttttcagcctggt

SEQ ID NO: 1681 - DNA, 532 bp, Rattus norvegicus
  Genbank Accession No. AI104520
cagttcaagttatttatttaagccatctcctcttacgagcaaagggatggaggagcaaagtaatggtcaccatctgataaaggaaagatgagctgagcatccaatgggctttcgtggtccacacacaagagtcagggtccaaatcagtgctgtggtcccttgtcgcctgggcgaagagccaggttctctttactcatcttcatagccagtcggaagcgggttcatgtgaggattgtggaagagggtatggttaccatctccccaggggaagggcttagtcctgatgcggagatgggggtaggcgacgaactcgggtctctcgtgctcttcgtgtcgcgacttcaggaaaacgttgagcatgctcactcccaccccgggcagcgccacgaagtaggtgagggccttccaaatacgagctgaaccctcctcgccgtgggcgccactcgacatgggccgccccacccgtgggagggcccggcccagcagcccagagactcgagacgcactcagcaccgccgacgcccctcgggcc

SEQ ID NO: 1682 - DNA, 394 bp, Rattus norvegicus
  Genbank Accession No. AI104521
aatttggaggctaataagtattgagatgtaaagtttttgatgcattatattttctttttttatgtgattttggctagcgagcattattagtgggaggagccaagttgttagaatgattagtggggtggataatggatcggaggagaatataactgagaaatttaggtaattttcgtcattttgtcataggagtgataagcttaataggctcactagaaagctgtaggaggtgacattggttcaggtttttttgttggctgagagtcatgttagtgggaggagtatgatagatgggaaaataatttttaacattgtagaaggttgaagttttgtacgtagtctgttccgtaagtatttgaaatttttactagtaaggctaaacctactgctgctt

SEQ ID NO: 1683 - DNA, 476 bp, Rattus norvegicus
  Genbank Accession No. AI104544
aaaatatggcataatggattaaacagctccacgtggtgttttgaaattcatcccaaccgtaggctgagtgacctggaggttggagagactgccaaagtccaaaagcttcagcatttccttggtgtcaggatctacctcaatgatctcctgatctagggctgagacctcaggaacataattatctctcctctccctttcttcttcctgcaacttgatggaaatgccttttacaggacctctctgaatccgcttcatcagatgcgtgacatagccggctatcttgttccgaaggtttttgctggggatgatggcgatctccttgcacacgcgcttgttggtgtgaaagtcattacccaggcgcgtgtagtacttctcgatgatgacccgggccgccttcttcacagtcttggtgcaaacgcggccctgaaggtggagagggcaaagtgacttggggagcccggaccttccatggagga

SEQ ID NO: 1684 - DNA, 467 bp, Rattus norvegicus
  Genbank Accession No. AI104557
caaatagttaagagactttattctaatagctataattacagtgcttgtcgaaatgaaaactgaaaacaagtttacaaaacagttgattactaattgtgtattgaaagcagtaagaggttccacgacaccaaataaaccagttctgagatttccccaagataaatttaacagctccagcttcttcagtgtttatcaaaatacaaaagaaaaaagtagaggtcgtctttcgatggcaaatcggacccttgcaggctgagggaggaagctacttcacacatggagatgggggtgctgtccactacgaagatcaagccttgggtgttctggaagtagtggcgccacagcggccgaatcttgtcctggccacccacatcccacacggtgaagctgatattcttgtattcaacagtctccacgttgaaaccaatggtgggaatggtggtcacaatttcgcccagcttcagttt

SEQ ID NO: 1685 - DNA, 556 bp, Rattus norvegicus
  Genbank Accession No. AI104587
cctctcccttgggacatatttattgtgtttttcagctacagcactaacaggagaatctgcaacacctgagggcagaacccaacaaccaggagcctcttgccccgtgcacaagcggggcctcagctaccctagttatgtctgaagagcttcaggcccatccaagtccacaggtggaagaacacgtacaccggtacggtgaccggcagaagcaaactgtagaagcacaggctgctggcgctggtacagccctctgggaagttttcttccacagaggcggagtagaacaggcccgccagggagatgagcgggatgaggacagtcagggtgggcagagacaggatcatcctcctcccttctgaaggtatacagttcaagaaaactcggttgttttcaaagttatgttcttgtgctggtgcactcctgtcttatcttccctttctctggactcctctttcatccaggcatgcttcccaagagcacacaaaaacttcagcggtcccaggctgagggtgacggctcctcagcctcgttctgatccaatccaccaccacacgaa

SEQ ID NO: 1686 - DNA, 395 bp, Rattus norvegicus
  Genbank Accession No. AI104608
tgacacagccacagtgacatgatgggtacacaagcccaggaatgcagctcacccactaccactactgggttccagatccacctgggcaactccgaaggcatcctgagaaaacaagtgctccatttcttctactgtcccactcagcatagcaattcagcaaatgatcaaaagggtttacaatgcatcaattagtccatacaagaattcattcaatttgaaaaatagccagttccgtcatatatgccaacacaccaataaggtatttatgacacaggatctttattttcccatccgtgtgtgccgaagctacagacgttgagacgcgaaccaatcttgtggctgataagtgaattctgaaatgcctatggaaatgtgaataaaggcagttcataaat

SEQ ID NO: 1687 - DNA, 449 bp, Rattus norvegicus
  Genbank Accession No. AI104658
  misc_feature (1)..(449): n = a or c or g or t
ggcccttcagttatttttactagatttttaaatgctttaaatttttttttgtcctttttatcttttaaatacaaagtctgtactgtcccagtgcccaaagtcttcctttgcactagggtccagtagagtctgtatcttcaatcagaacctctgtggtagcaccgagtatatccgagttcatgaccagcccttcagtgcccccactgctgccacttcccacaaagatcttcccgtcagccataaggctcacccgttctgtcccactgcagtatgactttgacaacccttcagcttctaggagtaggcactctccagatgttgagtttcccaagggcttcangaagaaaaaggaagcccctgactatctgcaggttgtgtcaggggttctgggttagtgcccaggatatctgtgctggtgatgagggcacccgcattggctgccagagctt

SEQ ID NO: 1688 - DNA, 479 bp, Rattus norvegicus
  Genbank Accession No. AI104679
gaagagcacaagtatttttatttctttcttttttttttcttttttttcctttttttcggagctggggaccaaacccagggccttgcgcttgctaggcaagcgctctaccactgagctaaatccccaaccccttttttatttctttaacaatgcaaaatatacacgttgacttgactaggacatattcacatgtaaattttttctcatatccacaactctggatagatcagaggaatgacaaagatcatcacaggaagcagactgtagtatctccaaagtttattccagtccatttcttcttttatactccaaaacatcttcgttgtgttggtggatgagataaatccacatgaaaatcgaggtgcccaaggtcagcccaactttcacccagttaggtttggcattgactggctcccggacatagaactttgaccgtgttgaagagcatctcggcagcctggcgggggccagcagccgga

SEQ ID NO: 1689 - DNA, 373 bp, Rattus norvegicus
  Genbank Accession No. AI104798
atgaacatgaagaaatttatttcacgggaactcacagagagaagggattaaccaagatgttccccatcccttgtaaccaagacaggataccctgaaggcatcagagacaggatcctggagacacagatataaggcagccatagcacagctggcagagaggatcctggcttactgttggggactcccaccagcctggatccccaaccctgagacctgggtgacaaacctcagtgctgctagcataaaagagatccaagctccctttgagctccacagagccttctgcagctgcctcctgtgaaactcaggtgaggccaggaagttccaaacccctgcctattcaactgaaatccctgtgaacacagtgtctgcc

SEQ ID NO: 1690 - DNA, 571 bp, Rattus norvegicus
  Genbank Accession No. AI104846
ctctttaaaaggcgtttattgatcatatacaaaataaagaaaaccttatatatcacaaacatacactatgtacagcaataaatacccggggggccaggcccagtgccgcccctcctggacaataatttagcaataaatactgcgcagggcacgggtgggcaccaaggctgctgcctgctgaggccaggtgacttgatcgctctgcactgatgccaagtccagacctcaccttgcagccagatccccgatggccctacccaggtgctggagacagggtctcaccttgcagccacacaacagcccctcctcacttggatgtttaaggaccctcaccccatttagggtactctctactaacctccccctggcttcagccctgcagggcaggcaggggctgatcaactctgcttggacacacctctcagcaccaggagaccaacagagctggacacacaatagcccttgtcctgttgccctaagttgccaggagaaggctttctgtacccattcccatttggttaaaggcttcagggactagcagacagagagaaatgggaggaaaggtagggtt

SEQ ID NO: 1691 - DNA, 561 bp, Rattus norvegicus
  Genbank Accession No. AI104857
aactccttgaatattttaataagttaaataacaaaacatgtacatccaaaatattagtcatgtaaacacatgcatgaatgaatttctcttcacttggaagaaagctttcctcctcaggagtgtagccatgtgttaagccaaagcaatggcttatagatctgtctgaagtgaagcccgtcttcaagcctcttctctcctcttgcccaacaagacatcatcaacactttctcttcaacactctgctctccatagttctgaaactccgcttctgtctcagcacaggagcataggggtcaccctcagggtgctcacgtgaggattttgctgtctgcgtacatttaatcattgttagaaacctggcacattctggaaagccacatgaccaagcaagatcttcagctgtttgcccatttttattacataagctgaaattagacaaaaattgagttaagtgaagagtattgtttacttttctaataaagaaaattggagaacatatcaacactgggtacaggataaaagaggtctcacactctcatgaacatacacaggcattacaca

SEQ ID NO: 1692 - DNA, 391 bp, Rattus norvegicus
  Genbank Accession No. AI104882
cctgatctaaaattacatcacatctgatcattttcatttaaagaaaatcacttctggcaaaagaacgatgctgctggctgtggataaggccacgtccagaaatgaaaatgtgtccccagcagaggacacgccactggctaaatcttgggaaacccatgacagaggcatatagcagggccagagcccatctccacaaagtgcagacagatccctggcttcactgtcacatacccatggctgacatcatttggactgcacgggactggcagaggtgcctcaggaaactgtgtccctgtgactttctccagttctctcaaagccgaggctgtgtcgcggaccaggatggtaaccatccccatgtcacgggctggcttcagattacttccaaagt

SEQ ID NO: 1693 - DNA, 422 bp, Rattus norvegicus
  Genbank Accession No. AI104897
aaaaacaccaccaaagtaaacctattagcttccatgagctggtcacacctggacagttggtagagctcccgtgtggtcttgagcaaagagcttgagccatcctgcagactgcagcctgagcgctgtgtgcctgcagactgcagcctaaggaccgtgcctgcagactgcagcctgagcgctgtgtgcctgcaaactgcagcctgagcgctgtgtgcctgcagactgcagcctaaggaccgtgcctgcatactgcagcctgagcgctgtgtgcctgcagactgcagcctgagcgctgtgtgcctgcagactgcagcctgagcgctgtgagcctgcaaactgcagcctgagcgctgtgaacctgctggtacccaaggttaagtgatcagctccaaaccatgcaagaaaaaccagcgacacccaca

SEQ ID NO: 1694 - DNA, 587 bp, Rattus norvegicus
  Genbank Accession No. AI104907
tttttttttttttttttttttttttttttttattgatgttcttttttatttttaaaatcacacactgtatacacatacaaatccgtctaaaatttattcaccaaacccccagtttttcagcaattagttcttactcagcaccaaaaactccagtctgtggagacagacagacttctgcagtgtggttgagcattgtcaggtcctaggttaattccgagacttgccccctttgatccttttctcttcatggctctctagacacaggctgtcaagacttcagattcatgagccatgactaccacgaaactcaacagcctttggagaagaactcaaaataatgagatgactgaaatgagagacgctacatgactggtgagcactctccattccgaggacattggtatttttaataagtttctagactgtttggtcataatgccatgatcgcactaggttatttctagcctgagactctgtgactttgtcatacatctcaaagaaaaaagtgatcagtattgtgggaacactttaggacaagttagggaatcaagcggcagctgagaacctgtgaacacagactaatgagg

SEQ ID NO: 1695 - DNA, 503 bp, Rattus norvegicus
  Genbank Accession No. AI104979
atctttcttccataggtttaatttattaaaataatttcctacaaaaatcaggacgaacactgagtgtgctgtgcatccttctcctggttctttacacaggacagtgctgttcagcgggttttgcttttcagtttctgtctggtacgttttccgggtctcttgtttgcccctttcttcccaggccttctggggcccttgccatgagccaccttgccccggaagctggagacatcgtcgtagctctcccgtgtgttccatttggagcctttcttctttccgccaaaaccaaacttctgatttttgtatcttcgtttggcattgggccctttacttatctgctggcctttagctcctcctgcctttgcacctcgttccacaggcttctgatcgccctcaaggaaatccagcttatcagagaagcctttctggtacttcttgatggcattcatcatatgcgctttctcctgctgcctcttgtgaaggacctcagtttgcaccttctt

SEQ ID NO: 1696 - DNA, 681 bp, Rattus norvegicus
  Genbank Accession No. AI105050
gagggtatatactttattgaaaactttaaatactcttcagagagaacatcacatcttcaatcaaggctcttgtgtggcctacatggcaaactgagctctcagcatggaggtcagtgcatagtgctgttgtgtttggctgaagggcccctcacgacccatgctcctctgccagcttgtcagcctttgccacagcttcttcaatgggtcccaccatgtagaaggcttgttccgggagatggtcatagtcacctgctaagatctgctggaatcctttaatggtctccttcaggggcaccagctttcccatgtgacctgtgaagacctcagcaacctggaatggctgtgacaagaagcgctgtatcttccttgccctggacaaagtcaatttatcttcctcagaaagttcatccatacccaagatggcaatgatgtcctggagagatttgtagtcctgcaggatcttttgcaccccacgagcaacatcataatgctcactgccaacgatgttgggatccataattcgagaggtggagtccagcggatccacagctggatagatgcccaactcagcaatagcacgggacagcacagtagtagcatccaaatgggcaaaggtagttgcaggggcagggtcagtcaggtcatcagctggcacatagatagcctgcactgacgtgatcg

SEQ ID NO: 1697 - DNA, 677 bp, Rattus norvegicus
  Genbank Accession No. AI105064
aagtctataagctttattgatactttgcttttacagttcacaatgcattccacagataattcagtacggcttaaaccacaatggtataagtcttcattttatgatttcttgcataacaatgtttgataactgcaaacatttggaagcatgaaattcagtccatagaatttcagagtctgtgacaaaattaactatacatacagtaagtctttgaaatgacattctatatttttgttggagttctatattttcttgaaaacaggtggtaggtagcactcctacaaatacatttctcttcctagtttatgtgcttgggactacactgcataaccaatgactcagaggtcaagcactgtggggcagctgcaaggttaaagatctaagcttgtgaaacactatatatagattaggtctatatttacttatattggcaatataacagtaaattcacaatacacctagaacacaccatatagacagagttttccactctgctttagtagtatgctctcatctaaacatttcatttcagaaaaatctgcatcagttttacactgaccaaacacagttcactgtgaaaagggttttccctgcccccagatttgccttctttacaactctctgcatacagctagactaccctgcagcagatacaatgcacagctttccccgagtcc

SEQ ID NO: 1698 - DNA, 606 bp, Rattus norvegicus
  Genbank Accession No. AI105084
ttcgttcttcttttttttttttttttaaaccaaaataaataaatcaggtctgtccctgtggaggtctaaagagggaggaaggacagctggctcctcgggacaccttgcccttatccattgatctgcttctgacctgccttggcacagcaaagaaaaggattcatcaacagcttccgtgtgttcgagggaacatcagagaaaattaagtggctggggttaggagagaagagtcagcaggaccaagaggcagccagtgcctggggtttgggacccaagggagcttctgggccttactcagagccaatcactcctgactcggtagttagggcaaatttcccacatgtagcccgaaatccaagaagggtagcagagctgacctaacaccactgctaaagcctctccaaaaacccgacgccattctccacgcacttaacgtctagatgacacccaaaccctgccagctacagctcctccaggagctctcagcttggccctagcaagacaaaactactcctagtcttgaatctgtgacttgatgggtgacaaggactgagtgctagtactgtgggaagccacataggatttctgatcctaccctggaggatt

SEQ ID NO: 1699 - DNA, 610 bp, Rattus norvegicus
  Genbank Accession No. AI105087
gggatacagtctagtgtttatttatgttatggcaggtacacttgaatttcaaattttaaaacatataaaaagtgattcgggactaacatctgtatcaacagttgacaagagtctggttgtttattatacagcagggtccaaggtagtgcagatgcccaccaggcagcacgggtgagaggatcagtaggctttctacaggcaacagcataagctgctgtttgagaaactgagtctgcttccaatgctcaagttgtctaacatttctaaggttaaacagtgttaggtatttagtttggcaaatgttcaaaataaagtagaaatgtattcgtaagcatcaccgatatgcacatccagtcttgatctcagaaagaaccgtaggtacagatcagaactctccctatatgaaataatttacacacagatgggtgctatcatatcactatctaaaataatcactaaatacaattctttttcagaaataaacaagcaaggtttttcattatcagttatcaaaaacatagtgttaatggtagttcaaacaaatgatactctaaaatcatagaattcactgagttttgagaatgtataactcaatcaaccaaatatattg

SEQ ID NO: 1700 - DNA, 542 bp, Rattus norvegicus
  Genbank Accession No. AI105088
attcttcataaagcaagtttatttctgccgaggaggtgtcttatgttcacatccagggaggcagcagaaagaaactccccctctcagaactgggcccctgagtcctcagcagcacgctgtgtttcaaccatctttactggggaccaaagaggttgagatcatgaagagtcaaactagttaccagctgctcaaagttacccaggctccaaggtggacatgacagattttcagggccaagaggcctgctgtgacacgggggctgattgaaggtgagcaaaagatcagtctgatactggggcaaccgaagcaaggcctgatgcagtgtgacatcctttgctacctgttggttttctttagctacctgctgcttgccagaaaggaaccaggcatcttgacagcagcctctcagggataagttctccaaacagagaggctgcacagatagcacgtgcacactcctagccccctgcaccccgccaacgtcctcaaaatggtaccgcgcagccgcttcgccctgcacgtgggcctgcagctccagaagt

SEQ ID NO: 1701 - DNA, 511 bp, Rattus norvegicus
  Genbank Accession No. AI105094
cggagctggggaccgaacccagggccttgcgcttgctaggcaaacgctctaccactgagctaaatccccaacccccccttttttttcttaatataatgaattaagtgcctgtgagagactgaggatatagcttagtggcaatgcatttgactttcttctatagtgccctgaattcattctccagtgctataagacaacaaagaaattaaaacttccttataaaactgtgcctattgacctggtgagatggctcagtgatagtggtgctttctgcccagcctgacagcttgagattgtctttcccccaggatctacatggtaggagagaaccaactctgacaagttgtccttcaacacacgcacacacctgcacatgcacacacaaataacatgtaatttaaaaatagtgcctatccaaaaatagagttcttttgtatcatgaattaaaggggaaccttaagtataaacattcttattaagacaaaaaataaaaattggatcattttggacc

SEQ ID NO: 1702 - DNA, 513 bp, Rattus norvegicus
  Genbank Accession No. AI105101
acacaaaacagcaaagagctttattggatatctgtttaattatatcatgaaccttagtacagtatctgtcctgaaaattctagtcagataaaaaacgatggcataatgatgtttgaagatgattccgttataattgtaaagtcttttacttatcaagagtgaaaacagcaaacaatgaaaactagcttaaaaaggcaacaccgtcatagcatatgatgttctacagctgtccgtagggcttccatctgatgcggcattcttaatgccattcaaacagttctcttctccgtcacatctcagccattgatgctatgagtctgggagagactgactatgggtaacacttctggtcttcagctgtgactgtgcaatgtcagcaagtgcactttggatcttctccagaagcatgtctccccgataaacaacatcctctagacacgtagcagcttcgggattttcttcttctagcttatataagctagcagcctgtaaagcagctgtagactcttcact

SEQ ID NO: 1703 - DNA, 581 bp, Rattus norvegicus
  Genbank Accession No. AI105117
atcggtaggaaacgtctcgttgacagctcagagcttaaaaaaaaatatatacacatatataaaaaacactctgcccctcccccacgaacgggtcctggcagctccttcctgcaggggcagggaagagggacacggacgctgcctgctttctcgaaggcagcacctttctccccctccggttcaatgtgggggtccaggtggcaagcccgtctgggaaggcccccctgaacatccaccttgcggcaggctgcagactcggagggcctcaccaaactctttagaacacgctcccacccccaaactctccggtccactgtccatgccggaactgcaagtgcagaagaggggcggggcgggccggtccagtgctggctcagtctgatggttgttgtccctggagaacctctgcagctgacgctccaaggctgcagagtcctagcctgggctcacgcagcctcctaccccactgaatttttttttttaaaggaaagaaagaaagtgggggagtctgggggggacaggggacagaacatagggggagacaaaggtggtcagttggggaggtaagctctgcagcggct

SEQ ID NO: 1704 - DNA, 622 bp, Rattus norvegicus
  Genbank Accession No. AI105137
gtctagtggcatcgggtttatttatgggaatgcagagcttaaggtttttcaagaggcacttgggaggcacagacgtaaaggcagccacagctaaaggtggactcttgtttcaacccccagggccacagaagacagcttcatcagatggagatgtcaaagtttactttctaaggcaatcttaaagtctggcattcagggttgggggcacagggcccatccacttctctcctagcaggtaagctagcaactccatgcggtcagacccaaatagcatgtaggttttaccatccacgtgggcaacagtggtgggcagcccaaaggccccatatttgcaggctgccccagtggtctccctgagcttgctcttcaccagttcggtggagatcttattcagaaggtgttgggcttgcgctgtggccattccggccttctctgctgcagacaaaatgttctgggactccgtgatatcttcatctcgggaccaaatgcgcatccacagctctctggacaccttctccagcatctctggttgctccatgctcaccgcggtgaggaagcgcatggcatttaccgttcctttcttaacatattcaccaaagaaatccttggggacgctcatggg

SEQ ID NO: 1705 - DNA, 592 bp, Rattus norvegicus
  Genbank Accession No. AI105153
aaatgacaaacgtagttagaggctttatttaaaaatctctcactgttcattatcaaagttacaagattgtttgcataccaatagactgactgtaaacaggaaattctcattaaggaaagacgggtttactgtaatttgatcttttacaaaaaaattactgcaagttattaataacagaatttctcttttactttcttaagtctaattctattgaaaattcaaccagtgtttccactctccagccgaaggtccgaccaccgtcaccttaggaaacaccccctgatttgttaatcagacacgaactggcacatttccaatgttttcactgagcaaaagcgtgcgcactgcagttcccgagaagagaggctgcgtggtcctgcctgtcagcgaggtttactgacgcagtggtggagcacactcagccctgccggtgccctatctcccatggaatcttctgccgccttggcttgcagcagcccggggttctgttgcctccactgagcctgacgggaagcaagggtgtcatgcttcggtgtcctgactgcgggtggttccatccagtgagcaggacacggccttcagtctgttggct

SEQ ID NO: 1706 - DNA, 531 bp, Rattus norvegicus
  Genbank Accession No. AI105184
aagatattaatttatttgaattcagatatttttaagatataaaaactggttgtattttttaaaaatgtaattcttgtaaacattctgtgggtagaaatttgattgtccatattaaagttactgatggtttgcaattcagtgatgtgaaaaataaagactctttcagaaagtggcatttgggtccctaactgtaggaaggaactgcttaggcaggtggaagagaaagcctttggcctctgctgatttgtataccaatggagacaactgttgtataaggttttttgtttgtgtctgaggcatgaacccagggcatcacacatacgagatgacacccctagcccttctattacatttcaagctacggacagtaatttttttctttaaaacaaaattttctgtgtatcatcattttgccggcatgtgtgtctgcacttcatgtgtacctggtgtcctcagcacccagaagaggatgctgattcttttggaactggagttacagatggctgtgattcaccatggggctgagaatca

SEQ ID NO: 1707 - DNA, 496 bp, Rattus norvegicus
  Genbank Accession No. AI105188
tgtctccgaataacaactttttaaaatgcacttcttatttatttttggtttttcaagacagggttaatttgtgtagccctggttgtactggaactcactctgtaaaccaggctggcctcgaactcagatatgtacctgcctctgcctcccaagtgctgggattagaggcatgcaccacaccactgcctctaatttaaaaatttgtgttttagttgtcaatgaacaaagaacatatatctgattcaccaggaaaccaggaaggaaggcctttaaatcaaactagaaaactgccattgttggtgggacgaatgtgtatgaccagagctgtggcctgcccatgtctgaacagtgttgctgaggtttacgggtttctccggaacttcctggaaaaacaggttccctggctaccatcggaaaggcacttgtgcacattttcaattgggaaggtgactgcaagacagaggacaattctgacccattatcacactaatgaccc

SEQ ID NO: 1708 - DNA, 603 bp, Rattus norvegicus
  Genbank Accession No. AI105196
cactgataggaaaataattttatttaggttttttaaaaaagttaactttcacatataaatttaaacttaaagattacagtgtatattttccaaaaggagcgcccctgaagggtggccagacaagctcgccgagtgggcacagggacactcgctccaaaaggagctcaggtggaagcgctttctttaatcttccacagtggcccttccctgttcctcaccgggcctatgactggtaagaaaacccacaaccatcactttggggcaacagcatctcactatatgggaataagaaacatgtctaggaatgaaagcacaaagctcaatgatccacatatcccacaacaatcattacatctgcagcaacgtataacaggagtattggatagttcaaaaattcttgtaaaaagggccaaagaacacaaaatctgtttaaaggtaatttctgtaattaaatgagaaaaattattttttccatattacaaatgcctttacactataagacctagaggggttaaaacccttcaaatctgggctctcctttctcagtaaaatgtttggcacaacccttgagctgctgttgaaatcaacagctgataggtttta

SEQ ID NO: 1709 - DNA, 463 bp, Rattus norvegicus
  Genbank Accession No. AI105309
caattccatcaaatttattatagactttgaaagttggcggttcacctgcttggtgtacagaagacagactctaagaaaggatctggaggcaccgcctcttctgtcaattgtaatgtatttggcaaaagtgaagactttgtaaacaccaactccatggctcaaagcagactttctccacagcacagttcaaaagccaggagaatgccaataagttagacctctgtgtttgacattctctctctgccctgcagctatgagtagcagcaagtgacccaatggaccctaccatttcccaaaatggcttccctctgaatgtgctcagaatccactcacgccacatgcatacgcacaccacagatacatgcacaccaatggccccttggatttggattgggggtttgagacgaggcacagtaagaaagcaccaattgggggccacaggcctgcgccctggaaaaggcaa

SEQ ID NO: 1710 - DNA, 424 bp, Rattus norvegicus
  Genbank Accession No. AI105348
ggtttttttttggtaattagcctttttattgggttttttttttttttaaattgaagggcccttactggtcctgcttccatgaatggccaaaatcaagggaaaggggagggcaaccagctggtgcagggagggtcatttccacagttcatttacccccagaactaaacagacaagcccagagtcactattggggttaaaagttggcaccatgggatgggacaaatgaggagtaggggtgtcgttaaaaaaaaaaattcagggtccccccaaactgggtgcctaggacgggacttggtctggttcaacccaagaggaatcagaagatcaaaagcaatttgggaaggccaaaaccgtcagggatggagggaaaaggacggtccagggggtgggaaggatttttggcaactggggtgaaaggaaaacc

SEQ ID NO: 1711 - DNA, 619 bp, Rattus norvegicus
  Genbank Accession No. AI105429
tttttttgggctttaaatagatttttatttgtttatattatttttttctcccatacaggaatagcattacaacctaacattcagaatcctgttacacacatacacaggcatgccacatgaccaggtcgaggtggttgtgtccttgagtctgtcgacacatcacaacatggtcagtcaaagagttttcacttcagccagtctcaacacaaaacacccaacagagatgcactcaacttgttggttccatttggaactaggtggtagggaaagaaggtatttgaagcagggtgggggttgtctgcattcagtcccctgacacaaagctacgtggatcttgaaagccacccaggagctctggtagggtccttgttgcacctaagacattataggtcccagcaagttgctgaaagggttccaggctggggagcaggcatactccaaaacagcaccaaactgcactcacacacacagggccctgctgggctagactggcaaaggttagaaagtgacaccagctcaagagaaccactcagacttactggagaaagctgtaagttgccctttgatgtgattgggacttactctagaaacaggtccctctgacatccttagttttggc

SEQ ID NO: 1712 - DNA, 638 bp, Rattus norvegicus
  Genbank Accession No. AI105448
gaatttatagagttgatattacctttattttatttaatgttacattaggcatcattgtttcattctgtatgaggtaaaattgatacaactgtgtgcttaaatccatagttacaatcaagttcacaactgcaggctacaaagtggtttgtgacatttattacaattacatttttactgtgcaagtgttgcaagaatttctcatggtgaggtgtaccccaaaatttgtgtatctctggaaaggggctcatagaaatttgtgggtagggctcacagaaatatcaggcaggactgttccaagacccttcaccaggcctcaggagttcctagttgcttacaaataggtccctgttatatgaccgtaatgaaagaaattccatgatcctccttcctggattcccaagcagaagtggagtccaagatgatttgtcatagtatacctcatctttgcgcagaactgtgcctttgatgatctccagggcgcattcctccttgggagcagcttgactcaagattatcccagaggtttctttcaaagctgtttctgtgtctatgaagccgaggacacagagagtgatggacacgttgaccttggtcatcaagtgttcttttctaatggtggaaaagaacccatccagagc

SEQ ID NO: 1713 - DNA, 312 bp, Rattus norvegicus
  Genbank Accession No. AI111599
tttttttttttttttttgctacaataatgcacttttaatggtaaaattcttgacagcacaatgtctatttggcaaatcttctgttcaagcatccatccagtcacctctggaaaaggtgcacccactgcactgtccacttgtcagaggagcccttgaaattcagaaatgaaggaccttgtgtggagcttgccatgccttcagttaaagggacccacatgtggtacctgcaggaatatgctgtttagaaacatgtatttataacgtgttatttacccatgttcttaaatactgtttcagcttaacaatcaatct

SEQ ID NO: 1714 - DNA, 344 bp, Rattus norvegicus
  Genbank Accession No. AI111653
tttttttttttttttttactgtgtggctttttttttttaatgaaactagatcactgcttacaaaaacctgcaagagccctcctgcccctccccttcacagttcccttggctcacctccctgtctcagaagagctgaaacagagcaggcatggaacagctgccaccactgggggaggtgctgaactccgactctgagcattttacagggtgacagttcctccatgtccgttccctggggcccaaaggctgcatggatagcagtgttccatgtgccctggctcagaccatcatccagaccagaatgaaatgatgtgaatgtccccccctaacaagacctccccctc

SEQ ID NO: 1715 - DNA, 513 bp, Rattus norvegicus
  Genbank Accession No. AI111695
tttttttttttttttttgccatataaattagtcagacattttattatagagtatatatatttatatcaaaagcacaaaaagacttttattctgggaaaactaggaagattgtgacattacaggagcatgattcaacaattccagtccatgtccacagtattaggtgccccatcagctgaaaaggacatccggggcagaggtcacagctctgagcgcccaaggctgcttagcatgatttccttaccaaactgagacctgcattcccaaacccaggtacccactttccagatatttgctacaaactgaagtgggcactgagccaaagattacacttgaaaataaccaaagctagtgctcctgtatgctggaagattaatcctcaaataataaggatatcataattggcactgtcatctaattctaaataaaagaatcatcagacatcctggaggatctgcaatgaattacacaggaagaagttaaaatcagaagcatcctctagtaaccaagcta

SEQ ID NO: 1716 - DNA, 444 bp, Rattus norvegicus
  Genbank Accession No. AI111828
tttttttttttttttttagaacatgagttgagtttactgctgggctgtcaatggtccttacagacctacagtggatggagcacccccaacccctccccagactgtcacagggtttcttacggggtgtcagtttttcatcacaagcagggcagttcagtactggcaatgctgttttactgaagatctggagttgcacaagtagttctttagaacataagatgaaatgcattcatccatcagttacactgagcatttagaagaggcacatacaaaacagttctgcttctacatgataaaaattccatatgatgccattaaatgagctgagagccatcttagagtggctgataattcccacagaggagggaaatgaaagttgcatgaggagtcaagtatcttcatttccaagttcattttagtcacagaacatcctgtcactgaagc

SEQ ID NO: 1717 - DNA, 408 bp, Rattus norvegicus
  Genbank Accession No. AI111963
tttttttttttttttttgtgaacaattacattttatttttataaaaattaaaatggtaacatgtctcccacaactggcctaaggagcagccagcccagagccccaacctgacaggtttcctttgtccttaacttcaaagcaaaaccagactagtacctcagataggagcccccagctccaagatgtcggccaagttaccatgtgactgaggaggcgactggtaccggccttagttctagcaactgtctctttctgtctgggatggtgagagcctctgaccgcactccgtaggctgcagtagtactgtgaagggctgggggcaggcctggccctattgtacacctaagttcaagtacatctcctaaaaaagcacaagagggcccacgtcagagacggcctcagtgtcca

SEQ ID NO: 1718 - DNA, 379 bp, Rattus norvegicus
  Genbank Accession No. AI112043
tttttttttttttttttatatatacatatataatttattaaaaacacattagaatctcactatttcaacagcctaaattctagcaacatatacaaatatcaagtgactacagtacatgccgaggtaagaaaaatacattctgggagaatatcactgacactcgagctattttcacttctgtatttcaatacattttattttcaccattcccagtgccaaaaatgagagagactacacacaaattggtctaattgagattggtgccacagttaacctagataccctataaccatccaactccctagatttttgcagttcgaggactttcaagttcaacccaacagaattaacgacttctttttacagagccctgtcagtt

SEQ ID NO: 1719 - DNA, 524 bp, Rattus norvegicus
  Genbank Accession No. AI112101
tttttttttttttttttcagatgagaaccgaatggagatatattttgaaacgctcatatttctctctcctctcacgtctttgtttcttttctacaatcctgagactgctgttcatcaacccccggcgtctgcaccacaatgtcccagagagcagttacgcggggaagtcagttcacagtcagacgagctgcagcaaggccggcaggcaggcaccgagggcagagcgaggttgttcaaatcaccaagaaggggaaggaaaccctgcccggtggccctccctcccaccaaaggaagtgtctgtctgtgctgttctcaggagccttcagcctcctggtgagggcctcctctgccgcctgggcgtcagggtgtcccaacgcttcttgacactcaaagcagaaacaaaacaggtcccccgccacgctatccagtttacatgagggataaaattacatttgtacaaaaatagattcatttacccttcccggtgcgttaaacatcctctatctttcctccctgcggacgcc

SEQ ID NO: 1720 - DNA, 523 bp, Rattus norvegicus
  Genbank Accession No. AI112107
tttttttttttttttttaaccaccagtatttattgaagagaagtgaagttatatgttcgcacaacattgtatataaatgttcataagcatcttattcataatgtcccaaactaaaaacagctgatgcccacaccaataggatatattcatgtaacagaatactactctctgaagaaaactgactcaagtaacaacacagatgcttttcacagcatgctgagtgaaatcacacccaaataaaaaccatactgactgatttcgtctaatacacagcagacagcagtggcttagtgacgattgatggatggtccctactcaagggacctgaggcgacttggatgatggaaatgttctctattttagttgtggagatgagccaacaggtgccacttccgtccaattccttaagtgtggtttcccatgggtggcttcattagaactcatcactgtgcttgaagaggaaacagggccactaagcctgcctcgctcctctgcacctgcacctgcacccgcagggctcaca

SEQ ID NO: 1721 - DNA, 386 bp, Rattus norvegicus
  Genbank Accession No. AI112111
tttttttttttttttttctattttgaaaagtatttacttagtttgaataaattaattgcaaataaaaattaagctacaatatagagcctcaacagaaatgacaaaacacaacacaggacttggtttccttgcctagtcacggaggttgtgaccagaaaacttcaaaatcaattaaatttccttgaaaaaagggtaataaccagcagttactgatacatcacagctaacttataatacaaatcttgacatgcatttcctgagtgaacccaaatgataattttcaaaacaagaaaatttgacaatcaacacaaaataaaagttcatggcttctaagtgacttttttttgttgttttaattcttttttaaatcaaaacgttgatgtact

SEQ ID NO: 1722 - DNA, 368 bp, Rattus norvegicus
  Genbank Accession No. AI112237
tttttttttttttttttcattttggcaagccactttaatttacacctttaatgagggctgtaatttcttgaattgtctcaccttgctctcgtacagagaggagtttacactttcagtcctcgtcgtcaggagggacccccagttcttcatctgtccacttcgatggatctggatatgaaaagtgacccagcacagcatccgagtcatgccaaaatctccaaagaatccagaaccacatgagtgagcttaagacctcaccatggatcacctgggactgggtaagctggggaaactccctgtaccggggctgaatgtgtccaccatcgccaacatgacggactccaccgtctccagctgcccgcgcgcgg

SEQ ID NO: 1723 - DNA, 491 bp, Rattus norvegicus
  Genbank Accession No. AI112250
tttttttttttttttttctttgcttttatttttatttatttattcatttatttattttttggttttttttttttcctaaaagtgcccaggtgggcttaaggctgccagacacacgcacatctacagcaacaagggtttctttctattccatctacgtctatcaggagaagggagggaggcaggagagagggaaaatctacctcccccaaatcccaccacaaggagacctatgtgccaagcataatggaagtgtgtgctccccaacaactggctccgcactggttaatattctgctggttttcctcagacatctattttgaaaaagcttaaaaaacacaggagatttgaaataattcaatcctggcaaaaatcaaaactccaaaactaggagcaaaatcatctttcactaaattaatcccttttcctttcttttttcttttcttaaacattttattcgtgttatagagggatttctttatcgtttgccttct

SEQ ID NO: 1724 - DNA, 361 bp, Rattus norvegicus
  Genbank Accession No. AI112338
tttttttttttttttttgtgattgaatgaggtttattggagtcccagagacattggggagaggggtcaggggtcaggttgaggctcacaggggagaaacccctggccaagttcccctatccccttgtggcgttggaacaaagagtcaagttgtagtgatgggaagaccaaagtactacaagtcaagggggaggaaaacctcaatgtctaccacctccaccaggtcacaggattgggacaactgtggtcaaaggattgcgctctacagcataagggaatgtctgccctattactctaaggagagtggggttaggccataaccattccagacaccagcccattctaagtggataggagtatgt

SEQ ID NO: 1725 - DNA, 316 bp, Rattus norvegicus
  Genbank Accession No. AI112391
tttttttttttttttttctgatcacatgccaaagggcacaagagaatctcaccagtgcctagcatcttttgttttctctaaaaataacaaaaacctgcctttataaatgttaaaaacaacaatgtgttgtaattctttttttttttttccaaaaacaaacgaaccagagaaaggggaggagtgaggtgagagcaagaagagtatttggcatttcctctacttctcctgaacaggttaaggccctgagattagactctgttcttgggaccaagggctccttcaaagcccagtgcacagatgcccctcctggggctgg

SEQ ID NO: 1726 - DNA, 296 bp, Rattus norvegicus
  Genbank Accession No. AI112516
tttttttttttttttttagcttttctctcatttgttgtcatttttaagatgtcacatatgaattggggaactttagcaccaaaatcaagtctctcatagtccatctagtttccccttcctccccacttaaaaaaaaaaagaaagaaaaagaaaaaaaagaaattaaatcacaaagtcccacttatgtcaaaaccttcgtccaacttgttcaacctttgtccctggagacctacacaaacccaggcaagattagtcaacaggggttcgagctgggaaaaaaaaaggtcctcgtgccg

SEQ ID NO: 1727 - DNA, 303 bp, Rattus norvegicus
  Genbank Accession No. AI112620
tttttttttttttttttcttgaagcagggtcttatgtagcccaggctggccaaatttactctggagtctgaggatgctcttgaacttctgaccttgccctcagctttggagtacagacatgcaccttcatgcctggtttgcttatctagatatttatttttgtgactgtcttgctatgtcgtcctgggtagtctcagactcaccattcgcctgcctcagtctcctgagtgccaggcctacaggcatcgagccctttgcttcttttgaagcaaaaactccctcaggaaaccctgctgaggaatg

SEQ ID NO: 1728 - DNA, 372 bp, Rattus norvegicus
  Genbank Accession No. AI112926
  misc_feature (1)..(372): n = a or c or g or t
ttttggttcttttttttccggagctggggaccaagcccagggccttgcgcttcctaggcaagcgctctaccactgagctaaatccccaaccctgagggtcacagttttaattccactgtcttcatctgcttaagattcctctgtgagagcaaaaaagagtgaagagccaaagaatttgacggctagaagttaggaattctggtggctggttcatagatcacaaagtgctgggagaaagacactatttcctatcagcaaactgtgaggtgttgactcgacacagacatatgaactcacttcaaatgctttcgtctgtgtggaccattataccaatgtggtatgacanacacacacacacctaatangagctaa

SEQ ID NO: 1729 - DNA, 499 bp, Rattus norvegicus
  Genbank Accession No. AI112979
tttttttttttttttttgcaagttaagaagatttattgacagactagtcttgcagtccagaaccgggctgacggaggctcaggaagttgtcatggtacaacccggtgtgggatccactctctacatgggacccctgttccacaaggtggctgctgttgcaaatatccggtaacatcccttacatggcacttacaggtcactggactgtacctccaggactagacatgccattccagaccctgacctcctggcactggagcacatgtgctgttggggtttcagttttgtttcttgtcaggtataaggaatgtcatcccattctgtatgcgtcataccaaaggaagaaaagtgggcatcgctcctgggagtgattgctttggctccctcgatctgcttggccctgggcacctgtgctttactgaggttaatggggcatgcccaacaataactctcccagggtttctgtcacacgccatcctgccctttcaggatctgtcag

SEQ ID NO: 1730 - DNA, 491 bp, Rattus norvegicus
  Genbank Accession No. AI113003
tttttttttttttttttgacaatatatctcattttttttttacttcaaaaaccttttgtccaaagctgccacagcctatagtatcatttctatgtcttgttcctgtgaaaaggggtagtgaaggggtccagcctccttccctcagctccagcttttaagttgtctaggccagcagtgcctctccacctgtccccacggtagggtgccagcacaccctgtgccacagggtcatttgtagagtagatagcgtttcatggcagggggcaatggcagactggatatttgacccagccgggtgtcccccagagcatggcgcacacacaggcggctcaggtgcagaagggattgtggttcctccgctcttctttcgcccaggtagcggatgcggacctggcactgtccccaaacagcacttacagagggataaagggtcctccccttcagtccacggaaggctggtcccaggtacgtgcccccaatagagtagccca

SEQ ID NO: 1731 - DNA, 411 bp, Rattus norvegicus
  Genbank Accession No. AI113081
tttttttttttttttttaaccctttatcaaagacattttattcaagttcccaaaacgaaggagttattttggctttgaattatagaactaagttcaaactaaaatatgaaaacaaatagcttctggatttttgtttgtttggttgtttttttcaagacagggtttctctagagttactctgtagaccaggctggccccgaattcagagatccacctgcctccgccccctgagcgcgggggttaaaggggtgcaccagcacgtctgcctccctttccagtctttaagagtctaccaggccaggcccttggcggcctttgctttgcttttcccccgtttcttttctctcttggccttcagtctttttctttgcctctggttcatccatactgggtactggccatgctggtcta

SEQ ID NO: 1732 - DNA, 433 bp, Rattus norvegicus
  Genbank Accession No. AI113091
  misc_feature (1)..(433): n = a or c or g or t
tttttttttttttttttcagtaaatactcaaaacctttattattcaccccaaacaatggggcacaaaggccttcaaggtcccctgacccacaattcccagtctctgccagagttgaggcccacacatccctactacagagagcccacactgtcccacctggactgggcaggtgaggaggtanagcgatggcactgcagtcaaactgagggtcctctctcagaccctggcccctccgggttactatccctgttccggaagtggtctctgctccgcttcttgctggagtctgacttgggggagccacaggccgcttgaagctgcaattgtcaaccacactggtttggggagcagagcacggttcctgccgggctgcactctccagacaatcaaagatgctgtggctccgctgggagaaagtggagctcatgcctc

SEQ ID NO: 1733 - DNA, 332 bp, Rattus norvegicus
  Genbank Accession No. AI113289
  misc_feature (1)..(332): n = a or c or g or t
tttttttttttttttttccaaaaacaaacgaaccacanaaaggggaggagtgaggtgagagcaacaagagtatttggcatttcctctacttctcctgaacaggttaaggccctgagattagactctgttcttgggaccaggggctccttcaaagcccagtgcacagatgcccctcctggggctggcccttccagttccaccacaggcttgtaagctgttgtttcttctacaccaggttagacgccgcagaccaaatcctaacctgngcagtggcagcgcccaccacgctcatgcctcacagcagtctgtcagtgaaaacatacccggtaaca

SEQ ID NO: 1734 - DNA, 404 bp, Rattus norvegicus
  Genbank Accession No. AI136296
tttttttttttttttttcaaggtctcattatttatttgttactctttaaagacttatttttgactggactcagatttagaagtagaagctctcagcgaagacagcctacgtctcttggcaatctgttcctggcgcttctctttggcttccttcattctcttggccaaaagtttagcatattctgcagcctcctccttgtttttcttagtgcgttgcttcttcagacagaacggtgaagaccctcagagctgtagcaccagaaggagaaagaacgcaggcgatggctttgtgggaaatgaccaggctccacaacctatcattaggttcccgccagtagctcttagatttctaaaaagtctcagtatgtcttgctgttaatatcactatcaacgtgagttcctacg

SEQ ID NO: 1735 - DNA, 347 bp, Rattus norvegicus
  Genbank Accession No. AI136372
tttttttttttttttttcagagtgaaaaagacaactgtattggatttacaatcaagatttacaaaaaagggtgggtggccctgggggaaatgctgctccagcacccccagatccaggcagggcctccaggacagcctgtttaacagctgagacggggacctcagtttactgggtccctctggcacccaggcaggtcctgttggctgtcttctggctgctgggagactcccaccttagacaggataagggtggctccatcccggacattgtagtgcatcaaggtgttgatccgtttccaccggccttcccgctgggaggtaaggtccaagtcagacagaatctgggcc

SEQ ID NO: 1736 - DNA, 503 bp, Rattus norvegicus
  Genbank Accession No. AI136692
  misc_feature (1)..(503): n = a or c or g or t
tttttttttttttttttgacagtgaaatgtatgcttttattactcaaggacaaattgtatgtcaccaatttcacaggagcatgtagtgtgactcgaacacagaatcactgtaagcctgggctataaccctgggtgacttgtgaagacacttggttacacaaaaacttgtttcttacaatgtaacattcctccctcctcaaatacttagctttgctctcagtttctgatttcttggggcttctcactgtctgggctgggctttgctggacctttctgccataagcagaaccttggtctacagctcaatctgagcatccagtcaattgcagggtctagaaacagcctgcctagcaggcagtaggcacatgaaacagttcactgtcttaccctttanaacgaaatccagattccatatatgagacaaaaaagtgttgctatcctgactctgtattatttgtttaacacgattatctcttgctctatcttttttcctcgtgccgaat

SEQ ID NO: 1737 - DNA, 462 bp, Rattus norvegicus
  Genbank Accession No. AI136862
tttttttttttttttttacagtgtgagagagatggaattcagttttattttgtcctctctgtaacttccatttacaccacggccttgtctatcaaagaggaggaggaaaaccttgccttatgccaccaagctcaagtacccacgtacttgttagagacaccaggcagggtatctgtttctccagtttttggctccaagaggttatacttttagtaccagcatagtgaggaacccctggcaaactgctggaaatgtcttctgtgttagtcagtgtaccatcccgtaaagtgcttctggagttaaaaatatgtcaagctgtcaaaactgtcgacgcttttgcaacaagggataaaagatcccaatggacatttcactgagtctttctcagatgggtctcgtaattggcacagctgctttaccctccaaggcgctggccctcaccccaggcgaagcctcctggcc

SEQ ID NO: 1738 - DNA, 449 bp, Rattus norvegicus
  Genbank Accession No. AI136891
ttttttttttttttcttgaaaaaacggggtttattgatttttaaactgcaaatagtcgttacaaaaagtttttttttcttttaaataaattcacacaaagaaagagaaatagaaagcgacggtagtgaccagcaagaggaataataattacattcatctttatgtgtgtgccagttgtttacatcaacatcggaaaactccaacctggagtccagaacctcaaatctgcaagcggaatgtcttgagatgggcacatggaattcaaagggtttttctctctctctcttttttttttttttgttttcccttttagaagctatacataaatggtggttttccttctgtactgtcacagaacttatacattctcagtcctacctgtgaaaggcctaaggagaaaaaaaaacctttgcggccgctccaacatcagaacctcgtgccgaattctt

SEQ ID NO: 1739 - DNA, 426 bp, Rattus norvegicus
  Genbank Accession No. AI136892
tttttttttttttttttacgttccgaatttttattatttttttttaaactctagggtgggcagatagctcagtggttaaaggcacatactattcttgaagagaaccagagcttgataccagcacagcacagcatcgcacagcatagacgacaatgcctcacaagcccagttccatggatctgacgcactgtcctgtcccccacaggcatggtgctcacgtacacaaacccacactcaccgtctaaattatttttaaaagttttaaccattttagactgttggggaggaatcatttaaaatagggtctcattgtgcagcttagcctggccttgaacctgtgtcaattttcttgtctcagcatcccaatgagtcattcgaagaagggccacatgacacctaactaggtaggaagtgattttctttttc

SEQ ID NO: 1740 - DNA, 374 bp, Rattus norvegicus
  Genbank Accession No. AI136950
cggccgctactgtgaaggtcctgagaccactcttctcccacagtgaggtgcctctgtgtggtcaggcggctgatgagtctttctgggttttctgttgcgaggtcgtcaggagaatctgtgtggagggcttcaatgatcagagagaaggtacctggccaggtgaatccgaaggggaatcggatggggttgctgaaggcggggtcgatgcctgcgccatcaggcaggctgaaggagtcgacacccagcactggcgtgaccgcactgccgtaggtgcagggtggctccggggacacgctggcctggtaatgcttgaggcatacgcgaaagaatgtcctgcaggcgcacggcgggccagagcccccgcggcagcagtt

SEQ ID NO: 1741 - DNA, 376 bp, Rattus norvegicus
  Genbank Accession No. AI136977
tttttttttttttttttaattcactcaaaattcttcagtttttacaaaactaacagggtggagtagggaagggagcagggaggcagccgcaggggtgggtaggcggagaggcaggctatgcttctgtcttcacctgagcctggttgcctgccacattgttcggctcacccttcatctcagcatcagtgggatggtccacctcaaatacaagtgtggcatttggttgccacagcaatatcccaagccttgatgacctccccttttcccaggtcaaaggagaatttgtccttgcggtccaaactggagtcaaactttgtgccatctagcagccagccagtgtagtggacaaagactcggtcccccctcgtgccgaatt

SEQ ID NO: 1742 - DNA, 387 bp, Rattus norvegicus
  Genbank Accession No. AI137062
tttttttttttttttttaacattgttaaaaatatttattttgatagtctatcgtaagtcagtacagactccactctgcctcagatgtgttgaaatgacgtctcctttctcatccagccggagcacacacctcccatgttgcactgcgtccagatccagatgaccgaacagtcctttatccccaaagtaggcttaaaactgatggttcaggcattccaggatctgcaccccttgtgaatcccaggtaaatcacgagaggaataaagccccagcggatggcaaactggccgcccttgaagagctgctgcagcctctgtttggcttccttgctcagcttcaccatgacgacgacggaccagccgaacgatgcctcgtgccgaattcttgg

SEQ ID NO: 1743 - DNA, 434 bp, Rattus norvegicus
  Genbank Accession No. AI137065
tttttttttttttttttgatgtctggcaagtactttattgaatattcccgaagtccagtggcctgcagaatgcagcttcatcggaaggtgattagcatcatgtgaccacagggctccatctgtggggagaggggcagcttcgccctgacccttcccgctggactggagcctggatcaggcaatcaacaccagtctcccacgggctcctcaccgggtccttcacaaagaactttaagcccaactcccgcaggcacttgtgcagatgtgctgtagcctccctgtgacgccgccaggaattctccaggccctgctctgaaatgagtgctaggctctccctcaggcagtataagctgatgacaggcaacgtatgatgaattactctggtcttgccctcacagccccacaacttggacaaataagtgatgtctgtgtag

SEQ ID NO: 1744 - DNA, 402 bp, Rattus norvegicus
  Genbank Accession No. AI137189
tttttttttttttttttaaacaatgacgccgtttatttaaaatgtttactccaagaaatatagatataaaaaaaaattagacaataacagcactaaaccaggcaccttcgaccgaatcccatcctcgtccactccctctgcgctacgctttctcgatgaccagaaaatttcagagcccctgggaggccagaatggttcctacccagggcttcccaccttgagtttctggtgggaaagctcaggtgagaattttagcctgaagggagggcatggtcgcgggctggttggagtgatgagaaacgaggaggggagcgactgaaagacgggggtcgagggcttcttctctccccggcccggacgagggctccagcccactcaccagatacaccctcgtgccgaatt

SEQ ID NO: 1745 - DNA, 348 bp, Rattus norvegicus
  Genbank Accession No. AI137302
tttttttttttttttttgaggatagaatactttattcactcataagggccaaggaaatgtagctggggactatgcatggttctagggatccccggtgggacattccctatcgcccagtcccagagcaccccgacccaggtgcaggcatggaaggaacaattcaggtgcaagtcccaagtgcccctcgcttccccgccgtggctcagctgccctcgcactccgggcagcgctcggtgggcgtggcggctgtggcactggcgggtagcttgaagtctcggccgcagcccgcgcagatgtagagacagcgccgcatgtgcgcgcgacggtggcggatgaagtgtgagctga

SEQ ID NO: 1746 - DNA, 345 bp, Rattus norvegicus
  Genbank Accession No. AI137332
tttttttttttttttttccaagttaaatctctttaatatcccaatacaaagtcttgatgcaaaaagacaatgagaaaaccctgggaagttgggaggaggggtttgataaataaacccaccccagcagcttttcaagggagaaggggagacgcaaaggagctagagaagcatcaatccaaagagggagtgcacagctcctaggatttgcccttgtcccctcacttccagttgctgctcatccgccccatcacgaggggctgcaccctttggatatctgctcctttctctttggtccctgggattcaactagctctggcttcaatcccctacaaaaattcctgagat

SEQ ID NO: 1747 - DNA, 399 bp, Rattus norvegicus
  Genbank Accession No. AI137345
tttttttttttttttgtcaaaatattttattgacggtctcacagtcttagaaaagtgggtggtagcacacacctttaatcccagcagtcgagacacaggcaggtagggctagctcaggatttgaggccagcctggtctaccagagtaagacctctctccaagaggacgacagaagctcgtgggctggaccttgctgttgggaagcccaggtccccgtaggctcagtgtcgtcctagtggtcagggcagagtaggcattctatggttgggcttagggttcaggtgttaagtgtctgtctgtctgtctgggtaaagggctctgattcttgttctacaccagggtcttcatgttctttgtacctgaaaccccacttccactgatatgggagtcagcttctca

SEQ ID NO: 1748 - DNA, 540 bp, Rattus norvegicus
  Genbank Accession No. AI137406
  misc_feature (1)..(540): n = a or c or g or t
tttttttttttttttttaaataagaaattttaatatttaattattaattaactgcttccaatattaattaatcttacaactgtgacatttctatggttctttcttccctatcataccagtgtcccttcccaagttggacacacctggatacattaaatgttttattttggtgacagacaattccttttattttagttagatgttttgaatgcctacagtaaatctgcccattccgggaggtcgcagacctcctggcctccccccaagtctatgatctcattttcacagataaacacccacttctcagaccagctacccaaagcatgcatgttctcgagtcctttgcaaaccggttattttgtctacataacctcctcatatcccttcctcacattcttcgtaggcagatgctggagctgttgctctaacctcctgagatatggtggcccgctgggggagtctgtttggcttcatttgaccttcncataccagctcncaccagtccagccctttctctgaggaacctggagaaaaattagc

SEQ ID NO: 1749 - DNA, 432 bp, Rattus norvegicus
  Genbank Accession No. AI137488
tttttttttttttttttgagatgctcgaagtttattgcaaagaggaaggcggggttggtgtagggaggtcaaggagaaaaggaagaggaggaaggaagggaggaacatcgagaggagaggagggtaaaataacccggagactttcttgctgttgagaaggtcctgtctccttttcagggtgatgaagcccaccagacatcacaaacaactgcaacaggttcaccggcaggcagcacaggcaatgcctcatattcagatcttcacagttgggcatagtatcttgtacactctggtgaaatggttctcacagcaggagcatcacagccagactggacattctctcaaaggggtacgagttgcagttctgaaggcccctggctttggttgttcacaaagttcagtcctgtttactgtgatccttgcctcgtgccg

SEQ ID NO: 1750 - DNA, 535 bp, Rattus norvegicus
  Genbank Accession No. AI137495
tttttttttttttttttactcgcttttcaccgactttattggctgcggactgtagcgggctcagcaccggtagagttcacttgctcttcaccttctggctctccgtcttcttgggcagcagcacggcctggatgttgggcaggacaccgccctgcgcgatggtcacacggcccagaagcttgttgagctcttcgtcgttgcggatagccagctgcaggtggcgagggatgatgcgcgtcttcttgttgtccctcgccgcgttgcccgccagttccaggatctcggccgtcaggtactccagcaccgccgccaggtacacgggcgctcccgcgcccacgcgctccgcgtagttgcccttgcgcagcagccggtgaacacggcccacggggaactggaggcccgcgcgcgacgagcgcgacttggccttggcccgcaccttacccccctgcttgcctcgcccggacatgctggacccggctcctgaagttccaacaccggctcgctcagttccgggaccctcgtgccgaattcttgg

SEQ ID NO: 1751 - DNA, 490 bp, Rattus norvegicus
  Genbank Accession No. AI137506
  misc_feature (1)..(490): n = a or c or g or t
tttttttttttttttttgcacagccaaattcagatttattagaaccgcagcacaggggtcctgccgtgcaggttgggctggccttcctgtggcccccaccaccacaattacccagcagctgggttgactactttccctaggaagagcaggctctgggtggtcacctcccanagcagaagcaggaagggcctgttaaagtgggcgtgtggggctgacgtcatgttcagggatgggggctgggagagcaggccanaggcagctgcggcctcagttcccttctcgttcatgtccacgacggccttgtgcgataccctggagacagttttgttgagctgccccataattcctgataggtcggcttccacgtcaaagaggctgctgaggccaacgaggggcaggatctcttccaggttgtaggttgcagaaactgaaaaccgtggcaggtgcaaatccaacagactccacgtntgagtcatctgcaggtgcttca

SEQ ID NO: 1752 - DNA, 415 bp, Rattus norvegicus
  Genbank Accession No. AI137586
  misc_feature (1)..(415): n = a or c or g or t
tttttttttttttttttaaaagggtaaacgtttatttggagttagtcttctggcaggtggtattaaggcccttcaggcagagttcaggagctcctgtatggctgcctgctgctccggactgagttgagctatgcattcagtccacaatcctccagaagtctgtacttggcgaactacattggccaggcgtttggcacaggggtcttcatgtttgatggcctcatgcatttctccttctgcaattatactgaatattttcggtagattggtattatttgggccaagaacaattggatgattactttcaatcaggtcacacaggtaactgaaggtctggacagcttcttctttatcttcatgtanggggagccacgacagccagtgtggtaagacctcctccacattcacgcagtca

SEQ ID NO: 1753 - DNA, 475 bp, Rattus norvegicus
  Genbank Accession No. AI137676
  misc_feature (1)..(475): n = a or c or g or t
tttttttttttttttttaaagcctaaaattttattttgacaggaaaacaaaagctggatgttatggttcacagatctaaatctcagacaggagtctgagaccaagctaagccacagagttccaggccagcctgggctaaagtataagacccccatccaaaacacaaacacccgtccagctcctggaatggaggattgtgatgtcagaaggacagggagaaggctcggtagcccaggttggtaaagacgtctactcgacagctgttgcctgatgcagtcaggaccttacactctggggctgctggctgctggttgaggctcaggctgagcagtcctgnggaggagccaggcacctgggccttaagctccccactcagttgccagtgattgacacaacagccctggccagcagacaggatcaggtcctggtagaaggtgacatgtttctgtggtgctcgaatgggaaagactgtagt

SEQ ID NO: 1754 - DNA, 567 bp, Rattus norvegicus
  Genbank Accession No. AI137765
tttttttttttttttttcctgcttctttcgtcgtttttttttttaatttttgttttgttttgttttttgtcttcctctctcctctcctgcctcttggccctccttctccccggcccgcgctcccttcagtaggtgaagaccaggttagagatgctggactccagccaatctcccgagatcatctcgctcacctcgggcgtgcaatagtccgggaactcgaagtgggagcctgagccgggttcgaagttaaaatccaggtcccgatcaagcgcggatgaggagctgaaactgcccagggacatgctctcaaagtttgagctggggttcaggtcgagcaggtcatcttcgaactcatcatcggacgacgaagagcccgaggaagaggaggaggatgaggagagcgacgaggacgcgtgcgagggcgcgctggacggggcgggcgaggctgcacgtaggctggcgtagccgcggtggtcagcgggcgatcggctggcggcgggcgatgatgctgcgctgctacggccgctcagactccggccatcgggcgagccctcgtgccgaattctt

SEQ ID NO: 1755 - DNA, 590 bp, Rattus norvegicus
  Genbank Accession No. AI137790
  misc_feature (1)..(590): n = a or c or g or t
tttttttttttttttttctctgtgcacacagctttattggatatcgctggagcgtccccaagtggctctgattactggtgtgacaggaggaggtggtgcctcactggagatacagacaatgatggctgacattanatgactggggtgggggcccagcacctanggagagagtattaccatctagtcacgaacactctctgcactgccctgatggagagacaacagccagaccccgtcacagcagcagagggagcggagcgctcttcagcactggggagctagcctggagctttgccattgcctgctgttccaaggtccaacaggactggagcaggatcttccctcaagtccagccagcctgtggggtcacctgcaaagtcccagtgccttcaggatggtgtcttgccaggggtggcccctgtcttctttgatgctcccttcagcagcgcaagcttcttaggcaggctggagctggccttcatcaccacatcatgctcaatcttcttccggattcctacttccaggctcttcttcaacttttgctgctgcacaacgcgcgccttcttgggagcgatgactcgaccgccttt

SEQ ID NO: 1756 - DNA, 384 bp, Rattus norvegicus
  Genbank Accession No. AI137856
  misc_feature (1)..(384): n = a or c or g or t
cggccgccattctcgcctgctggttccttggcccgaagccagctagtggccacccccttgttcactcggccagacttcgcttcgtactccacggccacggcacagatgtgcacggagttggggtggaccttggaggatgaggcaatggagtantatcgggcctgcaggcgtggcagcagctcacacaggtggtcgatgggtggccgcagtgatgggtantcttggaggatggctaggatgtgcctccgggcttccaccacccagctcaggtacagctccttgccctcgcctgaggatgacgccatcttgtgcaggtgctcctgctccgagggctctgaggcgtactgtgccagttcgtagagcacattggtgcgtggcgggtta

SEQ ID NO: 1757 - DNA, 221 bp, Rattus norvegicus
  Genbank Accession No. AI137864
tttttttttttttttttcaaagtttctaccagtgtatcagtgatggacaacggagagacatgctgtagagtgtttgcctagttgacaaagctgcttttgaatgctgttaatgaggttgtggcagggataaaggagtacttcaatgtaatgttgggcactcagctactctacaaatttgagagaccacagtatgctgaaattctggccgatccctcgtgccg

SEQ ID NO: 1758 - DNA, 487 bp, Rattus norvegicus
  Genbank Accession No. AI137925
  misc_feature (1)..(487): n = a or c or g or t
tttttttttttttttttacagacacagtctacctttattgccacaactgtagaactttgtctacatagcatgtaggagaaccagggcaacaatgtgacacagaagccacaagaagttgaggaggttaaggttagaatgagattagatccttgagactggagtttcttggagagaggtggatcaacagaacatgggaagaaaggggagagagagagagtctaagagccagatggcttctgatctcagtcaagtacagcaatcacctgactcacttctcagaatgcaggaacaggccccacctcctgccttggggctcccttctctacttaggttacaacatcctttaaggcagctcctaactctgggaaggaatactggtagcccgtggccagtgtcctccgggggaccactttctggccttccaacagcatgatggcacgctctcgtccanagattgcttgtaccacagcgctggggacaggtatga

SEQ ID NO: 1759 - DNA, 442 bp, Rattus norvegicus
  Genbank Accession No. AI137932
  misc_feature (1)..(442): n = a or c or g or t
tttttttttttcttgttacagtgctgtttattgattccaatatctgaggggaaaaaaaaaaacaccctgccatctttcatgaggagtggctgaggtccaccatagtaaaatcatgagcttggatttcggcaaagaacaaatagctatggtagcctcttactcctgacagtggccactccccaaaaggtagaggctgaaatgtccaacagcaccttgggacaagatctgctcaggcctccacctcatcacagatgagacaatatggacagatgtcagcctgtcccacaggcaattcccacctgttcttcattggcgtgagattcagatctggccctaaaggcaggggattcctgagtcatgggtccattanaaagcgagcgattgaccgcactgccgggcaggcctcgggggtggacagtgaaggagttgctgccggtctttt

SEQ ID NO: 1760 - DNA, 475 bp, Rattus norvegicus
  Genbank Accession No. AI137941
  misc_feature (1)..(475): n = a or c or g or t
tttttttttttttttttaaatgacttttattaaatccttacaaaacaatacaaaatcctggcgttgacagttggtgggaaaggagtccggaggtcagttcacctggtacgatggagttgaaagtgcttgcatgtcccccactctacaacaggtctcttagatttcagcatggtttgtggccaagccaccccaggatcatgtctcattcacagttaaggggtctgaccacccgtcctccaggtcaggcttggagggacccgggaaatcacagccctgcttggggagtgggggtggggtcaatgctgctcactgcccagtcacgttgcttcaggaacctgcggaggggctgagtcctcacgtgcccaacaggacagctgagtcatactgatggctgagaactcagatgcctaggagtcatactgatggctgagaactcagatgcctaggagtcccccaccctctangggttctttgg

SEQ ID NO: 1761 - DNA, 570 bp, Rattus norvegicus
  Genbank Accession No. AI137976
  misc_feature (1)..(570): n = a or c or g or t
tttttttttttttttttccatttaaaaattatttattgaacatctactgagcatctggactcttcagaggctggtcaaatcaaggatccactttttaacagcaatgatttaatcctgctggcatacaaagtttcttctttgggtctaatttattctaatatatgctgtgaatggatgaaacaggatggtttatctagcctatgaacaaaaagacagtgcctgagttaactatataaatttaggcttatcatcacggacctgcttgcaataatctttaactgaaagtttataaaaatacactcaatttanaattttgcttgcacaaccaccctaacccttaacactggtactcttaggacaagatttttctatttaatcacaatcttcctccattgaggaagtaagaacttttggggcaggcagtgctagagattgcacccgagggacttgcatgctangcaatcgctccactcctgagccacacatcagtacccaccctctagcgtacccctaatcactcaccagagtattctangcaagagctgcaccacatgctggggtcactcacat

SEQ ID NO: 1762 - DNA, 425 bp, Rattus norvegicus
  Genbank Accession No. AI137988
tttttttttttttttgtctttgaagggaaacttgtatcatcactctggctagattgcaaatataaccatgttgaatgtggggggaagctgctgcattcccaaactctgtacccctcaagcaaatctctaaggggccccaacacaaatgctgaggctttaatggaatttacacattgctttgtccctagttcataaaggtgaactgaacacagcacctgtaagtgacagcagttgtaaccagaagaagaatctggactcggacttttatttttatatggaaagaatataaaggtgggccaaatgagcctactcacaaagaaagaagttaccttggccttatccctcacagacagctaagggaagcaatgtctcttggctcacaaagtctgataataaaagatattaatatgtggtgcctcgtgccg

SEQ ID NO: 1763 - DNA, 513 bp, Rattus norvegicus
  Genbank Accession No. AI138020
  misc_feature (1)..(513): n = a or c or g or t
tttttttttttttttttcctcnacccancagggtaaagtaggtattttatttgtggtccccaacaaggcttcccccgcttgcttccactctttctatactttagaaatctgcatcctgggaggctctgagtgagtgtctgtccaggtcagtgcctgtgaatcttaggaactccagatggtaaccccaaagaagagagagaggggggataagtcagcatccggccaactccctcattgcctctccttcaaatcgaaaggagagccagccttccgattcggtcagatcttgagcccctagaaacttgtacaagttcacggccttcttgttccagttcagaactgccaggcggaactgggagcaccccttacgcagagcgacctcagccacctttttgattattttggtaccaatcccttgaccccgatatttcggcatcacatagatgtcttccagataaatgtttcgtccggtccatgtgctgtagatgaagtagtagagcccgtagcccacca

SEQ ID NO: 1764 - DNA, 495 bp, Rattus norvegicus
  Genbank Accession No. AI138040
tttttttttttttttttaagtaattacataactttactaggaagtaagggaaatgacataatggcttatttacttagactgaaaatgacactaacatttgttggttgggtctttattcttcaatgtaacatcacactattgttcagccctgccctgaggtaaccaaagcactggagaacaaaggcaaatgaaaacaagcctcttggggccatccttggtgctgagttcaggtgccagtgctgaggaagcccctcccaagccacagtctttgccagtccacatagacacagcagccaaggtctcaaggcctcagtgtccacgaaacaatgatggggacccagtaccaagactctggtggctggctctgcggttcctgccttagtgacctttggcaaggacagctcttgtactctgagcctgctcctaggccttgacataattcttacagtgcatttttttttatggaaacaaaattatctatgtgaacacacctct

SEQ ID NO: 1765 - DNA, 398 bp, Rattus norvegicus
  Genbank Accession No. AI138121
tttttttttttttttttagtcttcatgttttaattttatacaatggctagcaggcaccttagtaaccagccagacatcaatttcatccaccatcaacccctaaactacagtaccaggatggctggctaaagaaagaagacggctggctgtagtctgacgcgtgcccagtacaaggtgtctggctgactttgtcctaaataaggctaacattagtgaactaagaacagcgtcgtgtggtgggccgtgcctggccttcaggagcacccctccccgatgcgctggcaggagcgccccactttccggtccagtttcaccattttcatgatggcttcctcgcggccacggcccatgtggtcgaacgtacagtcgtgctgctctgggaggcgatgttacatgca

SEQ ID NO: 1766 - DNA, 343 bp, Rattus norvegicus
  Genbank Accession No. AI138143
  misc_feature (1)..(343): n = a or c or g or t
tttttttttttttttctggctccttttctggctctgggaggagctttgctcaaaagggacaccacctatccttagcatgcttctcttgaggtacagtatgcacaaccaataggagacccaagtcaataatatataaaaggtgcttaaaaaaaaaaaagcaaacagtaacacacacgaagaaatcaaccaaaaattggtggacatctgttttttattataatatagattctgaatattttaaggaataaagagttattgttttattacattgccctctaatctgtatggaataaaattatgactttgtnaaacaaaaaaaaaaaaaaaaaaaaacctcgtgccg

SEQ ID NO: 1767 - DNA, 414 bp, Rattus norvegicus
  Genbank Accession No. AI144657
  misc_feature (1)..(414): n = a or c or g or t
tttttttttttttttttcagggtttagcccatagctttattgtgaccacttctctaacagttctcacatctcattagcaattgtgtaaaaccaaaaaacccaagcacctggctttgtaggaagattctgcctacagctgagaagtcacttaaatgtcctgagttgagtcacactggtcactgtcatcactgacacctggggtggactttctgtcagtgtttaatgtgaccaaggccgtgtccacttgtacctcctcttcatcagcctggatgaggggagcatcaacagtgtccaggtcattgcaggcanagggtgaggcaggtggctgggacgctgattctgagggatttggaatctgaagattcatttcattctgactggggttggattccatctccaaaccaggggatatca

SEQ ID NO: 1768 - DNA, 472 bp, Rattus norvegicus
  Genbank Accession No. AI144663
tttttttttttttttttaaaggaaaatagggtttcatataacacagtatcaaaaagtagacggaagggactaaatgcaccaattggtggcaggtaagtccacagcctattgtgacatgtccttccagcatcgatcacgtttcttctcatgttttctcaaggttgttgtatagatgtggtgactttaacaagagtctaacaggtgggcaggcaggcaggcaggcttcaatcattggtttcaggatctgtctgtgccatgtaggcatccaattcagcatccaggtgtcctttagttttcgacatgtatgcatccaattggttgtccagctgctccttggtcaatacagggcgagtgagggcacctctccctcggccacgacctcggcctctgcctccaaagccccctcttccccgacctatcataacccgacctctaccaccgattccgccacgacccatagctccacgcccta

SEQ ID NO: 1769 - DNA, 499 bp, Rattus norvegicus
  Genbank Accession No. AI144692
  misc_feature (1)..(499): n = a or c or g or t
tttttttttttttttttaacaaacatgtttattagaaaagtaaaaatattgcataggtcttagtacttgaacatcaagtgtattcatgaaccgtgagtatcttcatgtaaacagttctagatggaagacccaggtggcgctcctctgggggagagggttccagccccccacccccctcagccccatcccctcacagttcactcctccagtacaccggcaccgggatgggctgggatgcagctccctggtgttattttgtttcaagtgttgaagatcccaaatgatcctaacacccacccccttcctattcttacattcatgcagtctgtaagatagctgcctcgaacaggtcagtagtgaagctccgatccccccaccccacccccaaaacaagatacaaaccaaacgacgaacaagctcggtcctttcagaccatgagatctgtcgacaaactgtcggagacctccccccgcctcnccccagcacacagcccgggcag

SEQ ID NO: 1770 - DNA, 549 bp, Rattus norvegicus
  Genbank Accession No. AI144919
  misc_feature (1)..(549): n = a or c or g or t
tttttttttttttttttcaaaatatattagatttggtttttattgtagagcacacacatattagggcaaagtgctgcacacacaactacaaatcatttttgggaaaagaacagtaaaaaacaaaagaccaaaacaaaacaaaacaacaaaaacaaaaccaaaaaacaaacaaacaaaaaaaaaatccccaaaaaaacaaaaaaaaaacaaaaccaaaaaaaaccaaaccacagaagacctgtaattgctttagttatgtagtctcaatctgagggctccacactggcaaaggatttgaccccaaagagagacttcctgatggttggctgttcccatatctctgcagccactgaggcctgagggacagacctctgcatttccagaatggtggtagcagcatggctgctcagaaggcctctgctttctgcaggctctgttctggcctggctgccaaagccattcctaatgaacctggatcagcanaaccccacagccctccaggatctaagcagacacaaactgttaaagacttcacccttttttttccct

SEQ ID NO: 1771 - DNA, 443 bp, Rattus norvegicus
  Genbank Accession No. AI145095
tttttttttttttttttatttgcagctgaatgtttattgcagcactcccaagtgatcactgttggatgaataaggaaacaattcataaccaataaaaatgttgaactgccttttttacagtaattgtacactcattgtgcttagtctgtaaagttgtatcctcagctcacccataaccttcccagaatagaacactctgtcatacattaacatagagccttcaaaaggtatacacaaggctcaactctgcaggccataccagatgctgtcccatccactagacagtttaagagggacacagcaagggccatgcagaccccatctcaaacatcccagtactaatactctgtatttgcttcttgtgtctgctttttctgaacatcaccacatccagttttccttcgcaagaagtctcctctcactggccatgcatttctgctcca

SEQ ID NO: 1772 - DNA, 491 bp, Rattus norvegicus
  Genbank Accession No. AI145182
  misc_feature (1)..(491): n = a or c or g or t
tttttttttttttttttgcccaccagcccacgtctttattgtatttggacccctctggcttaggcatgtccatcggtggaaccactccattgagtgatttgagtgttgagccgctggttggtccagtcctgccgaatgtcatcaaggtggcagtcaaagtccacaagatgctggtgggcccggccctccagcagtgctcccaccatctgccgtgactcctcccaatctctccacatcactctgaaatttaaaacacggatgtcaaacagtggggccagaaagcgacttaaagattgtgtctggagaagccatagggcaggaccagggacaaagaaagccacaagtcttgggcttccaagggacaagaggtangggggcactcacaagttcttgtccttaggcacccactgaagaccctggttctccaggacaatgactggaggtacacgaggccaagttaccagtttcttattatccagctgggtgaacaa

SEQ ID NO: 1773 - DNA, 471 bp, Rattus norvegicus
  Genbank Accession No. AI145282
tttttttttttttttttaaatgtagaaaacaaaatgacatttatttttttcttaaactcaaaattaccaagtagggtaagaaattaaatataaacacaaagtccatcctagccctgtttatccaaggcagcataaccaaatagactcatggagaccacctggtcaacagaggatttattaagtatctcatcggcgtcttcggtctggactcctgcttcgtcttcggccacctctcctcttgccctttggtggaccacgaacaaaacaccagtcaacactgattggctgtcccatcaaatcttgaccatttagtccctccatggcagcctgagcttctttgtatgtttcatactcaactagagtataccccttcaagtatcccgtgcgcctgtccaaattcaggtggatattttttatttccccatattcagcgaacttgtcatggatatcttcttcagtggcttcttcgtg

SEQ ID NO: 1774 - DNA, 465 bp, Rattus norvegicus
  Genbank Accession No. AI145368
tttttttttttttttttaactgacatttggttttattgtgccaaggacattacagatggtggatcttgtcaacacctgcagtgcacgggtgccccatctgctgaggctgctcccactccctaaattcaaatcttgagtagtggccatgatttctgaagacaccccacttcaagcttccaaacagattagcggtggtggaaggcaaagcgatgcagcaaggtcagactgtcactgtccaaagccagtctgccacccgcatctcctgccacttccctctggctcatatccttagcccttccaaggaattgggggccgaaagacagcagaaatccatctccttcttgccctctatgccccatggccaacctgcccagttccaaagcagaatgtcatcttcacagggccagcgttgctgtgtacattggttttcatttgttgattttgtgagataaacctcgtgccgaa

SEQ ID NO: 1775 - DNA, 451 bp, Rattus norvegicus
  Genbank Accession No. AI145384
tttttttttttttttttcaaggggaacacaaccggctttaatgaactgtcagtcagtgtgggggtcagaagtgatgtcagtggggaacagcttctggaaccggccataggcggcctgggtgatgacgactgtcacgtgggccgcaccgccctccggaagctcctgcacctgctgcaccacggcctcattgtagagccacctgcacgacacaggagaaccatcgccagacatgctggaaagcggtgcgggcgcgggtcggccccccacgcatgactcacccaagctggggtcccccgaggcgcacgcgtatcgtgagcagctgcctgccggtggcgcgcagcactgacgcctccagggccgccttcagctcgtccagcccacgccctgagactgcagataccgccagggctccagagcatggcatggtgtgcctgccgcctcgtgccgaatt

SEQ ID NO: 1776 - DNA, 455 bp, Rattus norvegicus
  Genbank Accession No. AI145451
tttttttttttttttttcaggaaaggaacaggcctttattctggatatggggggttggcctcagtcccccagtaaaataaaggcctcctgcacatgctgccggacaacacaatccaacaaagtgtgcacatcccgggctgcctgggcagcagcctcgagcacctgctccaagtggtcttcatgcaacctcgaatccatctcaagcagtgcaatctggccaaaggctggcaccagggccagggctatctggggcccgccagctgcttcctccacgtgactgaggtccgctagtgctgtgccatccacaaaaccagccgaacatgcacacacaaagtcccgcatgggtatcccagcatccatcactgctagcgtggctgcattcacacatgctgcataggtcccaccgtctgcttgtagcacctgcacataaatgtctatctgagaacgtgggtgca

SEQ ID NO: 1777 - DNA, 567 bp, Rattus norvegicus
  Genbank Accession No. AI145556
  misc_feature (1)..(567): n = a or c or g or t
tttttttttttttttttcatcaaacacagattctttactttgtaaacctcttattagggttatagagttctgcttcttacatgcaaaactggtaaccaagtcaggtaaagaaatacttatagagagagagttctggatgatatctttcccctctagttcaatgtgctaagactgagacagaagcagaatttgtttctgtcaagggcagggagggcagggagggcagggagggcaaagataggacctcactaggtaaccctggctaacttcaaactcagagatccagcctgccactggcctaccaggttctaggagtagaggagagcgccaccacacccagtctgttttttgagacaaagtctactatgtaagttcagattggcctttaactcaaaaatcttcctatagccacctccaaagtaccaggattaaaggcatgggccaccatgttttggatgaccttgagctcctgatcttcctgcctgnggtctgaactcagagctttgtagtgctaagccataactccaagtctataagccttcatccttgantcactgtgtatattaa

SEQ ID NO: 1778 - DNA, 487 bp, Rattus norvegicus
  Genbank Accession No. AI145614
tttttttttttttttttaacaagcacatgtcatatttatttgatgctgtagaagtgggcacacagtgacttaagttacaaaggctttcacgtaacatctgtaagggaattcattttaaagtggttttacatgttaattactctggataatttctgaaccctgttcagcagcaagtctcctttcttgatggtctcttggtactgccaattcttgctgtcaggtctgttggtttctactatttcatttactttatcgattttacagtgtagtcttccagcagcaataaacctggacagttcctggtcgatgaattccacacccacaccaaatgcttctgccatatagccaagggttaatgacctatatgactccagcagctggctgtatgcatggatccgcatttctctcacatagtatcggtaatgaggcgcaaaaagccagtcctttttcatctcctgctctacgaccgctaacgactggaagaaaa

SEQ ID NO: 1779 - DNA, 464 bp, Rattus norvegicus
  Genbank Accession No. AI145680
tttttttttttttttttaattgttttgtagattttaatactaactttttgcatttgatttcaaaaatggccaattacttctaaccacacagtgtctctgaataggagcaaaggtatcaattcagtggcaacaccttagcactagactgtagtgagcattccagaagaggtgcccagcaggtgacaggctgtggctggaactgccaagatccagaattttatgcttcaaatttctcaaatatatacctagcagcagatgtaccaggcaactataatgctagaaaaatactttagtcagtattttataaacctgtgacctttaagcagtatttctattcataaatgttccggtaacaatgtctgtctgacaaagcattacaacaacaacaaaacaagattaaggttagttacctcaagcaagctagttgttatttttcctcttaaaatgcctcgtgccgaattctt

SEQ ID NO: 1780 - DNA, 397 bp, Rattus norvegicus
  Genbank Accession No. AI145682
tttttttttttctttttattttttattcatcattttggagatagacaaaacgggggaaaatcatgatgccaagctcctgtggagttaaccttcccagcttaacttaagacaggcaagttcctcaacttcttttaccagcatgaatgaaggtagccctgccttcacagacgagtcctctcctgagaactgactaaacctgggagagcaaccatttcaagtgtgaaggactgcaggtccaaatgaagcacactcagaggaccaggagcagggatcccatggtgaagcagcagcagatgtctacaaacactgtgtggcgacagtggctcagaggatttagagtcacagctctgcatgatggacctctgccctcagcaactcactgggcttcatgaaaatg

SEQ ID NO: 1781 - DNA, 432 bp, Rattus norvegicus
  Genbank Accession No. AI145910
  misc_feature (1)..(432): n = a or c or g or t
ttttttttttttttattaaaaaagtttttaattgttttacaaaggagctacagactacattggaactaatctttgtacaaaaggtggagacggagatagagatatagagaaagagatactgagaccccaaaacacccagggaaaaatgtggggggagagacgaggaagatacaaaaggagcaggaagacgagagattaacatcatacatactcaagagtgagggtggagaaagtgagtgacttgagaagtaattaccctcacagccctggtgacaactggattggaacccacaacaaacatcgtgagattaaaggcttaaaggcaacagtggtacagagactggttattcccagtatcaagaaagataaactggttttaggcaccagagtggagcactactcctctgccctgngatgacagacttgggagag

SEQ ID NO: 1782 - DNA, 421 bp, Rattus norvegicus
  Genbank Accession No. AI145931
tttttttttttttttttgccttttaaaaaataagatttattttaatttacgtgtattctggagaggactatgtacatttgagtgcagatgcctgaggcagctgaggcactggatcccctggagcttggctttcaggcagttgagtgcctgacatgggtgctgggaactgaacttgggtctttggcaagagcagtttaggctcttgaccactgagctggctccgcagcctcccacactggcctttgaagaaatactgatctaagagagcgtggttccactcagtagctcttgggtctcagtccaggtctattcccaggaggcctagtggatcctgcgggtcgtgtagtccagaaccatgctggccgcaccaagcagggccgggtcaaccaagtctgaaaccactacatccacatcctgcacg

SEQ ID NO: 1783 - DNA, 475 bp, Rattus norvegicus
  Genbank Accession No. AI146005
  misc_feature (1)..(475): n = a or c or g or t
tttttttttttttttttcactaagcaaaacatattttaataggaaaaaaatcacttcttttttaaaaaagtgtcctttcatgccaaggtgtatacacacaatgcatgggctaaaataggcagctgattcccggggtgagaatttaatatcctgaggttatgaagccaggccacatccacaagctggccccagattcttggctccccaggcccgggtgacaggcaggtgcggagattccagcctcagcactcacagcagggcagcatctacggttcagtcagtgtctccatccccttcactgccctccagggagctggggaccttggcacctgtgtcatccgctccaagtgcagtgccactgaagttgtggatcggcaaagtgttaagccactgggccatggaccgctcatcccgctcagtgctgacaatggtanggtagatgtattgctccttgaaagcagtcaccttcccttcc

SEQ ID NO: 1784 - DNA, 483 bp, Rattus norvegicus
  Genbank Accession No. AI146033
ttttttttttttattttcacttattttacttttagtaataaattttttctatctcatacatgattggacacatattttgcttttaaaattaacagtcacaaagaaaagaacagtggtttatttttgcaatcatggtgaccacgcagacgaatcttaaggcctcaacaacactgcatcttaccatttctactgcacagaaaggccttctgttttgactctttctggtgaacagtgattttttctccggtggtttccgttggccaggtagtcatgacagatgatgtaccacggcgcttgctgtgtcaggggattctccaccagacgaatccttgttctgactgtgacagctgctggcaatctctcagtgcaagtccgtgcctccggcctctaccgtggttggcctaagaggcctgctttggctgccagggcttcattctcttcaggtttcacctctcttgttgtgaagtctttaacacagtccaa

SEQ ID NO: 1785 - DNA, 497 bp, Rattus norvegicus
  Genbank Accession No. AI146047
tttttttttttttttgtggccagttgtttatgcttttgagattagactgaatggttgttaacactaggttatgtataaaatatgatctctggtatctgtccgtcttctattgaagtgccgttgttattgccaggggaactgaagaacaagaagacagtcttgcttgcagcaggggtctcatgcaccactttcttcagtcctttggtgccatagtgagaatctggacccttgagtgttgcgcatgctgtgtaacagacattgggcaggatctcaataggttctttgaacatgaccctgaatgtgttagcagtcccatcacaactaaatccagtatcgttttgtcccaaggtttgttttttctcatattcaatgatctgtatgttcacttggtagtccgtgggcccgtgaatagatccatacaaaccgaatccaactacagagattctcctgttaactgtgaacctgatccgatcgctcgtcccactgtaaccccagcg

SEQ ID NO: 1786 - DNA, 505 bp, Rattus norvegicus
  Genbank Accession No. AI146063
  misc_feature (1)..(505): n = a or c or g or t
tttttttttttttttttcaaatttgtaaagaagcaaagtttactagacaaaaggccatacatgagactggaaaggaagtagttactgtcctttggtcttacagagtgcatttttctacttcgtagaagtttaagaattctgccagtgaatgctttccaccatttccgttttcagagagaacacaaggggtcagaagatcaccccaaataggcttcagagtcaggctggaagggcagtttgcggtgggcacatttcatcttcctgtgtctgcctaaagccttgtccacaggtcttgcatgtataagtcttctcccccttgtgtgtcatctgatgtaaggtgaggcgtgacttctggataaagacttggccacactctctgcacacactaagcttctcttcaaaatgtacctgcttatgtgcgattaaagctgagcaattattaaagcttagtccacgctgcctgcacgcatatggtctctcncttgaatgcttcctcttgtgtctg

SEQ ID NO: 1787 - DNA, 583 bp, Rattus norvegicus
  Genbank Accession No. AI146090
tttttttttttttttatatttaacaacaaaaaattttattgatttacaaattttaaaatggatcacttaaaagtggggctattttaaccttattacttttaaactaattctttcaaaatgtactttatttttaaagtgacagcaattacccatggaccaatccttttagcatattgttttctatgttatgtcaaacggtctgcatagcagagcagagcatagcagagcgcaaagcttgtgcagtggtctttacacagaagtctgaacacaggcagaggcacttaagttgtaaactttaaatagtggcctttgctctgtgcattaggacgtctgtgtcaagaaaacgatgtgaaagccactgcttagtactagcataacaagtgggacacatttaaacaaaagtaaaacttaattgtgaagtatgttttgtaaaactacttgctacggcctacatttcagttggcttgacatcatcatgtaagaaaaaatttagcacagaagattcagtctaaaggattttttttgcatcctccatatgcaaagagcacagcttagtaatttacatagttctcaagcttaatcg

SEQ ID NO: 1788 - DNA, 482 bp, Rattus norvegicus
  Genbank Accession No. AI146119
  misc_feature (1)..(482): n = a or c or g or t
tttttttttttttttttaaagttttttgtttgtttgttttatttttgcttgtttgcttgtttatgtgacagaatcccacagtattgctgaggctggtcttgaattcataattattctttcctcagtttccctaatcctggaattgcaggtatatatcatgatccttggccaagatcacttcttcaagctgctttgttctcaattgccaggaaagaggtacaaatatcttgtcaaggttgcccgatcaatggtgggcatctgggaattaatacttgccttttcaaatgattgttgcaccttcagaaatatatcagatagatgacaagagcaggcatgtatccggaagcaggaaatgagtttggagatgaagtaagagcctcttgttttgtctctgtangacaagtggtgtggtgttgtanagtagagggcaatgaagtccttctccacatggctcatgcggacagcatcagcttccatattcc

SEQ ID NO: 1789 - DNA, 464 bp, Rattus norvegicus
  Genbank Accession No. AI146170
tttttttttttttttttcatacaaagataaatatatttaaattttaactataagcaaattcaaacagactgttgtaaaacagaatactattcacagttgtctgaagagatcttataaaacataaaaatcagggtgctgaacagacgctggtggtgaaaacaacagggtcagaactctcacagcaaactggagaccacaataattaatgaacatgaccaatccaacaacaatcattctggtcatcctccagtctcaagaaattcaagattttctcctccttcctctgcctgatttggtttgtgaccggaaagcaaattggcctttaaagtccactaagcaatttgtagcttctgaaacaggaacaaaagacttgatgggagactcatttaagttgagctttgagagcgaactctgcctctctctgctgcagccagcctcttccacatctggtgagggcatcctga

SEQ ID NO: 1790 - DNA, 483 bp, Rattus norvegicus
  Genbank Accession No. AI146189
  misc_feature (1)..(483): n = a or c or g or t
tttttttttttttttttaaggtttatatagattttattatattttttgtagaaatgagagacagaatagccagagccttttggaacttccaagatgttcaaaatggctacatctctggggcagagaggagaggggcaggctgtcaagagccagggctactgctcttgggagcagagagaagagcaggagtaggaaaaccttatgggtcatacaggaaaacagtagttgtaggagggaaagctccgtagacacaggatctcggtgaatttgtcttcatccgtgccccattttttctcaccagcatcgtagagggtctgggcatcttttttggccagatgttcatccactttcaggctttcgtctcttccaccatctgccanagtcagcagagctttccggaagtctccagacgtttcagagctaatgtcatctctgagattcttcttatatgctgtataatatgcctgcgagatctccttcatc

SEQ ID NO: 1791 - DNA, 338 bp, Rattus norvegicus
  Genbank Accession No. AI146190
  misc_feature (1)..(338): n = a or c or g or t
tttttttttttttttttaaattaaaatgtgcgtctttaataaactgcagaataacttactgagatttcacctagcaacctagtgatcatgaagcgcaggtggcactggccccaagtgctctgcacgggccactgcgtctgtgttgggaggagcgcaggtccacgggggcagaaggcacatgtcttcctggaagtctcctcggggtaaggcaggctggcccatgccaggaaacttgaacaaaaaggatgtaagaaagccgtcttgccagccatcctcggtgccttgtgtgagtttcattgatatanataacattccgcaaacccagagatgggatactg

SEQ ID NO: 1792 - DNA, 577 bp, Rattus norvegicus
  Genbank Accession No. AI168933
ccggtaagaaaacaagggcaggagattggaaacaagatggtacatgtatccatctatcttcactaagcgaataaagttcatctggtgcaactgtttgtttcaagatgtagacaactgtcagcggaggacacacatcctacatacaggaaggcttgctccatctgacgcatggctaatgaagagccctttaccccttttagaggcaagtgagtagaagaggctcccgaaactcccaaatctaccatcctataggatgagctcaagagctcatttccccaaaacgggaaagaagtttcaataactccataattcacaattagctcaatgcacgaggtttcttttgtttgttttgtgaaatcagagtaaagaaaacaaaactaataaaaagggagcatggaaaggcattaccagtgaatgataacatacatgaggacataggtcacacatacaggtctctgctattctctcggaacagcatgcttcaactatctgaagacaggctactgccagcgcagctacttcctacaagtccggtgaggtgtttgcttcttctggatctccaatctgcaacggcttt

SEQ ID NO: 1793 - DNA, 639 bp, Rattus norvegicus
  Genbank Accession No. AI168950
atccattatgatttattctctacaatacttcattcaggactctgatgacttgtactcggcagttagagagagccaagaggcaagcaactgtaatacaataattgatctgaaatctttgcagtgaaggccatgtaatctcttcagggaaacaaaaataaaaataagaataaaaggttttctagacttctgaaatctcaatgaaaagcaacaccattagtgaaactgtagatgttaacagagcatggaaaacacattttgctcaaaatattaaaattaacacccaagacttttgtatagatgatttttttttattataaacagtaaaatatatatgtctcaactacaaacccttcatgtggaaagggtttctaacatgagttattttaacattatgaagcgaaaacgttttttaagaacctcacagtggaaacaacccaacactgacaaactctagtgatcaaagacattcgcttttagctcaggaaaacaaggacaattcataattacagagtatatgtcctagctgtgggtatgatgagacaagccaactttccagaccaaaaggcactcacagctagggatgaaacaaattctaaaccaagccagcagagttcaactggctctttgagaacagtggtg

SEQ ID NO: 1794 - DNA, 534 bp, Rattus norvegicus
  Genbank Accession No. AI168975
caaaggttcattgtcacatttattagtagtagctgcagctggactggggcttctatggggactgttgggacaaactttgaggggcaacaacaggagggaacaccattgatggtcagcaagggtcttaaaatgggatacagagcacagtgacggtcaccatggtgctgtcacagcacaaggagctactgggtgctcatttccttcctgaacattccctgagcctcagtccacgatggtcaacgcctcccacaaacctggagcttttggactctggctacttcctggaggtgaagtcacacaggccacgccctgccacccccaatcatggccagtcaattgtcttcagtaggcctcagtactgaacactcgtaactgcctgacacagctgaccctaccctacctagtgacagctggaggcattgtctccattcttgcctgtctgcctgtgacctgagaaagaaatggggaaaagaaacttccactttcccaagaaagctggaaaaaagagagggcagattgtttctgggcaggaac

SEQ ID NO: 1795 - DNA, 447 bp, Rattus norvegicus
  Genbank Accession No. AI169030
agtaccaatttaaatgatttctgtaaacattttgataaaggccacatggcactcgtcacattgttcaaatgcctagtggcaggactcctgataagaccaaacaggtcacataagcccataagacactgcagagacacagccaatgtgactaaatccgaggtggagcacacgaaggacctcatgtataatacaaaccagcttaataaataaaggagacaggtgcctgactctaggacagggtttggttccagtcacctgttcagagccttctttgagactctactgccacttccacttgtgcaagtctaatggtgcggccatgaagtttgtagccatcctgccgaactaatgccacggtgccaggctgcaccccaacacctgctggcatgtggcagatgagttcatgctcatgagggtcgtttttgtcaccgatgggtgccattttct

SEQ ID NO: 1796 - DNA, 474 bp, Rattus norvegicus
  Genbank Accession No. AI169041
ccccacagaactttatattccatactgtcctggcccagggcacaggcacctctgagtgagaataatctagacagaacggcctttcctctaggtacatcagtcactttgtgttttcaaaggcttgtctttgctgtccttacccaacacagctctctttttgaggcacgcttgagttacaaggctgatcccatcttctagtgcatatgacagggatggagatcctgggttctctaccccagcacctagctgtgatcattctttcctcctcttaccaggcctgagggtcctccaatgtatacctgccccccaattctcacactctcaggtgcttttcttagtatcagcagcccctccacctcaccataaaactggatccccttttcttttagcgccctcctatggcttcccattgctttgaggaacattagatgggtctgcaccatcccacttcacagcacattctgaccactactg

SEQ ID NO: 1797 - DNA, 506 bp, Rattus norvegicus
  Genbank Accession No. AI169058
gacagtccggtcttttatttagaaacctgattgctgaagaacaagggtggcgccatctccaacccttttcgctgggattgtttgtgaggtgatagtaagggctccagttccctcagtgacaagagacagtcagcagacaggaagtaggggccccaagggagaggcaacagctccctaaaccaaagggatcaaggtagggtggggcaaggtggggttgggaatctgctttcttgggagtctgaaaaactgcagccctgctgttcctgccactcccacgcacaaggtctcatcaagtctctgggtagagtggggttaagtgctaagaaggtgggggacaggaaaagctaaaggagcaaaggagggtatgtttggggagcgaaacctatagcctggtcgtggccttaggtggctccctgggactgcaacaggtctccctcgtgggtcttcacacaccctcaggctgggcccctgaaatccagtgctgggttccaatctgccctttgcct

SEQ ID NO: 1798 - DNA, 619 bp, Rattus norvegicus
  Genbank Accession No. AI169125
aaaacgttttattcaataatatatatacttttaaaataatatgtaactgcccaccatgccatacactgcccccatcccatttgtggtctgtggtcagctagtccttggggtttgctggagcaacaggcagccacgggatgggtcgagggcacggagagcaacagtaaccaacaaccatttttgcatacccttcacatttcccatgctttctgggtcaggaggaagtcaacaggaagccaaaggcatgtgaaccttttacattcggaagtgaggtctgatttacggtggtgggctgcccttcgggtggtctagttcctgttcgccaagcctgccaccattttgtgtctgctctcgggacgtgatctcgctacacgcgttaagacgttttgatttggttcttgttctgcttatggaaaagtgggaggaaccgcaacagaccgtcgattccccaggcttcatcgtgctgcggtgagaccactggaaagcacggtgttctcagcacaaggctgggactgctccttcaccaccgggtagaagtacgggtgctccatggcctctttggcggtcaatctctgttgatggtcttaccgcaggagcttgtcaagaagatcaagggcct

SEQ ID NO: 1799 - DNA, 616 bp, Rattus norvegicus
  Genbank Accession No. AI169127
gtaatctcttttatgctttattgatagccaggcaaaagtgacctcaactgtgatgggtggggactgtggccaggtggcatgggctattattgtccctgaagttgtccagccttggtgcccctcagcagtgagagagaaggtattagaaaccattcaccagctcaggatgcccgggcagtacttgtcaatcagcccctgatagtagggccgcaggctcttcacttccggtaggtcagggcacttggtatagaggtcaaacttgttgaactcttgcacccaaggcagcatatccaggtcttgctgactgcacagctgccggtagtcaccgtcggtgtgccacggatagaaggaatggaatcggaccatgtagaaggcctctgaaggtagggagaacttgttgaacttcatcatctggtataggtactcatcatggccccaggacataaggacattctcaagtccacagtggggctggtacatgccaagttctgtgctgtatcgagggtcctggaggtcaggattgtcctggaaagtagagtcgcagaacaccacggaggcctggggacggcagcccacggggaaagtgtctccaacaacagcccactgaggttccccc

SEQ ID NO: 1800 - DNA, 631 bp, Rattus norvegicus
  Genbank Accession No. AI169144
aagaacactctcaggactgagcggatgatgttattttcagaaaatgaattttcagatattcaaatgatgcaaccaattgaaggaaaaaccatcagttcacagggctcttccttaaattcagatggacagagaggaatcctgccagtcaggtaagcatggaatccagggctgatgtgtcacaggctcacttcttcacgccgaggtcagtggctgatgtagatcacacccatgaggccatccacaggatagttgcccactgaggaggttggtaactctgcaccggatccagccacctgggctcagcccccgctgttctggatgtgggttctgagagcgtcctcagcacttaactaaccctttgttggttgaaggagctgggactgtttctccacacatgaactgatctttgtcataaatcacttttataatgagtgagcagctaggacacgttgccacatcttctccattttccaaatcttccttggtgatggagaagttatccccacaggggcaggggtagaaatacgtctctgtgtcctcgtcatattgaaagtcctcgatctccacctcgtcatgaaacaccgccatggtcacccggtccggaccgcatcagtttgcctagctgcgccca

SEQ ID NO: 1801 - DNA, 588 bp, Rattus norvegicus
  Genbank Accession No. AI169150
acaaaatatattttattttgacagcaatgcacacgatgctgtaggtgaggcatgcgactaggaatccgcatcacaggccagtgcagaaatcagtggaactaaatattgttcttaagtcttgaagcttcattcaaggtgaagacagagttgtgtcactcaactgggacgcagtattatacttccactgctccagacagccatgccgctgaccaagagtgcacagctatggtgatgactgtaagcacaaatcacattattgccaatgacagtgtcacttgttcaactcaggcaaatttccttcatagatgacttggaaactgagcagacatatatccatctactcatttgtataactagctgatttccctgtcctgtctaattcaccaaaagcaaggatcagtttgcctagaaacagtttggataaagaagcatattctaatactttgtaatgccataaatttagggctgaaattgagtccaatctgacctctttccaatagggggtggtatcgggtccagctgaaatgcagtagctgaacttctaaggaaagatgtgaaataatgacctaagcagagacccggtccttt

SEQ ID NO: 1802 - DNA, 671 bp, Rattus norvegicus
  Genbank Accession No. AI169154
agaggcgtgcatcatttattattacacagtattagataatgaagcagtattgttgacaatgacactgccgtcacacatacctcaggtcctcacatttctactgtgggatctgttttatcactaaaatatttacagtaagaatatggtagagttggtagcaagtttcatcacagtctaaaatgaatggcacctttcgccatgtactaagcagcgctctatttcacaggagatgggttccatgcagtcactgctcatcacagccccctggaagactactccactgcctttgtaagactgcttgtgttggcgtctgcgatggtggccaaataaatgagatttctgtgtaacacatgctgatactggacgcactcgttcgctcgacccttgttctgatactccacgatacagcggatcagctggtcattctcctccaggagctgaaagatgggcgagggggaagcgcagggagctctcaggtgaaggtccggggcaggcgccaagttgaccctgctcccattccttcctcggcccacagactgtccccaccacggtccggcccctgcaggaagctcctgcaccaggtctccggctcgcggtcgctcacccgctggatagtctcctggttgaccttggccttgccgcgtaaccagtcaggagcgaagcctcgtgcc

SEQ ID NO: 1803 - DNA, 668 bp, Rattus norvegicus
  Genbank Accession No. AI169159
ttttccacataaaccttttgttttaataaataatatttgtggcttagattttgaatcacatttacagataaggaagactagacctaaatagtaacagtgcagctagtgttcctggaggaatgtgcgccccacatgcaccttacgcccaaagagcaggggacagcatgcacgactcactctagacgagagcaggagcagggaaagaatgggtctttgagggctgcacacaactgaccccacccatcccactgtaaaccagtgcacagctgtggcgtcagatgggctgggttcttgcccacaccagtggcccttctgttgacactgagccaagggcagtagctgtagagggtgtccactgattaccagtattagaacagaaagaggaagccacacagttaatctgtttctccaagagtacagccgtgggtgaactgcacctccttaggctcagtccagaaacttcctattggcatttgcaccaaacaaggctccgcggacttctggcatcatctgctgggctattaggtccagtcggctttccagagtgttggaaacctttatcttgcggtccccattatagatttcaactccaccagctatgtcctcaggcaggtaggcctcctggtcaatctggacgtcaacatcttttttggtggcaattttataca

SEQ ID NO: 1804 - DNA, 702 bp, Rattus norvegicus
  Genbank Accession No. AI169170
aaagtgaatatacaatttttatttaacattcaaacttcattaagacatgtgcaatatggcaattttactggggggttgttaaccctacctaggatgattgcttgctgaggcttagcaacagggtccagttcacacttagcactaattaaatactttattgaataaatacaataaacaaaatgcattcaaattttctctaaaaaaagatcactttaaagtcctttctagtcaggctaatgacaaacacaataaaggcagatatgctagtttaacataattggctgattttatacagcacttatatcttttagtccacaagtatattattaaatgatagagaacatctaatacaaccatttctacataactagtaaatgaatttctaagaaaaaaagattttacagaccccatcttttatacccacccccaacagtctaactctaaagaggataaagccaatgcctttcctcacaagagctcaggactaaagtcgctttgctatcagaatctgtatttgtgatccgttatgagcattgagacaagattcaaatattctcaaagaagcacaatgcacgttgtgatcgcctattcagcaacagcgagcactgcattccaaactatctcatcccaggaattaaattaggtcagccacattcatgggcatttcctccactgtagtattgtagaaagtctcaatgtcac

SEQ ID NO: 1805 - DNA, 702 bp, Rattus norvegicus
  Genbank Accession No. AI169176
ggtccaaatattcatttattataaacgagggtgcggagtttgaatgctcagaaacaccaattaacacaaaactaaaacagccagtgaaacaggaaccaacagggaatatggaggcattcacatctggtccagagctaccatccaggctctccacccccacccttggtccagataacccctggccctggtgtccctgctactggaacaaactggactgtagtacaggagtcaggtattctatgaagctggtgtcaagggaaacggactgtcagaggtcaggtttcctgttctccaggaaccaaggatttcaacctcaccaattatcacacatctggatacaaaaaacaggcaatatgtttggctaatcgtaaaaagacactgtagggagaaaccagagtgtgtagtagacagaggcccctggcctggaagccactggagcctgaatagtgaatacatgtggccctctacatagtcccaggaaagacagtgggaccgtccagacagacagctgatggagacggacggggctctctgcctagtgtgctctgacatcagtcactgacccactgccactgaggccccttgttctctgtccagctaaatgcagccaagccctgggaataaacccatagcagcagctagctggctactccccaaagcaggacatggacccacaaaaagcttgctctcctatgtgtggca

SEQ ID NO: 1806 - DNA, 637 bp, Rattus norvegicus
  Genbank Accession No. AI169177
aataatgacaggcaatcaagtttattcgtgttcacagaacatactaggcgaccccagacagccgccctctgacaatccatggacccaagacttccagtcaggaagacatcaaaggccacagaccgtattcccaagggtctgccaaagtcttacaacagagtcgaagtgctggaaaatggagtgttacccctaaacctatgccccccgaccaagactaaactaatcctcccacaactctgtctcacggaccctataaatcgtaataaatatctgtgtcacagcaagggggcatatctcgcacccctgcataagttagaataaatattacatacacccctccttcacctaggaggatatacataaatacataaatattaattagacaccgagaagacctccgtccgtcaccagtgagcctagccaggacccacggtgcctcgggctcgccccaagaaccggcatcttggcggtagtgttctgagttagcgttgccttataagtcccagtttgggatacgttcttgcgcaccaggtacccctggtgcctctttgggttttttttccggactgtgacccatcgcgtttagaatgccgccgggtgttgctggagaaaagctttgagatccagagcatagtcc

SEQ ID NO: 1807 - DNA, 351 bp, Rattus norvegicus
  Genbank Accession No. AI169211
gacaaaggcaaaagaatctttatgagttttaggtagtctggtttacatagtgagttctaggccagtagagatacacagtgagacccccagctccccaaaaaagaaagaaaaataaacagatgttactcacacttgatcttggctgagccagtagagatagctgtggaacgggcaaagagcttgacaggtattgtagttttgacacggcgaaccaaagggactgtaacacggggtcgcttcacgggaactgcccggggcacaggcactggagaaagtcggcctcgataatcaaacagcctgtatatggcagttgctgctctctttagccccttgggtctattaggcttgggc

SEQ ID NO: 1808 - DNA, 646 bp, Rattus norvegicus
  Genbank Accession No. AI169228
aggtcaattcatttctttattttctgggcccggtaggtctgttagtctgctgtaacgcaatgcttttacttgctatggagaaatactctgtcttggcccctcttcactaggcgaagccagttgtcctccaaggacaaatcaaaattcaacaccatggcaggcacatctaattctcagaactgagtctgctgcttgacagttcctgtaaacggtctgtcaacactgcgcctgaggtgcacacatgacttgtgtgagcaacattcacaggcagccgagtccatcagaggtccaggagaaaccgcctgacctgagccaggtacttgggctgcagatagtcgcctagctcttccttactggcccacacatgccgaccctttttcccagtctgcacaaagtctcctgtgagcagcagagctttgaagaagaagactttgaccccaaggtcactctctgtccgaattgccttagggaacttgaacttgtagtggccacagggtgcattccctaagaacttggcttccatgttgttttccgagagtgtggccaggattcgctcagctgtccctcgaagggtctccccaggctgccactcgacttgaggaagcatccaaagatcttggtctccaagtttctctctgactaagaa

SEQ ID NO: 1809 - DNA, 716 bp, Rattus norvegicus
  Genbank Accession No. AI169231
  misc_feature (1)..(716): n = a or c or g or t
ttttttgtgttgtactttaaagtctcaaaaacaaaacaacatcccatacaccccacgataactctcaatcatggctaatcactgggctggtctataaaacttatacccaacactgacggccagcaccactcaactgcactcttgaaagcctcttcagtggacgggaaaagcaggaatagcatggaaaagtcaccaattctgtccatttccaagagagacatacacaggtgatagataacatggtccagaaacggctgtcctctcctctcaagacaaacgcccagagcggcaagtattaggccatagaacgatttcaacaagacgttacaggcctggcgaagagcacgccctgtcgtgtatggagaagactgctggcagggaaggggaagaaaacaaactagatagcaggcctgaatgccaggaatctctacatttataactgatcaacagtactgctctctcccgtttgctcaattttcacactgtctggaggactttgggaggcctatcttcatcactgtatgtgttagaggtcacttctgctgaccaccttctgtagtctggcttggctggcctgggaggtataggaacccggggcgggatctcaggcttgtcttcatccgagctaggagaggctctgtgtgtgcagctagatatccggatggctggcttgttaaacgacccggctggtcctgaatgagacctncttaatctgc

SEQ ID NO: 1810 - DNA, 597 bp, Rattus norvegicus
  Genbank Accession No. AI169264
gcttttccaactttttatttagaaaaccaaatccaggttctggtgcccccccatctccctcccccaccccagccataatttaaataacttagagacagagtgggaggggatagaagagagggaaggagagagaagagccccactacagtcgcctcagcgctcgcttcttgtccaactttttcttggctgccagcttcttatctcgctcacctgcatgtttcttggccatgggaccctcagctcctcctaggacccctggggtcatagggtcagtggaggaggctgaagccccactggccaggtcccgggaagcctcagccctcccactgctggtgctacatgcacccccatggatctctgtgagcagacgggcccgggcagcatactcctcgtagttctccaaaagcaggcggcctgcctcctcattgagtgcagactctgggttaggatggatcagcaggcacttgatggtcagcagcacatgtcgtatgcccaactcagcaggccagtccctcttgagcacgttgacacagatctcaccattggggcccacatttgggtggaagattttagtcaggaagtagcccttgggtgggg

SEQ ID NO: 1811 - DNA, 561 bp, Rattus norvegicus
  Genbank Accession No. AI169265
aaatcctgatactttatttcttatatcctagctatcaaatcccatatgaattttcagcattaaatagtgacacatatcaagtttcagagatttattcatcagtgtaataaactcaaaaaaaaatcaacatgatttcatgcattcggagacatagttcctgcttaagtggaaaattgtgcggatggcttctgaaagaccttcattgtaagcagctttgcagtgaacttcacagtttagaagtctgggccttcttttttcagtttgctgtagtccacgttcacagaatagaacttatattgttcattgggacccagtttgttccaaggctctgggttattcttcctgtcccagctgacatctggattgaacaatgccaagcgcatcacatacagtgctgctccagtaccccctgctccaataaacacgaagagagggatcaagctgggatgtttcttggcttgcccgaggatctggcggagcatgtttgcggcacaggcctacctacaccgagagagaagattaggacacacactaaaccgcttctgcaacctgcctcgtgcc

SEQ ID NO: 1812 - DNA, 637 bp, Rattus norvegicus
  Genbank Accession No. AI169269
caggtagttaaggcccctgtaactcatctcaaggctcctccagccctaaggccatgttctgctgcaggccctttcccgaggctatgagagcagagtctgtctagccagaagaggctcccagtgtcctgtgcacagcctgagtcagtgctcagtatctgtactttgtggaatagtccttgggcgacaccaccaggcctcggcctttgcgggcgccacggtacacggtctctatgatgtcaaccatttcctgcttgtcttccatggcccagttgatcttgttattgttaccagtgcccaaatcaatcatgatgtgtttgttctgaagaagaacatgaccgtgcatgggtcatagagctcatacatcttgttgaagtcaggtacttctgtaatatccacaagataaataactgcaaaatttttaaccttttcggcaatgctgtacagaacctcgtccatcttcatgcaagtggggtcccagtcgtgtccgaagcgaatgacgaccacgcggtcctcctccgaaagaatggcctggtctacctgccagccattgtgcagatgcggaagcatgtacgacatcttgaacgcgcttgcgcggccggacgccgcgaactacctcgtgtgagcccacgcggcccga

SEQ ID NO: 1813 - DNA, 581 bp, Rattus norvegicus
  Genbank Accession No. AI169272
tgctaaaaagtcatcggggaaaacattaacaaaatgaaactgacagatttaaatatccatggaatccattttcattcctacactgtgatgtgcctaaaatgactattggagtgcgccgccgccggcacccctggttgtatgggaaacatcactcacagcaccagctttgccagggcacggtgggtgcacgctgacgggagccctggttggtaggagggggcagagcgagcagagtggagccagaggttggctttcattcccaaggatgggggcagcaagaggccacctgcagacgacagcagagctgtctctgaggccaggcttcctcaccctggactccttcagatcctccccgctgtcgtctgtgctggtgagaccacagataatgcaaacagagtgcatcacccatgccagagtcaccatgaggacaaggacagacagatggacagactgaaggggaagggagaaagcaaagcagaaggaacttaagacaaatgaagggagggtccccttgctccaccgcagcaacttcctgtctttccaagttgagcctcctgcaatgctgccctgccctgccctgc

SEQ ID NO: 1814 - DNA, 657 bp, Rattus norvegicus
  Genbank Accession No. AI169278
cagtttccaaatggttattttatcagatcgttcaacattaaattttcgtcatttgcaattcaaaatagttacctgaagtttgcgttttgagtgtgtatttacttttattgtacatctgttttctaaactctttggcacagttttctgggggcattctgactgccacaatacaagtcaggagagagcttgtttgtgatgccaatttcaagtatttaaatttagtttgggttgtggctttttctctttgaagtctgcgttttatttgtaacaactgtacttttaattttctatatcctctaactccagagttttcttttttgccccctccccccatagctacattcacagctgaaccatattatcaggaaaggcgccttgatgaaaagatcaggacaggaactctgaccattcgtcagtgttttccctagaataattaaaatgaaaccaaaccaaacataaacagcgtctttcctcgttttgtgagacagcctcttgtgctgcatcagtagccagaacttcagttagtttatgaaatgcaacatgaaacccctttgtcttctgggaaaaagaaactgcaatgacttgaagttgagaatgtgggtaccgccttactcacacacactcattctcagactgtgaaatcccccacgcgccttt

SEQ ID NO: 1815 - DNA, 652 bp, Rattus norvegicus
  Genbank Accession No. AI169279
ccatttggctctttttattagagaaatcgagaagacagcgagtagggaaatccccatagtgaatggaaccatcacatagatgcctttctggaaccccaaccttctatgatccccaaaagtgtgcttgtgatttcagcaacttacaaaggggagaggaaatactgagaaaggccactatttaataatgaaggagtgaaggtgtacaggttcctaaccagcctagggccaaaaataagaaacaaaaggtgtgcgcagagcaagctagcctcagactgctgagagtaaggcattcaggtgccagcctggcgagttcccggaggcaccacaaggtcaagtgcacatggaggctgttggtagtgagctgcgcagacacacagggcacacgcatgcccacacacgcatacccagaaggaaagttatcagactacacggtggtggtgattctgttccctaagagtttgtgctatgttgaaccagagtctccctgctttgggaagaggaatgactagacccaaagacctctacttctgtaggtgtcatgaggaagcatttcatgctcctgtcccaaagtacgtgaccagagagtatgtctggcttctgatatgtgctgtttcccacaaacctaggtgagcttcctttcggatggacattg

SEQ ID NO: 1816 - DNA, 634 bp, Rattus norvegicus
  Genbank Accession No. AI169284
tttttttttttttttttttttttttccaactgttttttttttttaatttttccccttttaccacaaaacaaagtagaagaaatgattaaaactgccaaagtagttaactagtagaacatgtattagtctcacacacacatatacatgtacacaggaaggaaggcaggcttatttacaagaaaacatgtaaaatcaaagtgggtgtcaggaaacattgaaaaacaaacacatacatgctacaagaggcaccactgagtacagtgctagggaggggagtgaacagaggcagacagacaggttcagtcttcacagcatcagtgcaatggatccacaaaccatgttacagctagttcatgggttaaggagctgttcccaaatgtgtcctatttggccctcagaggttgagttctgcagattccgactgctctaaaagcctacctactgagagggcacatgatcacagtaagcttaaggagttgcaaaagctatgcagaccaaagtcaccgatcagcagtctgctctcagctgcagccctgcatttttctgagaaatatcaaggggaaagtcaaacaccagtaaacactgtctctgaagtgcaaagctggagtgactgaaattcagccaatacttcgaa

SEQ ID NO: 1817 - DNA, 657 bp, Rattus norvegicus
  Genbank Accession No. AI169287
aacattacacaattttttattattaaatgagaaaatctcatttgttacatcgtcacattgctagtcaagagaaatgctgcagtgatgaagaaagtcaatgttggatcaaccaaagtcctcatttctacaacattcatttacaaagaaataatgttcaacacagcccaacacaacattcttggttttcttcatattgaagtcccccaaaaaaatcatcttctaatggggtaggttcactacataaattatagttcttcatttttacaattcaccccaaactgcatgagagatgtatcacactaaaatttctaaagctgtgaggaaatccttcacacatcgtcatcatctgatgtgtcactgctacttgtctctgtgtcatcattctcaattgtgggtttgaaagtgctgtttttccagggtccaaacttgaagtcacagatcaggccgtttttcaaaataccattttttctcagaccattcttctgtaactgttcactaataacttggaattctctcatttcatcctcagttaagggagcacatgtttcatcattttcactgtcttcctgccagcccatctcttttaataatctgtgttctgcctcaagtgaactggaaagaacatcagtttgtggaaaagtccaagaacgaatgatc

SEQ ID NO: 1818 - DNA, 662 bp, Rattus norvegicus
  Genbank Accession No. AI169289
  misc_feature (1)..(662): n = a or c or g or t
atagtttaatgtattttaatagcaaacttacaggaacagcacagaagacagacaacattaaaaacatgtacttgcatgtaggacaactccgttagaaaagtatagtgaatggatggaatctactgtatgataaaatgctacaaacaccatttagttgctgtcaataagaaatttacttattttaaaaaaatccaaatgctggcattgtccagaaaattttaacaggtttatttataattgttataaagttgaactgttgaaatgtgttcactgaaacattttgcttgcattaatgctttacatcttgcatttatattaaaaattcacacacaaatgaacgtggagaaactgccaatacctgattctgtcccctatgtttccactcgcaatcatatacttaggtacctttgacccccatggaaaaaatatctaacattcagaactactgataacaggaagaagaggaaaaaaaaattttttttttgagaatgaaatgtttcccctcatagtggactcttaagcacgttctccgcgtatgcggcgtgctagctggatgtcttttggcataattgttacacgtttggcatggatagcacacaggttggtatcttcaaaaaggccaaccagataggccttacttgcctnctgcaaagcaccaatcg

SEQ ID NO: 1819 - DNA, 594 bp, Rattus norvegicus
  Genbank Accession No. AI169308
aaagaaaggcagccaaggtagtgacctaaaaatagtccccagacctatgagtgttggcctgtgaggctaaagcacacactgttcagctgtatggctttgaccctgggtggccagggaggtcagcttgaccctgccatgttggtttgatgtgtgaagtcactgggatcattgtttttgtgaccaggctctcagcaccatgggcagaatattaagtgagagagtatttctatcctgattattgacacacgagagaccaaaagaaattttgtgaacttagccatggaattctgtgaactctctgaggaatttacagtggtttaaaatgggtgtcagcatttatccatgaggattataataaattcagccccttttgctcaaggctcctttcaattgtgaaatgttgatcgcattagatttttaggggtctagctaagagtagcctcatgtgtggtcattcccccatgttcttaccccttctattatgtacggttatgtctttgtgtgctatgacttgccagtttggaaattgctgtactatgatcactgattacatattccgagttacttgctgtttaccacacccaggaactttct

SEQ ID NO: 1820 - DNA, 563 bp, Rattus norvegicus
  Genbank Accession No. AI169321
aaaatgtaattcaaagtatgatcaatatgtaaaggtattatccagtcgacatttttaattattttcagttttcaaaatctagtctgtattttacatttactgagtttatttggatgccaaattttgatttacaacatttctctttgtgatgagatttcacacgtgtacttgaataagtagctgtacccacccatgcctttccaactatactcaaccgccttccccagcaactgaactgaaaatttgtatttaaactaaacgttttgttcctctgctacactagtgatgtttcgatgtagtcggtgtggtggcccacagtggcactgcaagggcagctctgacagaactggtgtcacccgatcagacccgctctcagggagctgcagagctctgatgtagcactgactactgacgatctcctcagccttttctacgtaatgtaagtggccttgacttctccttgatgttctcctcacatgctacatttccttgtgaactttcacctgcattcagatttcaccagaacttcctctgttgggttaggaagaggcttacctggcact

SEQ ID NO: 1821 - DNA, 665 bp, Rattus norvegicus
  Genbank Accession No. AI169345
cctcaagttctaatcatattttattctgcttataaatgtgacttctaaattctgacacatttttatattctcaatgtttaaatgatatactgaaactttattaacccagaagttttcaaaatgaaccaaatgatatgttatacaaataaggccagttttgcatagtatattaatatagtaacaaatcaacactcttttccaagttcagagaaatgggaagctggtatggtttgtagggtcaggtctaactttgacaaagccaacaatattcttagatcagagtcaaataaatttccaaactcagttccagagaaaaggaaaacctttagttaaaatctttacaataaaataattatgattataaatctcttcagttaaatatgcatacattacatgggatttttaaaagggatgaaaatggatagtttccagacaaatctaatgcacaaacactccatttatagagtatatgtcagtttaacattctctaatgttgtgttatacagtggctgttttgtgcaaacatgatgagcaaaattaagaaaagttctgcaaaattagttagttctgagatttctaaactagaaaacagttaaacaaaaagagggggtgcaatcaagctggattttacacagaggctggactggaatgaccagtgctgatgc

SEQ ID NO: 1822 - DNA, 651 bp, Rattus norvegicus
  Genbank Accession No. AI169372
ctaggcaagcgctctaccactgagctaaatccccaacccctggatatgttttaaaggaggaaaggaccagtctttgtggcagcacaaatgcttagtgataatactatgtcagtctgtctgcgatggatcagcccagggtggaggctgcttttgctttggaggacagggcttgcctgaagcgcctcttcaggtcctgcatgttgggggatcggggccgggggatgatggatgctctcctccgctccccgctaaggctgtgcagcttgctcacttctttgcagagatgttgaaacacatcgcagacgtcttcgtagttttcactagtagaaatttcaaggaagagactacccagctcattggcgagctgaagaccttcgtgtgtctgcacctgccgggcatgcaaaaggtcccctttgtttcccacgatgacgacgggggcttttccatcagggtgagaatttattttgtgaatgtggcacaaatcatgtaaatgtttttaagtgtgaacaggaaaatgaacgtaggccattacattaatttctctattgaaacaatgacagaaaacaattctatttccaaagctacagaagagcacacagtgctacttgtaagtggcgtctgatgaaggtcttgcatatctggtgtcagttg

SEQ ID NO: 1823 - DNA, 411 bp, Rattus norvegicus
  Genbank Accession No. AI169394
tttattgcttctggggtgtggggctcaggagcttttggtggggcgggtccgtttcctcttcaccaccacaggcttctggcttcaaaggatggcactggctctgcggatggccgccatacccagatcagggcggtacttgttttttcggatcatgtgcctgatgctgctgagggtagcccgagcattcttgttgatggtggtcctcacctaggaagtggcaggttttcgcttaccggatctgcgttttataaccaccacgacccctttgccatcaaccgcaggctccactccgaccgtcttgcggagaattagcccgttgtaacggaacctcgtgccgaattcttggccttgagggccaaattccctatagtgagtcctattaaattcgtaatcatgtcataactgtttcct

SEQ ID NO: 1824 - DNA, 558 bp, Rattus norvegicus
  Genbank Accession No. AI169417
aaattaaccctcactaaagggaataagcttgcggccgctaaacttttttttttttttttttttttttttgcacatcactcctttattatactgatctggaaagagacttagttgttatgcccaaacgagttctgaacccacacagtagggtcaagcagctggaacatgattcagacagtgaaagacaaaaccttggacatgatcaaggggcttcacctctacaaaacaaggcaaagggatccaaacacagcatgaggtacaaggagtttatcccatttgatatgaggaatggctttttttctggtgaccacttaggactctcaactgccactagcaaccttgttgcttttgtgctgatatatgtatatatactttatttttgtaaaaataaatgtaacacatagacttgacaagactgttcccaaccttctagggccagcagctcctttagggtcagagagaaagtagggtcttttaatcggcatgaggttacttttactctccactggaatgactaggcccccagttacctaattgtgggaagagtgcaggacaggt

SEQ ID NO: 1825 - DNA, 530 bp, Rattus norvegicus
  Genbank Accession No. AI169430
ttgattacaaatataatcctgagctgaaaaactgggatttgggggagagccatctttgcatacaaaatatccaaaggacatttactctattttctttttctctagtgacactcaactgccagagaccgttctgaaggcagacggcagagatcataattatagtttagtgtgacgcccagttctgcctccagctgcagcacttgccatggcagtggatgcggctgcgtcctctgcttcttccagttcatcctggagttcttggctgacactagactgcagtgccgcaggagtgagccactcctttgggaggcaactctgtagaaagggtatacaggagctgaagtaggccagccggttgatccagcgaggaatctctttcccacagagaatctctgacagggcggaggagaagtggttgcagttcttgtgcatcagatggtaggcgttgcctttgtactctttccccagctctttcacaatcttttctatgtcatctttccagaagtccgtctcgtgccgaattcttggcc

SEQ ID NO: 1826 - DNA, 443 bp, Rattus norvegicus
  Genbank Accession No. AI169461
agatcaaaacatttatttacttatgtttttcttatacaaacaaaaataaatcccagagataatgaaataaacatattctctaaagtatcccatgctggtttctctgtccgagaatgtggtagagtccatgtttaagttcctggaacattcctggatgctatgaagtctccatcttgtaaccatgcttctccagctcagcgcgtaactgattggagaagtcgtcttctacattgtcatcatcccaattatcctcccagacatgtgcatcttcatcttcatctaagccggcccagtcttccgcgggaaactcctcgaactcgtcgtcctcttccaggagacccaagtcgacaggctgcttcttctcggacatagcgcagcgccaagccccaacaacgctcagagatcgaccacaaagttggaagcctcagtactagcctcgtgcc

SEQ ID NO: 1827 - DNA, 549 bp, Rattus norvegicus
  Genbank Accession No. AI169611
cctacccacttcccaccattgagaagtttattgaaatgtacacatgagtaacaagtgatcttgcagtagcctaggtaggatctttggtcaggcccatcaagaccagcagtctccctggtggtaaaagggagccaagtgagaagaggccgtccacactaaggcatagaagtcatgtgaggtgagtctggggagccaccggcattatgaagatggttggaagcctggtattgtctggttctcaggtgccactgtagatgtctcttctttgttctcctctgaagatagactcctcttttctgcaattaatcttttaactcccaccatccactgactgacctcagtcacatggtcaaccatgagtgatcgatgaatgtcatctgctgtatcccactggtggtgtaaaagttcttgtaccagcagtgccatcctcttctttacaggtactgacaacttccctccatcccactgttcgtgaagcagtgccaagcgtcggctgatatcatcacatacctgcttcttcgtgtgaccacggcaatcctccaatgcctg

SEQ ID NO: 1828 - DNA, 583 bp, Rattus norvegicus
  Genbank Accession No. AI169617
ggccccaatttattgcccaataaagccagttacacctcagtgggtgacagtgtatcaataccacctttccttctggcttaagctgggttctggggtgccacataaggtcaaggctgggcagctgccggaagttccaatcaagaaggcaaggacagtggcaatcaagggtcctctctatcgattctgtgtgagggacacgcaccctctccaggcctcctgaagtagtgtgtcagcttagctgaagagtcgaatggtgccatctgccccggaggagaagacccatggctgtgtggggtggaaggccacatccagtacacccagatctcgggtcaggctgtgtcccttaagcaccttgacgggcaccagcaatgggttctgcagcaggtcattgtacaccatgccatggcaaacgataacgctgccgtcgtctgagccggatgcaaagagtgggtatcgggggtggaaggccacagcccgcaaggccttcttgtggtgcctcagcactttgtatggcttggtggaaagatccagggcaaaccacaccagtttgctgtcatagctgccacagatgatgttgtcacct

SEQ ID NO: 1829 - DNA, 602 bp, Rattus norvegicus
  Genbank Accession No. AI169624
atggcacctgctgtactttattgttgttgacagacatggttggacagaacctcccaacaggtggacggtcagatggaagtcaagcttgagttctttccgccccttctgaatctgttgaggaaggctgtctgtgattggacagtattcaaacatggcgggcgggcatcagaagcatggactgtgatcccgagtggggccctccctcactgtgtcaaggtcctgcagcagagcagcacgtgcccctgactccggagcctcctgggctggtgctgctgggttcacagcaggatgcatgaccaggcctcatccacctgctctgaaggcacaggaacctctgtcggcacttcccaggagctcactggggaaccacccctgttcataaaacatgggtactgcagccacagcctcgcctctgaggccaaccgccgccagccttcttggttcccaccagccacgttccctgttgggtcagcagggtccaggatcacaggcctggattttctgagctgtctgtgtaggtatttggagacatctgggtgttgaaagtcataatactttgtccagtagattcgaagctgctggtactttgtgaccagttccaa

SEQ ID NO: 1830 - DNA, 605 bp, Rattus norvegicus
  Genbank Accession No. AI169631
aagagatatgaagtgattttacctttatttccttcatgttaagccaatcattaaatttcacagtgatttctggggtggggcaaaaggaaggcgtcattcaaagcgatggaggccctggcctggctggccttactgggggagctggaggagcacggactgccctgctggcaggtaggtgatgttccgagagcgggagagctgataagcaatgtcctcagcagcttccagctttcgcagctcgatcaggccatccccggcggtggccagtgagttggcgatcagctcagccgctttggagtcaccctcagcagaaatgatggccgccttcttctgctgctcaaccttttccaccacaaatctggctctctctgcttcctgctgagccacctgtttggcttccaccgcctctgtgaactccttcccgaaggtcagatgtgtcagggacacgtcatccaggatgagcccgaatgttgctgctcgctctgtgaggtcatcactcacctgcctggagaccaactctcgctgggtaatcaattctccagcatcgaatcgagccaccaccgacttgaggatctctgtggtgatagatggcagcacccgctcat

SEQ ID NO: 1831 - DNA, 581 bp, Rattus norvegicus
  Genbank Accession No. AI169643
  misc_feature (1)..(581): n = a or c or g or t
cannnnctctaccactgagctaaatccccaaccccgtggctcacactcttaatcccagtacttgggtgacgaggccagaagatcacgagctcaaggtcagcctcattcatatattgagagtttgagaccagtctgggctacaggagaatgcctcaatcttagcataaaaacaaaaaaattcagtcagtcgcagtgatgtgcacctttagaagcaacacatggaagtcagaagcagcagatctctgtgagtttgaggccagcctggtctacaaagcaagtaccagaacagccaggggtatgcacagggaaaccctgtctcaaagaataaattaataaattaaaacataacatttcaatcagtcaattaattaaaaataaggctgagggcagtgatggtgaggtcacagctggacaggtaaggcagaagcaagggactgtcacaaataccaggtcagccaggttgacaaagtgagttctaggccacccaggaggacgcagtaagattctgtctccacctttaaccccatccagagacaggatggtctcttgtgaggccaccctactttacataatgagtccca

SEQ ID NO: 1832 - DNA, 547 bp, Rattus norvegicus
  Genbank Accession No. AI169668
gatccaggagggtatttaatttacatagcagccacgtggggcctgtcaagctgggcagtggggtacttctaaccccagatggcatcccctatccttttccttcaggactgtcttcacaggcccttggataggtcgccccacattgtgcagaggatgctccagttgaaaggaagagagaaatctgggaaataaggctgtccccaagcggggaaagtcctaaacctggagttggttgcctacatggtagctcaggggtcttgcaaaaaccagtccacgtcctaggcacagttcttactcagctgggccttcagaggaagccctcccggcggaactgttcttggaggagggctcggtactggtcaaatcctccctcgacccgagtgacactgcctttctcgcacacccacagctccttgcacaccagtcggatgaagcgctcgtcatgagataccagaaccacaccacccctgaagttgttgagagcatggcccagagcttcaattgtctccatgtccaggtggtttgtgggttcatccagaatataaaa

SEQ ID NO: 1833 - DNA, 583 bp, Rattus norvegicus
  Genbank Accession No. AI169676
tttttttttttgacagttttgaaatcatatttattaatgctttattatacatactgtattctattagagccaggggaacagagaacccctctcaaatgagataacaaacttgctgtcttttacaaaatttaatcagaactgacaatgttatggttaggtcttaattcctgagaatttgaacatcattaagttttctgtgaatttacattaaaacactcatgttaatatttaaattacaatatttctgaaaaaatattgttagcaaggaaaaccattctccactgtacagtaactcagatgtgaacacactgaagccctgttgctcggcagcttaacaccatttaaatacttctctccttagagcctggacttcaaattcacgagttcatggcaatttatccagactacagtgacattatttttaactaaaggtaacacaattacctgtcacttcccaattttaagtgttcagggagtcagtttgtgaattctcgtgttcgggaataattaaacaaagaacatttttaagaaaaagagaaaatattggtactataaaatggtgactaatctgatataatcaaat

SEQ ID NO: 1834 - DNA, 554 bp, Rattus norvegicus
  Genbank Accession No. AI169690
gtagataaattatcgccagcataaaactgctaatggagtttgcatcatggatcccattaactctgtaaaggaagtgaggttccatggtctcataggaaaaatatatctctctgcttggataaagtccgttaaaagagcaaatcaccttggaaatgttctttacatgtctccaacctatgaatacacaataaaacaaaaggtatattaaaaaatataacttttcatttaaaaagaagaattaaatactaatgatgtagaggtaaaatacatggaaaatatacaggtgaagttctaaaaatttctcctattttattagtgcatactaaaaatactcaggaaacaacaacaacaaaaacaataattacagctgatcataaaataaagtacagtagttttacttttaatatttaggggaaaggtcaaacaaaatgttgtccattcaaacaaacaaattttaataactttgattcaagtaacttagaaacatggttcacgtggggtttaatgtccatttatggctaaatatcattttaagagagaccaaaattaataac

SEQ ID NO: 1835 - DNA, 621 bp, Rattus norvegicus
  Genbank Accession No. AI169708
atcgtgtacaagttatctacattttattgtatgaaagctacagattcagtattagacaaagaagctaatggacactattcaaatattttaaggttaatactttgattatttggactctatcaagaataattttattctgcacatttttctacaatgtaacttttacattaagtggttttaaaatttaaaaatgatggatttttgagtacatatcagtattcacggagttatatgtcttcctacaaaggttatctaccttgataaaaaattagtaatttttagaaggtggttcataaattagaatgacgctgaaatttcatttctgtagtgcattgtcaatgagctctactcattcttcattttcttttccttctttacaaagaatcggtacatgaacaagagacattttacagtaagagctgcaatgactgcaaaacaggtgagcaggaatccaatcacatccagagagtggtactggtaccagggaaggttatgtccaagtggtctcaggtgcttggcccctttgtggcgcatgataaactcaatccagaagacagctctgtccaggggcttcataggctggtcatggtgaatggttgacaacaacataacatttttttt

SEQ ID NO: 1836 - DNA, 629 bp, Rattus norvegicus
  Genbank Accession No. AI169735
agaaatacccaatttaataaagatggagaaaaaaataaagccagatcccaaggtccattccctcattcatcctcagagtcattcctggctggagaatgagcttatgagggaaaaggtcctatacaacaggtcgagcaagcgcaggaactggcggtctctgtagtcaaagcgctctccaaagacaatggagcagattatgttgcctgtgacgcactggaagaggaacgttgggtccagggagactccctgatgattcttcagttcctccactaaacatttggcctcctcctttatctgatcctccacactctgctttcctatcccaaagtctctcatggtggctacaaataatcgccgaaggatcttccacctttcttcattaacaaaggacacaccgtattcctgcataattggctgaagcacagcaattattccccggccagagaaagcctcagcatggtccaccagagcctcccttatggtctgtgtcccacacagcatgaccacaggcctaggtccaaagtatactgtgaacacatctccgtgtttttcttgaagctgaatgaaagacttacgaaagcctcctctgtccatctgcaagaggtttcccaagaggggtaagggacggg

SEQ ID NO: 1837 - DNA, 623 bp, Rattus norvegicus
  Genbank Accession No. AI169756
aacggtgtcataaataagtaatataactttattaaaatgaaaagacaatattcaaaataatgcaacaaaatgaacaaatcctttgtccaatactgtacacacagtgcggagatcagtgcattttctaaagcatgttttaaccttcatttagttcatactaaaaataagctttaaatagctcaaataatgtcattcagcagtttaaactgaacagcttgttgggacatggcagcggtgtccctctgttagcaagcaccttctctttgtgcttatctatacaagataaacaatcagaggatgtaaaaattgaacacaagctacacgtctcactgactctcagggcagtgaggcagccagctgtgagttttctaagcaggaagatgctgaagtgacctctggcattaagacgttctgtgctattggtcagaagtgtttcacttaaaaagcaaacaatccccaggaaatactgaataggaaccaacaacacaagaccagcttgtgttgtaatttaaagtctcaaaaacaaaacaacatcccatacaccccacgataactctcaatcatggctaatcactgggctggtctataaaacttatacccaacactgacggccagcaccactc

SEQ ID NO: 1838 - DNA, 580 bp, Rattus norvegicus
  Genbank Accession No. AI169758
ccaggttgtcccacacttgatagtttatcacagattataattgcagttctgttacctgatttgatctttcacagaaagccatcaagtcaagcagggaagcagttagtcctacttacaaaggaagaagcaccccacagaccactaaagagacggatgacctacagccccaggcccacccattcaacaggcctagctcattcccaagcccagacatcaaggcatgggacacccacgcatggcagcttcgtgtccagctttattagggacagcatgtttaggtgaggtctggggagggataaaggcatgagaatatactttccccttatagcaaccttcggaggcagcaggatagatggccagacacatctggaacatggaggtctcacggctcaagagttggtgttgttagttggtcctcagggccagactcccagaggccagtgaacttatcagtgaacttgctccagtagcctttcagggatttgaagcgattgtccatccagcccctggccaccacagctatatcagactcctgcatgctgcttagtgcatcctggaccgtcttggaggcttgttccat

SEQ ID NO: 1839 - DNA, 202 bp, Rattus norvegicus
  Genbank Accession No. AI169883
caaaaagctttatttttacttggcccaagacttgggaaaggctccagggcggttacaaagctgcctagtggctttaaaggttcattcgggtggaggtgctgaggcggtcggtgcaaaccaaaggagggagccccttggaaggcacaaaggcctaatcgtgcttcaaagtgaggcgctcaaagagatacccgcccaaaaatgc

SEQ ID NO: 1840 - DNA, 581 bp, Rattus norvegicus
  Genbank Accession No. AI169903
ataacgcaaaacaatctttaatgttagatctgtatttttacatttcccaatacctgcttaaaatagacaccaagatctttgaaatacaagcaacaattgtgatttgtaatctcagcacccaagaggctaaggcattagtgtaagaaatacaagaccatcttgagctacacagtgaaaacctgactcaaagagaaggaaaaagaggaagaggagcaggaagaggagcaagaggagggaggaagagaggctgccactgggaatcctggtacacacttttaattccatcacttggaaggcaaaggcaggtaatccaagttacaggccaaccagggctctcacacatactaaaatgaatgataaatgggaaaaattttaaacaaaaaacagaacactgcttttgattgatatatatatatatatatacatatatatatatatatatatatatatatgagagagagagagagactcaatgcatctaattaacattatggtggtgaatgatggtgaaattcaaacaaaacagcttttcctctgtatccccagcaatggcttctgcaacacatctgtgatggccctta

SEQ ID NO: 1841 - DNA, 557 bp, Rattus norvegicus
  Genbank Accession No. AI169947
ccatttattgtatagttagagtttcaatatcttttcatttgggaaaccaaaagataagagaataaatgtacattcctactaaacttgcctttgaaactttaccaatttaaatgatactatattacaagattcgtaaggattgacacaagaaaggactgaaggatgtaagacatggcccatggctggcaaaaccggaaaggcaatggatatatttcagcacttcctatgtcctcaatcaccttttagaaaatccatcataagccagaatgtacatggtagatgctcctcagaaccacctcaagtgacgccacataactaccgcttaggttgcttcgaactaggttcaacctctgtggaaccccaagtgcctggtttgagaaggtggctaaacttaatgtaatttatagcaaaaatatacatcataattgtacctgcaacttttagagacaaaagtgattaacctggcactgacatccctctatcaaatgccggttaattgaaaaattagaaaatatcacagcaatataacaggttggggatcttaataggaaaagaac

SEQ ID NO: 1842 - DNA, 449 bp, Rattus norvegicus
  Genbank Accession No. AI169984
catggacgcactttattagtggcttactggaggggaggggtggtgggaagatcagctgggtcctcacaggcatattaatgggctaaggcagaatggatttcatcctagttgaatgtatccaggttgtcataagtgactatcagaactagacatgtcccaaagccctaagggccactctcacagtttatccacttataatctgctgggaaactaagtagaagaacttgacttattctgaggcaattgggatggttacagctcgagatggtcatgtcaaactgaatttataaaaaatactgtaggagttggggatttagctcagtggtagagcgcttgcctatgaagcacaaggccctgggttcggtccccagctccgaaaaaacgaaccaataataaatactgtaaatactactagttaaaggacagaataggacatcggttctccctgg

SEQ ID NO: 1843 - DNA, 442 bp, Rattus norvegicus
  Genbank Accession No. AI170002
aaaatctgataaatatctattacggaaaaatgtttattttgaaattattttaatttagaaatagaaaagtcatagttaggaggaaagaaacaaaaaccacaaagcatccaggcaacttttacttcatgagcttgtcaccccctcattggttcaccagtcccacgatgagcaaagactcagccacccacaataatgttattaatagggatgtggatcagtttcacaaagaagccgatgaaccccatgatagcgaatccaatcgctgtggccatggcgatcttctggaattcttttctatcaggtttggtgcatcttttaaccagccgaatcgagtcctttacaaactgccgacttggctcgacaaactgcattacctgatccatgtttgcctcgtgccgaattcttggcctcgagggccaaattccctatagtgagtcgtatt

SEQ ID NO: 1844 - DNA, 462 bp, Rattus norvegicus
  Genbank Accession No. AI170053
gtaaatttttcattttattcaaagttggtacagaagttctaacatttccataaaataattactacacttcagttacaggacaaaataccacagaaaggaacggactttgcaagaaatatattcatcttaaattttcaaatacttctgaaggctagtgcagcagctggcaaaataacacgtgtacacaaggaacagagaggtttgtagtcagcaataaaaacggacagctctttaagcagatttgcttcagttttctccccatttaataaacagcaacacttaacacagtaaaccaagattatacatgtctacagttttagaaatcagttgtatacagtataggcaaggtaaaattgtcgcggataattaacaattttaaatctacagttttaactgtttttctttcaagatggaagtcagctggcttacaccaaatcctaatttctttgaaactaaagcctg

SEQ ID NO: 1845 - DNA, 355 bp, Rattus norvegicus
  Genbank Accession No. AI170242
ttttccctcctttttttttgttttttttttaaacttttatctttgtaaacaacgcacatgaaccagatgtatttctcagctttacacaggggaaaaggggaattaaaaaaatacgcaattgcccagcaaatgcaaatgtttaaaaaggaaacacggagaaccatgggaatggaacaacagacagaacttcaaacaatgagagaaaaaacgaacaaaacaacaagagaaaacacaacagatctgcaatccaccaatcgctttttcagctgaatgggggttactttaagaccagaagttaaagtcactgctgctggtaggctgcctaattccgagtagctggccctgccctcgtgcc

SEQ ID NO: 1846 - DNA, 603 bp, Rattus norvegicus
  Genbank Accession No. AI170265
agccacattcgaaactatttatttagtaatcctataattcaggcttcttttggcccttaacctaggccctcactgctccaggcatggggccatacatcctaatagagccaaccagcacccagcagcctacagccacagtagagacgctataaccttttcatctggcgccgttcctgtcggcgttgtcgtttttcattgagctctggtgctggggctccactgtctgctgcgaaccaggggcccagcacgtttacccacaagaggtaaagggcccggcctggagccagaagccagaaggaccagatgtagagggagagacagctgagcacctgaacaatggctgtcagtaggatcacatccttaaggtgctctgccatgccctgctccatgttgaggtccatgccaccgtccaccaaggacccgtcctcagagaaggatgcccgagccattgagctcatagagtggtagctggccccgtacacggccaagctgaaggccagggccatccaggcccagaatgaggcagatgaatagaagaaagccaaggtcacaaggcagtagatggcattggctcccagaatgatccgaaggtaaaacttgaga

SEQ ID NO: 1847 - DNA, 577 bp, Rattus norvegicus
  Genbank Accession No. AI170268
tccatttttttttttttttttttttttttggttttttttagttttttatttttagtaaaaataacaaagcagaagtagccatgagggtgggggattgaactgctaggctgctaagcacagtgacagacttcagctaggcctcttcaccttaccaaaaagaaaatatctcaagtttcttaagttttttaaacaaatcacttatgctgtgataaaccaaagatgagtaactgcatccaactaataaaagtacagagggtttgacatatgatcaactcttgttcttaaccatatttattattctgatcaaaacactcattgaagctttattattccggaaatctaggatattagtctccaattttttttaaaacatgcataaaatatttaaggtaagatatgaagaagatggtgtgctcattgctattctttactttgtggataaattgtatagcatattagaaaccggatctggagttaaactggtccagatgattcagagctccatagagcttgattacatgtctcggtcccaggtgacggttttgggctccttcagagtgacgtgtttaactctgca

SEQ ID NO: 1848 - DNA, 612 bp, Rattus norvegicus
  Genbank Accession No. AI170289
gaaaatcgcaaataaaaagtttaatttcagaatccaagttcatcatttataaatacactaaagcgtagtccacgcaaattcagactaagcctacatacagtatttcaacaaaacattttttttaaaaggtcagaagcaaatgaatgatttatccataatatttgatttgaaatgagaaaatgaaaaactttttttagacattataagcaaaacctttggagtctggtaaagaatctgacagctgaaacttcattttgatagccttgggatttctataatgtcccaaggacggttgagtcttccctatcacaggaaaaaaatctagatgcctaaggcttttctcatgactgcaataaacaagtgctctccctgttaacaagctacctcctcaaagtagaatctgagctatagtctggtcaaactgggagggggtcagtgcatacttcttatgagatagctttattgtagagagacgcaaaaactaaatcagaggcctggagatttgatcagcgggccatctgttgtaaacgtgtcatatcatgctctggtgaagtccgaagcatgactttaaaacgtggatccaatttcaaggagctcatgataagtgggata

SEQ ID NO: 1849 - DNA, 580 bp, Rattus norvegicus
  Genbank Accession No. AI170292
tttttttttttttttttacagtttttagttttttatttttttgatgtttgtggttcagatgaatgacacaagttacaaaaacggggccttaaaagaagcacattgtacaatgaacaagcagattgaagttaaaaacacggaaacactaacccgctaccacaagaagagacagggaagggatctgggaggggagaggaggggctgccaacacaggggtctgacaaccaaaagaggagctacctcgatgggcctggagggaaggcaggtcactccagggcccccaccctgacccactacttaccatggctccccattcctgtctccacctgggcattcaagtgagttggtggaggacagcctcaccaaagggtggagccatcagatctttacaaggtagctgctcactctgccctagggccttggccttgggaggtgattgtggctgtggtgggctaataccaggagccagggtagctgatcaaaagaccagacccccaaaaatgcctgcccccctcccctgcccggctatgatccaaaggacctctgttcaggagaagccactatcaccctgcaattacat

SEQ ID NO: 1850 - DNA, 631 bp, Rattus norvegicus
  Genbank Accession No. AI170314
aactttcttagatttctttattgatacaaaggtaggacacagtaattagctgtatacatttgtgatattatgatagtttggttgttatgtattggcaagtaatactaatttgaagtcagagtcagtgtgtcttccactcactgtgaatcagaacctaacaacaaaaggtatccaagaaaatctgaaaagtcctgaataaaaacagacattgaagaactaacatttattttcttgcttagacatagtttgtccttggacatatcatattttggattaggagttttgaatgcaatgttcttgctttgtggcaacagtctgtaaagttactgattaaccaccatataaaaaaagtttatatacttattagaagaaatgagctaaacaatatttcaaatgtaaattcaaactgtattagtaatatacatgtgcatttctaaacaaaggttcatccataaggtttactaataattgtatagcgattttatacacaagtgggataattgatgtgaccctcaatgcactttgtacgaaacggaggtgatcctctgaattttctatatccaggtttacacatgaattcaatattctcccctgattgggaataaatctttgcattttccctccatctgag

SEQ ID NO: 1851 - DNA, 542 bp, Rattus norvegicus
  Genbank Accession No. AI170327
aaacatgtttattacaacagatacaattcacatctgactagctttgtttctcctttcccctcccacaaccatgttcattgggccacttccttgtatttgagcagtcaatgtacttccagcacacttgcccagcagtactttaagtccattcttacagggtgaaaatggatttcaataatttatacaaacgtgggttatgctcaatcactgcaactccagctactgtacacaggaatgagaaggttatagaaaagtgccacagcaacagtgccccaagaaaggaaagagggcacctttaaaaaaatggataaaatcaggccaagggacttcagagggaatggaacatacaggaaatgacaacatttctttgcaaaacaaatggagcagcactgctcttgatcaggtgcaagtgctgatcagttgtctcatgatatttgtacactgctcataaggttcaaaatcgtatcctcacacacagatcacctggcgcttgcactggatttttgaaaatgcaagatttctgaatgataaatcctcgtgcc

SEQ ID NO: 1852 - DNA, 627 bp, Rattus norvegicus
  Genbank Accession No. AI170366
tattttcctagaactcaaattgtctattgttctcagagctacacttccaaagctacagtcagcaatttttcttcagagcccagaggagggatgggagtaaaagacaagagaaggaagaggggcagaagacaccactagaaggctggaggacacgtttccctgtattctcagtggactacgaatggggtgtgtgacacaccagagaccaagtctggggaacatcaaagccccagctccaaagaagagagccaaccccctggtacacctcacaaatgggtcagtagtggggagaaaggagcagaaaagggagcacacgaaggggcaggttaacttttttcttttttttttttttgtgggtttttttttttgggtaattttcttttattaaaaacatttccttaaaaaatgtgtcttttcctttatgtctgggtgacatatctgactacaggccggccttgagaacagggaatgaatgggacaaaggcagcagcgtctccccaggttatcatctctgccctgagatctacagagacatttcctcaatgccaatcagttgatccttcgactctcagctatctccagcccccacacctattttcccatctgccaacattcaagcctcgtgcc

SEQ ID NO: 1853 - DNA, 680 bp, Rattus norvegicus
  Genbank Accession No. AI170392
attgttactaatggattttagttaattttttgtatttacattttatatacacatttatacttggtaggtaaagaaactgtacaataaaaaaaaataagagaaaggaatacagaatgtaggaccaccttagcaaactaatacatgaaaataaggtttaatctaggccgagtagtataaattcaaagagattattcccagaggttatgtgccttttatgagggccaccgatatcaagggatagtcctgatgctagaccctattaagactctagaaactccctcagtattctgttatactaccagtttcactgagccagtccctatgacaggagttaattccacagggttcctgaggctagaaggatcaacccatagggtaaaaatatatgtacttcctctggtcccatactcctaaggcagtttattatccaataaggaagaatctctggcttgttagtctaaagactaaatacgcatgtccatactaacagaaatgtgtgcttctatgctgtttcaaaccaaactgcaacatcaaaacagtataaatctagtcaataaccaaatggtattttacacagatattaaccataatactcaaatgatttaggttaggttaaaaattaagaataataaatttaatgtcaatttaccaatgattaataatttatatgagatgccatt

SEQ ID NO: 1854 - DNA, 670 bp, Rattus norvegicus
  Genbank Accession No. AI170403
actcttaaaaactagacactggttttaacagtttattatgattattatttaaaaatgtgaatccattaaagcatgtagaaataagtctgcacaaacaaaacatactttaaaaatgaataagtagaatgagtgttccttgattgttccggcacatcttcattacgctatagcagccaagtaatccctcacttcagttggggtgagcctcctaaagccagcttcattgcagatcccaacttctatgttatcttctgtcatctgcccttcaaagctttccttaagggttaagatggctgtgtgaatcgcatcttccagttctaagtcttcattatatcttttctcaaggaaagttttcccgttcacgtagttctttcccattgctgtggccttccaggcaaagtaagctccagatggatctgactgaaataaatatggtcgtccctcattccacccacaaataagtaaagaaacaccaaatggacgaacaccacctgactgggtatactcttgcatcacagacgctactcgctgtaccagttgggctgtgggaatgggttcttggtaaacaaggtagtactgctgagcaagtttccgagctctgtgtacaaggactctgtaatctggacccatgccgctgttacacaaaccgatgtgcttggttatgggctcc

SEQ ID NO: 1855 - DNA, 329 bp, Rattus norvegicus
  Genbank Accession No. AI170501
attattctgttcattctagtcctttttgtgttcattcgtagcttaggccaagagctaaaatagtgactaaaataaaggcagttgctattattgtagtagtattggttgtttgaatcgctcatgggagggggagtagtaaggcgatttctaggtcgaatagtagaaatgtaatggctactaagaaaaattttattgaaaaaggaaggcgtgcagaacttgttgggtcgaagccacattcatatgggtttgctttttcggagtataaatttatttgaggcaatcagaatgcaattgaaatgaggataaaagataaggtgatgttaattgtg

SEQ ID NO: 1856 - DNA, 492 bp, Rattus norvegicus
  Genbank Accession No. AI170530
ataataaaatacataaatctaatttaaaaatcagagtgagactggaatcttgtatggggaaattgtctatttcatgtcccctagggcagccaacagtcactctcatgtaggccttcaagtttcatccacaggaaatgggaatgtgggggaccagtaatcgtagccttcccgtgggttcggaaggacaacttactgggagccccccagtaggttgaggctggcttctgaggttctgcagagaagcagatcacagcactggcactccagcttctgacagtttgaggcacagcaaggcagaggatgtggttctgcccgtccctctggagagtaggcttcaatttatggactggtactcagaatactgcttgtggcgcagcagcagaaataggcctcccccgagaaacatgagtcctggagctcccaaggctaccgccatgattccgaggactaatggagagaaggaatctactggagggaaacctatgcccagaa

SEQ ID NO: 1857 - DNA, 526 bp, Rattus norvegicus
  Genbank Accession No. AI170532
atataggaaataaactttattcatctgatcctctgagatgacatggccaacagtcacagagctgcagacaataggattatgttctatttacaatttacagtagtattttttcctctgaaaaataatataagtacaaaagctaggtaaacatgaggtgctgccatctgggacttatcatagcttgaagaagcaagccttagcaaatattcaattaaattctctaatttatcagaaaaaaattcactaagtttcacctcaaaatgtattgcacaagtctttaagaagaaaaagaaaccaccctaaaataaataaggaagatagttctttaaagagagggagaagaacccaagaaagacactgaacagccaagtcgggtggccggtcagaacagcctttgaaccacagagaacttcccagaaaaaaactgaatgaaaaagaacaaaactatcaccatttccccaccaagaatgtctgcttcaaaagctatgtatctgtggccagggtagcatgtgtcttcaagctacac

SEQ ID NO: 1858 - DNA, 532 bp, Rattus norvegicus
  Genbank Accession No. AI170561
aaaaaaagctaattttgcagacaggtttccatgtaaaaggctaggtatttagccacctcagcattgattagtttcagatgtctaagctctgttacacatggcttcccatggcttcactctacaaaacatatttacaacgtgaagatacatctacaagaaatctacatttcaagggttttacaaatcaatcttgtatctttcccctgaattgactctcacagaccccgtccccttgtcatttcatttgcccagcttaacggtccatggtctactgaaatgcagctcaaaatgttatgactgggcaacagatttacagttcctctatgagatcatgtgcaattattcacatcttcaaaccatgaaggaattctgattttttagcttttcgagttccttaatttgttgtctcaaaaagagtatcctctgctctcgcaaagttgcttgaatttcacatactcgaactaatgatctcaaattttttaactcagtacatatttctgacatatgaacacttcccatattatgggcttct

SEQ ID NO: 1859 - DNA, 670 bp, Rattus norvegicus
  Genbank Accession No. AI170568
aaattgaaaaataccttattgataatccttgggaccatgggtccctagaaggcacgtgtaactaaacacccgtgtggcacccttaggtcagcccttcttttgcttgagcttttccaagtacacgtgcagggacttctggatggagtctctggagatgaaactggtgaagttctggatgtcagcctctcgctgcttgatcaggttgtccgccgtggccttccgcatcatgctcttcgtcagctgccgagaatggtccggaatggtgaaccacttggccatcactgagcgagccttgctgtgtacctgatcctcaggtaccacctcatccaccaaacccaccttgagggcctctgctggtgggaaaagcgtccccagttgaagggcacgctcggctgctcggtgcccgatggtgttcacgtagttgtcttttaaccagaagggggcaacaatgcccagcaggctctcattcaatcctatggtatacttggggttgtccgccattatcctgtagtcacaggtgagagccatgaggcagcctccagctggagaggcgccattgatggcagatatcaaggtcaggttggacaagtagagcctcagccacagctcctgcacagccttccagtactcagcgtagtgggctgggttccggccatacatctccatcaag

SEQ ID NO: 1860 - DNA, 445 bp, Rattus norvegicus
  Genbank Accession No. AI170597
aaaatgtattttattcaacttggaaaatgagtataaatccctgggtgtttgttgtggggaggatgacaatcagtggaaaggcggaagggagggaaaggagcaaggtgcaaacatcacagtggctgccttaggtccctgcctgcgaaggggagggtgggttcagctaagagctcaggtccggaggaacaccatggtgaggagacctaagacatatgccgcgaccagcttctgtcccatggacacatgcatgatgtgaggcagctggctgccaagttcgtcctgcagtggcagtagcaggaaggccacagagatgatgcctgccagtaagaagagcaggaatgagctggtggccaactgctgcggggcgttctcctgaagatgtctggctggagttggtcctgtccaccaaggatgccctgggttgggggttggctcagaatgtccc

SEQ ID NO: 1861 - DNA, 542 bp, Rattus norvegicus
  Genbank Accession No. AI170613
ttatattatttatttggaaatgtttgtaacagtacagtgaaactaaatttcagagacaatggctgtcagtttaggcatcatccgtttattatagaagggtaggcatgggaaattatttacatgatgaaatagttcagaatatcagtggaatgggcagcttcatgtgacaccatttcaacagtgatttcagtcgacatactttccaacaatgtcgccatctctatatacgaagtaatccttgtcgtctagtactactttggtgcctccatattctgggagaagaactttatctccaactttcacactgacaggctgaatctctcttgtgcctttcctttcccgcctgatcccacagccacgaccgttgcttgcaatacgtttccttgagacttttctggaagcataatgccacctttggtcacagtttcagcggcactcctttcaaccaatactctgtcaaatagcggaagatacttcctaaaagcttgtccagccatgacttacgccgccgcagctccggactctgcactcggactcctgct

SEQ ID NO: 1862 - DNA, 431 bp, Rattus norvegicus
  Genbank Accession No. AI170628
gagaaaaaaataatttattatatatgcaataggccagtacaatacatttccaagcactaatttgaagatatgtaatattttaatgtttccaaagttgttacgcacagttccattgtccagacggccaatttcttctctcaatgctccacagtacttgaaagatacagaattcagaaggaacctttattgtctgtatcacttccgttttccttctttagaatcatgttttggtctggcagatcgagcaaactgaaccaccatgggcttcccgaatagaacatagccattagcttctttcaaggctttggctgctgctttttcttttggaagtcctacaaaagcttgtcccttcatgcgtccttctttcattaagcgaatatcaaacatgatccgctgtgtttctgaagagaagtcgacatatctcccaaaga

SEQ ID NO: 1863 - DNA, 645 bp, Rattus norvegicus
  Genbank Accession No. AI170665
ccggcaaaggtaattaaagatagtttatggatgacagtgtgggtcaacggagaacagacaaggacctgtagtgacatttcccaggaacagatcaatgggtctataggaagtgatccagacaaacaagcagacagacagagggataaggaaatgaaaacatggggatgctgtgtctgtgcataggatccagctctgccctggactcggtcaatgacgagggatgctggaccttggtccttgaagagctacttcgcctccttctctgctctccctcatccaaaaggccaggaacatgggcaggtgatgttaccagggttggggtactctgggtggacagaggatcaaggctcttggaggctccctggggctgtgggggcctgggtagtgtgggattagcagggcccacatccagggcaggtcccccacctgccctgcccaccacaccaacatggtgcaataaataaagtttcaagtaataagtcagggtcaatgaaggaagagttggaggctagtaagcaggcaggggtataagacacaaagtcccctggccacccgccatgccttctcagctttctctaggtccatcaagtctatctcaagtactgcatgctgatgtccaccagtatccaccggacactccttgca

SEQ ID NO: 1864 - DNA, 508 bp, Rattus norvegicus
  Genbank Accession No. AI170666
ccaaagacaatttttttctttaataaaaaaatcccagacaaactttgaagtcctagagtaaaccagcaaaagaaggaagtaaattcctccccacttggggatgggggggtgaggggggcacggcagagccaacatcatcatcaggagagctccaggcttcacatctcattgtcaggagcccacttaaaaaataaattacaaaatggttgtttggggaagagacagatgaacggctgtttccctccggtgcagcaggaactgggcagactacagatcagtccgtgcgctggccgccttgggggcatatttaggcatgagttcatttatcttccggatatagtcagacttctctgcacagcctttgcacatctccccccaatcgtccaggattttcttcagctctttcacccggagcttcttcaggtccaccgtgctcaggtcaatctgcttgtctcagagccaaccaggataccaaatcaaatgcacacaagcacaagggttccagaca

SEQ ID NO: 1865 - DNA, 636 bp, Rattus norvegicus
  Genbank Accession No. AI170671
gcatgatgcttttattaaagttttatggaaaaacaaacccacatttttgtgtgttacattatacagttttcaggcagagtctggtggtgagtcacgcgtggagagaagctttaaagtcttgacttgtgtccggttgtgaatcagtgaagcagctctgcacgccgccatcaaaggtcacaaacagcaccatttaagagactcacacttacttaactgccttcaaattaagtcacccctgccaaatgacaaactcaaagtgctacagtgtaaacaaccaatacccaccaaatccaaattcgcctcgataggccacccagcacagaatttaggacaaactgatgctgatgtctggctgtcctaaaacgctggggaaggtactctacagagaggaatccaagatggccaaccccagccataacacttactctaggtgtcgcctgactatgtagcccaacacctacaaatccctaatatttagtatttcacatcaaacttactgcaaatgttctgtgccacacttaattcaaatcaagtccacctaacgttggaagtacaaacatgtttattttgaatgaagcttgctacttcaaagcaatggtgagaagaaatcaagctgagacagatccactttaaaat

SEQ ID NO: 1866 - DNA, 419 bp, Rattus norvegicus
  Genbank Accession No. AI170692
aaagctcacacacagcaaggctgtggatcgtgttgtccccatcccgctctcacagccaatccaacacaagttcttcctgggctggggaagcagagaaaaagtaacaattgagctcgtgaataaaagacgacagcgtgtgcggtgtgatgtttcctgatgtcttcaccttgcgtctcctccatggttgggagccctccctctggttccccaagtcccacacgcacccctcccctacccccaagtccaggcgctcccatctgctgggcttctgcctcatttcccgtagacactttcatcactgtaggccacatacagaaaatagtcttcctcatggttgtcctcatacagctgtcccatggtagcactggtgggagggatagtgttgttgacaaagaagaataaggcgtcctcaggtctca

SEQ ID NO: 1867 - DNA, 483 bp, Rattus norvegicus
  Genbank Accession No. AI170693
gtaataaagacactgcttttatttagtttgatatgtttctatacagaatgcagaaaacacatcttaaaatcatatagaaggaaataaagacacgtcagtggttggtgaacacttgaatgtgagattggctctctgtctcagagtctgatggccatcggcagctcagggcttagggaggaggctgcctgcaaaggcattgttgctcttgttattctgttcactgccccactgcctccagttgctatgacaacaagccactctgggccagcctcctctctacatggcaatgcccaatggtggtgttgctaagagcaacaacagttatctggaaggctttccaaagccctcacctggaatactgggattgattgattgatttttgatgaggtcaccagaaataatttcatcaggtcagatccctgctcttgggttaagggggtacatatggagggggtgatcggtatggggtcatgttcttgggac

SEQ ID NO: 1868 - DNA, 450 bp, Rattus norvegicus
  Genbank Accession No. AI170696
cagtttcctctatcttttattgtcacagcagaagttgtgtgagacaggaggtcacaccctacacacaagagtatggtctgtgtggggtccagttttgaattacattccaccacggcatcttcatgaggtgcttggtctcctaccaccagcatcacggggcacttgagggtcatctcaccacctcgctcaaagttcaggtctcggcggttgttgtaactgttccaatacagttcgatgttctccaggttgggcgcgtgtgtgatgagacttctatacttctgtatcaattcagaatttccagaaagctcttcctggctgaaaaggtgcccaagaatcatctccggaatggaagacgtaaggccggttaacttgtgggctgcccaatccatccagcccttggcgttgggatcaatgttgatgagaacaagaccttcaacggtgttccgggtg

SEQ ID NO: 1869 - DNA, 440 bp, Rattus norvegicus
  Genbank Accession No. AI170709
gtgaatgtaaaacatttaatttaaaaatgttgaacactacaatatataaaatagctattataaatgcacatagtgtattctatagctgccaggtttacttttttttttaaaggaaactgttacactgtggctaaaacttgtatcttcaacctttgaaaaagcccacattctatcacagtgatgtatggttaaacacttggatcaagtcataaccagttttattgcaaaaggaccctgtacacatttatcaattctagtaccttaatagctacccaacaagtcattaacatacagaaacatgcatcatgagaagcaagaagtatcacccatcccttctgcatattagcaacttgtcactcctgagccacagtgctcacatcactgaggtctgtgaacagtcactctttccattcaccctgagtgaaagatggaatgactta

SEQ ID NO: 1870 - DNA, 489 bp, Rattus norvegicus
  Genbank Accession No. AI170714
gcattcaaactaaggcattttattagctggcttttcaacttaaatagtatctttgtgacctaagaacaggtgtccgtcacttcccatcacactccagaaggcagactagatggacggtttcattttcagcacaaaatagctttactctgttaccttcactaaatcttttcttagtgttaaccaaaaaaagcaccaggtcacagatggactctcccagccccagtaagataggcttccttagaacacacacagcaggagagtgaaaacagaggcttctggtttctttgggtccacaaaatatgcagccaacattgattttgatgatatccatcccaaccaaagtaagactaacgtgatctcctgctgctgcccaatcgacaggttcgtcgtgcagagtgattcctttggcagtacaggtttcattgggcggcatggctaacagtcggtcaccagtctggacatagccggcttcaatcttaccagtcacac

SEQ ID NO: 1871 - DNA, 400 bp, Rattus norvegicus
  Genbank Accession No. AI170735
  misc_feature (1)..(400): n = a or c or g or t
tcatgtctcttactttattctcagtgtgcatggttcttttttacatatatacacagacacttaaatataaacactgaaatccaggagaatccaatgggcaggtgagtttaggaagtcaggggtacagaagaaaaagccagtcaccagattttacaaatggccgtctgaacttcccgggtcagacttgatgccttctcccagacatcctgtggcccacaaggtcttcctctgggactctgaaccaatcaatagccatacttgtcattaagatgcgttctgccatctccactttgaccttcaggtgggacccatacgcagtagtctgggtcatcctcaggatatttggaagaaagtatgggtggaaactgcanagaagaatacactgctgggattacaagtc

SEQ ID NO: 1872 - DNA, 721 bp, Rattus norvegicus
  Genbank Accession No. AI170752
catggcttctcatttatttcaatggctcagcaaatatatacacccacatacatgtacatatgaatcatacatacattagtagaacttaaggcacaaagaaaacagtaaaacattaaaattcagaatctagttaaagagagccacttcctgtagctttggggttttacacacacgggcacagacttcaacaatcacatgaagctaactgacactgattacagtgaaagcctgacagtaaagtgacaactcaggatgatggaatctgggaaggataagcggatggggaagaacttcacaggggcttctgagactgcgagtgtctccactccagtatgaatgctggatgttcctttctagatagtaactatacagtctatgcatttttctaaaaatatatttccaaacctggaaaaggttaaaaaaaatgggatgaagtatataaaaacatttttgaaggaaaatcattacataagattgtgtgtgtgtgtgtgtgtgtgtgtgtgtgtaacggtttgcttggtaagatttaaggggacttttgctaaagaagtcatacaccgaggtcaggctccagaagtgtcctctgagctagtcatcttagttttccatgagagagttctgatacaaccaccaattcttaacacattaggtaatatgtttttctaaacaatttctataggttttatacgacatgccatggtgtgcccacacatattctgca

SEQ ID NO: 1873 - DNA, 652 bp, Rattus norvegicus
  Genbank Accession No. AI170754
ccaactaccactttatttatattactatgcttaagttacatgggaaaagacaaccaagcagttctgccccatttcagaaagtttccaatcaacaccaagtacgtggtgacaaggaactagggatggtgacatctgtgggtcaagactgacaaggaagaatgggttctggtgctacagttcctctccaacaagaatatggcacactggccagcacaagccacgctaacactgagcctccagcgctgggcacagattcggatctcttcttgaagctagcaaattaagtgaaataactgggttaaaaagaaaattttaaatgaagcccaaataaatttaaaaaccatgctcttgacatattctccactcaaaatgtacacaaaacactccttttcactctaaggaccccaattttttcccttacatagcccaccatgtagttgcaaatctgcctcaagatgtaaacacagggaaaaaattaatggcatatgcataaaattctctctacaaactgctgttggatggaaaatacaaaattaaaaaaaacaaaacaaaagaagaaagaagaaagtttccatcttagatgctcacaacctcttgttccgcagttcatgaatccgactctgatgctaaggtgacagtgtatgtaaggaga

SEQ ID NO: 1874 - DNA, 587 bp, Rattus norvegicus
  Genbank Accession No. AI170762
tttcctgttgttctactagggtgagagtgtgggactacttacacgcggcacatgctgacaacaagacgcttactgtacagaactgcaatgcaggactacccgaaacagggtcttctgtggactggaccagtgtttcaatgcaaatgccagccctaaaaacaacatggttctgatttcacagtatgaattccctggaatctgggaaaaggtaattgttagctgaggctgtccctcagcagcttggtccctcaacattctgagacatcaggaaggactgcaccacttcctcagtggactgggggctgctgttgacgtcttcaagggcatcggtcactgaatactgtcggtctcgcaaccggttccagttagacaggacgttgtggtactcaaacaccttctcatagttcccagtggagttgtagagcttaatgaggccacggtagtcatactccagcccgctgtagccttcgccaaacagcttcttcccaatcgctatcgaccgaaggtacagtttctcagcattttcatactgattcatgtcataattgtacagagatgccaggtgtcccaccgaaagggccacttca

SEQ ID NO: 1875 - DNA, 647 bp, Rattus norvegicus
  Genbank Accession No. AI170776
ggattcttttcttttattattggcatcagctggactatatgtggccttaaacatcatgcactggacaggaaagaaagaacgagaaaaaaggacacaggaagggaacacgagtagcggcgagattccgtaataaaaactgtaattcattcaataggttaagttttggcattatgaaatcaaacaccccttcccacccccaaaagttgaaacttaagtgagagggtcgcccgtgggacccagccaggtgttctgcgttccctcacaggctgtgacaggcagcgtgtgggtgtaattcttgtgaacggtctcaacttttcactttctttaaataatctcttttgcttcttagacgttccggttcactggggtgacataattgcggggaaacatgccggtctgcccatggcaagcccctttccaccaattgggatctgagttatccatgacatgaatgaagtctcctcggcgaaagcccagctcaccatcctcctgggggtcaaagtcaaagagtgcctggacgtacgttggctgtggcacctgttctatgtcccggaggaatatctgctggttcctggacacggatgttgatctgtggtaatctaccagctcattcaaagaattaaacttcaccacccacaggaagtact

SEQ ID NO: 1876 - DNA, 604 bp, Rattus norvegicus
  Genbank Accession No. AI170777
agatttggatctttttttttttcttataagaacaagtttctctaaaatccttcagccaccagtgaaatgattaggcagaataaaaacttctgtagagggagtgctgtcatcaaaaataaatacagttgcatgggttgctcaaagacaaaccaaactgaacaggaaggcggggctgggacatcatcttaagtgccctccatcatcttaagtgccctccatgttggttcactcagtgggctgaggatagggagggcaagaagcaggtctggtcaccatcttagagcaggtggtcatgctggacagaccagatgaggctctgtggatgcacatgggcctgcacctttgccccagcagggtccagagtgggacaggagccagcctggctcctcactgctgcagctccttcatcctgttgagggcgctgcctgcacggaaccactcgatctgtgtctcgttgaaagtgtggttcagcaggatggtctcctgggtcccattggggtgcttgatgatgcagttcagaggcttgccaagggcaaagtccttcaggccttgaatggtcagcttgtccactggatgaatcttgttgtagtcagaggggtcagca

SEQ ID NO: 1877 - DNA, 662 bp, Rattus norvegicus
  Genbank Accession No. AI170820
agtataaatactgtatttattaaatatccttacagtttatttaaatgtatttacagaactattcctgcataagttatatttcagacatcgatcaggtcattgcctctggtaggacaaacaatgatagtctcgacagaacacgcagctcattagcacagactcagatttgctcgtcgttactatctttgccaccaacttcctgctaacagtcacgttttgacatggtcactgctctattgagaagttcaattttgtgataatttacttttttcaaagaaatagaatccaaattcttgtttcatattttgttttataagcagatttttgcaaatttttttaaatgtaaaactgtgacagtctccagagaaactgagtgttacaacttggccagagagagctgctgtacagtgacaagaagccatgaacctactctaaagtacaaacacgcacagcctcagccagcctgccagtgcctccaagacactcctggggagggcagtgctgggacgcttccgtctgctggctactctacccagagcaagggcactctcctgcctcggaacgctggtgccagtctctgccgcagacacacacctggaatggactctgtgagcgagtagcctatcgaccaagctacttcatctccacttgataatttaata

SEQ ID NO: 1878 - DNA, 385 bp, Rattus norvegicus
  Genbank Accession No. AI170850
cagaaactttggtttttgttttcaagctcctgcacttagggaagctgcccagagaaggggacaccagggctgcctcctgaggcgatgggcccgcaggccagtagtgacaaccaggagccccatcagttcacacacatgctgagggaccagcactgggagaataccacccagggtcccaccaggcccacagccaagcataagtcccagcctgctggtgacagggacagggaggaagagccacgaaggggcagagggacggaggcagctcaaagcccactgggttgtgtccttgcgaaagaaaccaccagaatcagagtccagtgaagacagaaccccaatgggtggacagcaggtgtgggaccccactggtcacacaaaatgaaag

SEQ ID NO: 1879 - DNA, 498 bp, Rattus norvegicus
  Genbank Accession No. AI170894
aaacattaaagaattgtataaaatgatacatgacgcagaacaagttctcttacaaatgttcacgtcatttacaactaagatcaagcagccaaaaaggagtagattaataaagccacaggaataaaacagatgcaaatatttaaaaaaaaagatacgtattatgtgttgaataaaataaagtctttccttgtgttggttgggtagtcttttgccttaagaggacaaagctgtgtgtgatcattgggttcagtcttcttccaaaggaataatatcaggaacttcatcagtgtcagatgtcgagtcaaaagcagagaaatcaagcatcagccagttgagaggcgtgttgttaacaaggtaatccataacttcatctaaggactccttcattttctgcagctgccccttgctagaagtgaggacgccatcagacacttccttgaaggaggtaacattgcggaacgccgagttgatgtcacctgccatcacccccaagtgttt

SEQ ID NO: 1880 - DNA, 437 bp, Rattus norvegicus
  Genbank Accession No. AI170903
aaatacaaaaataggactttattgttgagagtacaaacgtttctcctgaactcatttacatttctaatggtcagcggttctccctgtgaacgtgactggtttggggttttattttttgtaaacaaggtggcaagatgcaaccctggttggtgtggtctgaactcactatgtagacctggctggcctcaaacgcagtgatgcacttgtctgggctccctgagtgctgagatggaaggctgtgcctttatgtctggttatatttgaaaacagttgaaggaaacaatttatttgaagtaaaatgttcttctgttaaaaaaaagaaaaaaagaaagaaagaaaaaaagccggcacttcatacatatcccaagcaggatccgaaccccaaaccttcctgtctcagcctcctaagttcaaggttccaggcgtgcatcacctga

SEQ ID NO: 1881 - DNA, 512 bp, Rattus norvegicus
  Genbank Accession No. AI170911
ttttttttaaataaacagaaatgccaaatcactttattgctgtagaaagtcaactagaaaacagagtgacacatctagaaatccaccatcatgggtgatgagcaggacaggaactgttgccagccaccttcactcctcagctgtgcagtaaccaaaccacacaactgcacatttcaactgcagccccaccttggctggcgcagacacagggcgcagcagtgaaggccgcgagcgcttcttgtgttccagactcttctcctcattcttctgtgcgctgttcatctcgcacgacccattgcctgtaaacagggaccgctttgcctcaggcaggaactgtccgaactctgacagtaggtcctcctgaccacggaagagattggccacctctgtgaagacttcctcctcagacatgccacggaatggacgacccttagtgtgcagctgctccttctggtaggtgtgtaggatctccaggaaggacctgtagatctcagggtggtccagaaagcggg

SEQ ID NO: 1882 - DNA, 551 bp, Rattus norvegicus
  Genbank Accession No. AI171090
ggatattagaaaattaaacctttaattacataagctgttttcaagaatcacgtacagagatttcccagagacgctggagttggcagtcggccaccgcagtagattgagcccaccatttcagcaaaggcgctgctggcagctctagcccttctatgtaggagagggacctctgtgaggccggctcatttgccttcattccatttccccatccaggaatcattgtgtacacccaactcccacagttccggtttaggtgaacaaggggctcagagtttgcaggtggcctgtgccactttggaactggtttttctgttcagggcttgacagatgaagtccccggcttctaggagcttctggaggttcacacccgtgtgaatccctaagccagtcagcatgtagaccaggtcctcggtagccaagtttcctgacgccccctttgcatagggacagcctccgagtcctgccaccgaggagtccacaacgctcactcccatctgcagggccaccaacgtgttggccagagcttggccataggtgtcatggcaatggac

SEQ ID NO: 1883 - DNA, 486 bp, Rattus norvegicus
  Genbank Accession No. AI171164
aggtctgagtttgccctttatttgtgaagcaaagaactcttgaatggtaggactgtgcccagtgaggttcacatggccaggatatcaccttccccttcccagatgagcagggttccttcctcggactgtgggtggggcactcagtgcttgtgtgcttggctgcaggccggcacgagccgctgcttagcgtcttctctttctttttggtgctttgctgagaggttctggaaccactgcactggtctgtggggctgggctcggcaccacctctgcacgttcaaacacagcaatgaagaagccgccagtgagtgtggtctcaggggaagcccggaggcagtgttcagaccctggaaaggtgctcagacctcggtgaggccatgtgggtaagacaggagccagcctgaacgttccagagttctgctgtagagcctcctggaccacatcttcattctcctcttggcaaagggaacaagtggaatagacgag

SEQ ID NO: 1884 - DNA, 626 bp, Rattus norvegicus
  Genbank Accession No. AI171206
cacaatctccatttattccattgtaaacatgtacagagtatgcgtatgagcattgttagaatttaaaacaaggtttacctttcccaaactaagttgttttgggcatgattacattgatcagattgattccaagtacagctagaactgaacagaacaggcaaagtttcagacatgaaaaatgggctgtacaaactaaaacaagacaacacacaatgttaattcctaaataacaatgaattaccagaactgtgaactggtatagaaacagtaataaaataatcctattttttatgaaggaatttattgtatttttgaaggaaattaattttatgaagaaaattattataaggttcctagtatgaaagacaataaacaatgagttgagggtcattaaaaaatatcgcagtagtaaagtctcccacatctgtctttccacatctatatgctgttcaatctaatgtcacagagaaaccaaaatcagatttctaccaacccaaaactaagacatgccatggtggtttttagggaaactgtacttcctgaactaaaataagaaagcccacgtggacagtgcaggccgtcgtttctcctttccactggaattgctctctgatgatcaagacatg

SEQ ID NO: 1885 - DNA, 567 bp, Rattus norvegicus
  Genbank Accession No. AI171218
cataaatacaaaactttatttgcacttcattagtgtagaaagaccacgatgcttctcataccacaacactcaggacacgccaagttattcaaatacatacttatttacctcgactaaacaaaacggtgcagtttaataaaaggtataccaaagatagagttcacaaattccttatcagaccaggaaaaaaaaccctcaagaaaaaaacaaaacaaaacaagaaaacttgaacacagtctaggctaaataggcataagcttcaccaccaaggggagaagtttatcgttacaaagatacagagtgtttaggcaaatgcatgtgtattctttgatatactaaaatgtaactcttaaaatccctttaaacaggatttctgtaggacagcagtatgattttaaaatcttttctatagttttcaaaatgcttctttttctttctctttttcctttccttgtgatgacagggattgaacccagagcctcacgtacgctggaaaaatgctcaattactgagctacaatcccagcccttcaggtctttctcgattgaatctttttcattcttaaaa

SEQ ID NO: 1886 - DNA, 575 bp, Rattus norvegicus
  Genbank Accession No. AI171231
caggattaagtgtttattttagttcagttaaaacaaacatacattgtttcattgaaactggcatagcactccctgccaacaagccacagtggcctgtcagcctctacagtacagcgggggcatttacactatatacatacaaggagtccacgtgacttccattgaaatcacatgacaagttaccagatagccgcgttgtacctactgcattttgaaaatttagacacctcatttaaagcttttagtttgatatctgaacttgcgttgatgaccaaccagtctattgcacatacaattaaaacaagttattttcaattttagtattatacacaatgtcaatattgaatcctatgtacaagtaatccggggacctatatataatgtgaatccatcaaaatgcagttaagaaaatttagggggaatatatacgcttgaacccaagacccaattccaacatgttatacagcttatttacaaatacatatggacaatgtatgtacagtttaccataaatattgaaaaataggttacctttaatggatcaatgctgctctataaataacagtacagttatt

SEQ ID NO: 1887 - DNA, 593 bp, Rattus norvegicus
  Genbank Accession No. AI171243
atattttaattttctttttattcagaccatatattgaagtatcgattttaaaaaatttataaaaagacttagatgtaaactgtcatagtagatttacaaaaaatatatataaaaaagcaaattaaatattagaaattataggagtctctcccttaaactgaaggagtcttctttaataactttcaatgtagcttactggcaatcttaagaaattcaagaagctcattcatgttgtgtaagccctaaaggaaaaaactgaggaaactcattgataattttcacagcttcattgtaaagttcaagatcaaagcgattacaatcttccttaaacaggatataagatgcacatagtatggttgccttggctgtcaccttcccgactacttctacgattccagagatttcttcatccagtggctccatcaattcaatggttccattctttccttctccatctgaaagaataaacatttttccagtgggatgaatcttttccagcttccccacgaagcacacgggtcggtcgatatactgtgataacatgctggcgttgacgcgcgctttggggagttccattatgtccaccatgattc

SEQ ID NO: 1888 - DNA, 588 bp, Rattus norvegicus
  Genbank Accession No. AI171262
gagaattcattaaaatttttattttgaattatgacctattctgaattcaaaaaaatctactttggaaaacacctcattgggtgttgacttactaataaaaagtaagtcatcactgtttgaacataatatagaatacacaataaattatatttacatgcactgaccagattatcacacacaaggtaaaaaaatacagtattttatgtacattcttaaagatttacattttcacataggtttataaagttaaaaattctctgtacaaaatcttccgtgtacagagtgtacacatcttcgtccttatggctgtatcgccacacagaactgctttaaactagcactacaacactggagggctcacttcatattcacatcttggcacccatgtacaacacatcatgaaatgtgaattataaaacaattagaaagtaatcatgcagctatcttaatacaagaaagtgagatgagctgatcagcacttatcacctccatttctgttcgtatctgtgccacttcctgctgtgtatgcctattccacttcctgttccgctttcacacaggtgcatgcaaaactagcagattatgaac

SEQ ID NO: 1889 - DNA, 547 bp, Rattus norvegicus
  Genbank Accession No. AI171263
gacagattagtcttttaatagaaaaatcccctgcaaaaagtcaaaagccacatgtgcaacagtagcaacaacacacatttcttcaatccagacagtcgagtttcagttcttcgccttgggaggtggcctgtacacacctacaaccacagcgtggtctcgttcataaggctctagtgtcaactgctcctgaggcttcatgttctcttgctgcatctttttcacttcagatgcaaacacagcttctgctgaggctggggaatcaatgcagttggccttaatggaaatcacaaagtgtcctccattccgcaggaaggtgtgggcattcagggccacaattcgggtttggtctggctgggccacatcggcaaagatgacatccaccattgcaataagcatgcggtatttgtgtgggtgccgagcattttcaattacaggaataatgttggtcctcttcttggccaagttgatgaggtcacggccagagcggtgggagaactcaactgcgtaaaccagaccatccgggccaacaatgtcagacacgtgggaa

SEQ ID NO: 1890 - DNA, 485 bp, Rattus norvegicus
  Genbank Accession No. AI171266
caactcccatacataaaaattggtctttgttcattctcaggtgacaatttgtcccaagatgatgaagagaattgggagttaatccccccatagccatttctttaaccgactcagcagcagctcttcccttcttgaactacttttccaaagaggtaatgctgaaatcagtcagaaaggctttctgagaaaacaggtttggacttctgggtctgctccagtcgatttaagatgaactggcttgtatcaatgaagcgttcaacgcagttcacaaaacaggcctcagcccgactgtccaacttaggcccaggcttatccatgcacttctcccagcaaagttccgtcatctggtgcaccagctgctggaagcgctgcttctgtgtctccacctcgatgaaatgctgcagctgagggtccacggcggccaaagccgagcccgaagaggacgaggaggactccatcccggcacgaccacgcggccttgtgcc

SEQ ID NO: 1891 - DNA, 589 bp, Rattus norvegicus
  Genbank Accession No. AI171268
aagtgttcaaaaattgtttattatgcaaaatgttaacttttataaaaagtttaatatacatcacatggttacagaaagtcaccttcctgtaaaaaaaaggtacaaaagctatatactctattatagagttcataatcagggcaacagagcttttctccaaggaaaccagaagaccagctcttatgctgccttggcagtgtgtgcagggcagccactcgtgtaccccccacacccttctcgacaccccattttcggaaaaaagccagtctttttaagacttgagtcagggtggggacagagtgacgttgcccagctgctgaccagcgagtgctagctagctcttcaggccacccaagttcagtccttcgctctcgggctccaggtccagcctcgaggcatgagttcagggtaaatgaagagggctgtggcaagatcgaagctcatccatgcccctcaggcttccggctggagagagggtcccagagtcccagggtcccaagcggaacgggcgccagcacctgcgttcgggaagtgccaggacgaccgggtcagtggcaaaaactcctcttgtccttggagatcacaagtt

SEQ ID NO: 1892 - DNA, 397 bp, Rattus norvegicus
  Genbank Accession No. AI171319
gaacatgttaccttttatttaaaagtgttactagccctgcctggggctcctatacaaaaacaacacacaacccaaatgaggctgcttcccgtctctagactcggggacagtgttggggtttagcgagtggaatgtgtgctgaaggagggcacccaggaggctcctaccccagtcctcaggatggcaccagctgtcccgttgcctttctatttaccacagaggaaggaaaggcagtcttttgagatgctcagtagaagtcgagcatggatggcccttgagggtcccacgaagggtcatttgctcggtcatggctgcagatgttgcgagtgtcgccgcagcgacaaggatggcaccggatagcttagggagccaagcaccgcagcggctgccaccgcga

SEQ ID NO: 1893 - DNA, 483 bp, Rattus norvegicus
  Genbank Accession No. AI171338
tggttaaaaacaaaaccaaaatttttgacagaaagctcggaaagaggcagcaatcaatcaatcatcaaacgtaattttcttcccctgaaacacagcgattttggactgctgctccttccgcctcctgcttgcttcccaggaaggatgcagaggtgcatacgacggctgcttcgcactctcgaatcctctgcgtgcactctttgtaaacttattctggattggaggttcattttctggaatatctggggctttattctttggggcctgttctctgggatcccttctggagcttttaggtccagataaagagtggaaaaacacggattctaacttcctggcttctggaatcagcttatgtttatcgtttcttatatcccagtgggtttcaagtgtatttgttttggatgacacttttgggaggggcttctgttccttagctgaggaagggacagcacattccttctttcgggtccgcctgacttt

SEQ ID NO: 1894 - DNA, 538 bp, Rattus norvegicus
  Genbank Accession No. AI171355
tttttttttttgcgaagaagcgtgttagggtttctttgtcttctgagaagcctcctcagattcattcgactagggtagtcccaatgtaagggatagctgataataggtttgtaattactgtagctcctcagaatgatatttgtcctcatgggagtacatagcccatgaatgcagttgctatgactgcaaatagtaggatgatcccaatgtttcaggtttctaggaaagtgtaggatccatagtatagtcctcgtcccacatggaggaataggcagatgaaaaatattgaggcgccgttggcgtgtaggtatcggattagtcagccgtagtttacgtctcggcagatgtgggtgactgatgagaatgctgttatggtatcagacgtgtagtgtattgctaggaataagcctgtgaggatttgtactatgaggcatactcctagtagagaaccgaagtttcatcatgatgagatgttagatggggcggggaggtcgataaaagagtggttgatgattttgaatagggggtgcctcgtgcc

SEQ ID NO: 1895 - DNA, 498 bp, Rattus norvegicus
  Genbank Accession No. AI171448
caaaaccatttggcaaataattattgaatattattagttaataatatcaaagttaacactagatcctgatgtccaatcttagggcagcaaacactgcttcttggtcctcaggatccctaaggaagtcgtctcagaggttctgatggagccggccgctttaccaaggatttattcaggggagcagacagtggtattcacagggagtggtgcttctcagacacatttattaatgccacattgtaaacggtacttaggtaactgtacagtgatgttccatgttcccatctacacagcttgcttaagttcagctgacgtattcatcctgagtggactgggggagcagttagtgatggccatgggcatgcgcaggactgcagcctttcagagctttacttcttttatcagcactcctgattttataaacgatgagggacatcaaccccactcctacccaaatttcctggtaaacctgggtatagtagggtttcatggggaccc

SEQ ID NO: 1896 - DNA, 465 bp, Rattus norvegicus
  Genbank Accession No. AI171487
cagagttctgaggttgctgactgagcacagcacagctgtgtaccacaggtcgaaactcgaccttaaatattacaatctagcagtgtctgctggccggagccggccagcccctgccagcatgtgggcacttcttcatgtaagtctattctttggcagctgacacttgcgctgacagagagaatccagtgacgtgttagggatttcacgactaatgttggcttgcaggcctgtgtgtttacagttctggactctgacttggcctcagaggtttccctggaatgcggttcctttcctcctttactattctgaaatctgggctaaacaagctaacttgaatgtaacagatgaaaaaattatgtcagatatatttaaaaaatccagcaatttgagtgttcatgtctatgtaaatacatttaaaaggggattaagcaatgtctaacttatactatatgaaattcagaatgg

SEQ ID NO: 1897 - DNA, 479 bp, Rattus norvegicus
  Genbank Accession No. AI171503
caaattgaagaaaattttactaattataaattcaggaacttggtatgaaacaaattgtcacagcaactcctgcctttctttttgaagccacagtcttattttatcaaaatttttatccatccatcgtatgttttcttcaatggtttcaatggtttgttgaacacaacggagctgagaaccattttttttcaaggagctgaagaatccttttacctcttcaagacgtgctctggtggaaaactggtttgttgttcccattaccatgtgagctatggatgatgagccaagttcaaatttctgtacaatcttgttccaattttccttcagaaacttccaggccaatggataacccactgggtttctgccaatgagcgtgagaatatgtgggaattcctgagtttttattatctctcccttaaaactttggtctagaagccactgaagtttttctgggtcttggcttatgcagagggaaaatc

SEQ ID NO: 1898 - DNA, 496 bp, Rattus norvegicus
  Genbank Accession No. AI171506
atgctatattaatttattactagtgtgggtcttccattagcttcctacatagcagtgaggactttctcagcagcaggtacagtagcttttaaacagaattcgtaaagagaataatcacagtgaaaacataaactgccacagtaagtgaaacaaacctgtctagggtgaagttcatcctaacttacactaatctactcccatgagtctgtgggctaaacaaaaatcaccttattctaagcgtactgtgaatcatcacaaaagattctgactcttaaaaatcatgaaaacttcaagatcttattaataaagttaaaaattctagctgttgtgttactgattgactttggtctgtattttctggacttcttcaggccacgaataacaatcaggtaggatctggtcataattagtgctgtacatctgggaggagacaaattcttctttgttttggggttcaagataaacagtggccatcttttctttgtatgcatcttgc

SEQ ID NO: 1899 - DNA, 442 bp, Rattus norvegicus
  Genbank Accession No. AI171535
ggagattttatttcctttattgagaaacttaagtcttgggtacatcaaaaccaatttctgggagaggggaaaaaaaaacagaactcataatagaaaaaaaagttaccatcatctgggccacaacagaacccagagaatatattcttataattgaaaaattctaggtgcttcataattgaccttttgatacaaaatgacctgttgaatttgtaacttggttcttgaaagaggtccacagacaaactaggaagtcttcagacctcagctgaatgccgtgaggggttatttggcttttgactccttctgggcagcttctttcttggcatgatgagcctgcaggactgccacagcttcatccaccttggaacggagggactcgggggactccagcatgtggagcagctcagagttgtcgatttctagcagcatccctgtaaatttt

SEQ ID NO: 1900 - DNA, 420 bp, Rattus norvegicus
  Genbank Accession No. AI171542
gtctctagttacttttattagggcaagtgtgaatgtgttctgtaactctcacttgcaagcatgaacagtgcggtgcctgtctctatgtgggccgttcccgaggtctggtcacaatatgccaccacaatgggggcaagtcgccttcctttctggcaggaggcaaagcttcagtcataataccatcaggtgacgtttcttcctccagctgtttaaccttccgatcccagctctccatcctcagtttcttccactgctctctcttggaaaagtaatcaggatacactgctttctcagaaggatgccagtaatctaagcaccattctggaaccttgtagcactcgtatctctcataggaagtacccccaggagagtctgggaagatatacggctgaggatgctggttttgccagaattcttctt

SEQ ID NO: 1901 - DNA, 421 bp, Rattus norvegicus
  Genbank Accession No. AI171586
aaaagccatcactttaatgtaagctcctttacctgtgcctgccctcagtcattcttctatgctgaaagttagcactgcataagcccaaagccagctgcaacttgtatttcgcttctccacacttcagacttcaaaggtccagcactggaggccagagagctgacagacaaaaggtgatggcagacgcatggtgtttgtggcgttcttctcacactgacttaaaactgccaaaggaaggtcaagaagcacagtaggcctgcagccgcatcattgtcagctgctaacctcgtgtgcttagatttctaactcaggtggtttcctcctcaccacggaggagggcttgaacactcagccttctccaacagtaacaaagaaccctgcagtgtgagtgccctgcaactggcctgtgggctgcccactg

SEQ ID NO: 1902 - DNA, 589 bp, Rattus norvegicus
  Genbank Accession No. AI171601
catttctaaacttgaactgtttttaattttaaaaataggcatttatacagagaaatttataaaacaatttcatacatgttgagttgtttcaacatttcttttgagctttctagttttgctgaaactgcattcaaagaatcattcagaataaaacatatccattagaaggaaaactatcttttaaaattttgttctataacccaccttttaaagattttaaacaagtctatataatagactttatattgtctaggaagaaattacctttctaccattagctttgacattaaaaggacagtccaattctttaattcctttttatctggggtgggtggagtgggtgttgctagcagatcaagccaaggtctcacccatgctaagcatttactcttccacttagctatgtctgcaacatgaaatataaaccttaagtatcattgacacttttaagatctttgagaatcttacccaggagttagagatgcaaagtaaatacttcagagcattttctctgtattcacatattttttaccttttgagaaacatacactttttcaaatcttttcttgcttggaatacttaaaatatg

SEQ ID NO: 1903 - DNA, 515 bp, Rattus norvegicus
  Genbank Accession No. AI171611
tttttttttttgagaggttgtgtttattacgccgagcctttgcactacgcatccacctacagtccgtaaacaaatacagtacatttggaagtaggaggctagcccatcagaagtggcagagaaacaattctgttcagacagtgcaacctcaccacagcgccctccttaggccagctgtgaaaaacaccagaaggcaggcttaggccccaggggtggatctccagagattcatcagaaactgccgtggagaggagcaaggcaagagcttacttagttacattcacaggtgaagcttctaatccaagtgtccctagcgccacaagaaacagcaatcagcaggtggttacagaattaggtaactcagagtaaagcctctggccgtccgagcaaatgaggaatttgcctgttttcatcatgggtggactatgataagaacatcagctgacttcaggggggcatcagtcaggaagggtcgtttcatcctggccacatgtccacgggtccacagaaagcaa

SEQ ID NO: 1904 - DNA, 687 bp, Rattus norvegicus
  Genbank Accession No. AI171615
agatacacattttgggtttttattgctgattacagactatgaaatgtgcattgcaagtcaacaagagattcttttcatatttccaataaaagcttaaagaaacagacaacaaacacaaagacaagagaaatacaagcttcaaaacaaaacaacagaaataagtctccacagtcacggtctgacaaaaatttgaaataacccaaaccgtgcaaatgctccacagagaccatggccatacatggggttgtaaatacttgtcccattaaggacaaaccagacaagttatcagttatattggtgatcaagacaaacctcattggcttacagcagtatttactgtcctctgtgagagtctgacaagtttaagaggttggaaacctgtgatgcttcagcagggccgtgctcagaagtccacatggttcctaagaaaccatcctcagccccccatgggtcaggaagatgcagttcacaacagggtcacactggctgcctgcaggtaaccttggaggtactgcaaggcttctgcattgaggctggtgctcaccatcgagggaacccttcccggacaggcagtagacagtctgtgaagtgcctgtgccagatggaccctggggttgttcaccgtctgacccacagggtcatactcctttttaccagcaaacgccagctgtgagaaggcagtctggt

SEQ ID NO: 1905 - DNA, 708 bp, Rattus norvegicus
  Genbank Accession No. AI171630
  misc_feature (1)..(708): n = a or c or g or t
gaatctgaaaaataggctttactttaaccagtggtattgtctgacatcctatggcataccagatcacaaccaagttcacaaatacacatacacagcagtcttctcattcccttgtcttccaatggagaaactgggtggcggcagcatcgcaccatggatgccaggagctcttctgccagctctagcttcaagtccgggccctggggcacagtcctaacacagcatggccacatgtgcaaaggcatcctcaatacaataaccacgcctggcgttcaaacccagacgttgctactaaccattgtgaggggatgacgtggagctggactgcatactgaggcggtgaggcctggccagtcggcctccttctgggctccagatgatgcagggtcctaccctgccccacagaactgcatgtccctgcactgatagagaatggagacaccttgacctaaatacgagacctgtttcgtccaacactggaattggctttacactttcttacatccaacagaccaatcacattctcgtgcttcatgtgcttcagcagccgcagctccctgtaggtccttttggcgtgaatgatggactgaaacggtctcgacagcttcttcactgccacacgatgtcccgtctntgtatcaaaagcagcacacaccgagccgtaggctcccgagcccaccggggacaggttctggtatcgctcgggca

SEQ ID NO: 1906 - DNA, 755 bp, Rattus norvegicus
  Genbank Accession No. AI171655
aagtagagattttaatagatcttaactcatcacagtaatcgtttttactgtaatgatatgcagcttttactatactagtataaataaaaacagataaatacagctctaggcaacatcacaggttaacaaactaagcattcttcatgaaccaaaaccaaaaacgattattattagatgctgacacgctcgcccattttcatcataccttctcaaaaagggtactcaaataaggcgctgcacttagtatattggtcaataaatttgccaattagctaggcacatgtagttcatggtatccactatcttatctggttaaaaatcaaccaaatctttatgggaaaaaaacaaaacaaaacaaacaaaaggaaccaacagatagtaataccccccccccaaaaaacccaaacctctgaacgcattaaaaacggcacttttcatgtatttcagcagtaagacacatcagattgagaaatgtaacaaagaaatgtcagtctctgaagatgggtcatgaaagcagaatgtaaaataaaaggaaatatggaaacttaatcatgttcattttcatcgtgtgaagctacaaagaaaccggcttctcctttgaagacttagaacccagaaggggctgaggcaccaatcagccatgctggagactttagcccagcagtgtcttccatactggaagtttactttaagagctaagaactatcattaaaaatgagctcactctactgagccacagaacaacaagaatgttg

SEQ ID NO: 1907 - DNA, 538 bp, Rattus norvegicus
  Genbank Accession No. AI171676
ttttttttttccctcacactgctttattgcattctctggaaacagggtgagcaaccttcctgctgcctatctctgggcaacatggagctgaaatgacatggtactcataggctgaacagcaccctgtaccttacaaccctctaaccagggagcccctaatctgctatacatacggatgcagcccagaaataggggtgggatgggggtgaggtcaaaccgggggtacaatctacttttgaagacttcttaggcatctgcaggaaaactaaaaatctaccctagaagtctagatttaaagaggcctaggcctctcaggagtccatatttggagggatgggggtgccagagccttgatgtgggaaggactcatttctagagtccagacttggagaatggcttaaatcatgggcgtttcacaagagcccagatttcggctcagggagtaccagtgggatatgttaggattgggtgactgaatcttgaagtctccatgagtggggaactggggaggcccattctagggaggggctgggcccca

SEQ ID NO: 1908 - DNA, 508 bp, Rattus norvegicus
  Genbank Accession No. AI171684
  misc_feature (1)..(508): n = a or c or g or t
aaaatgtttccaaatttaattaacagaataaatttacaaaaccatgaagctcaccacactacaaggcagaagagtagaccatgcctgaaacacccccaaagaaaatgttatgattgtgactcaccgctgacccatcatcagagacagggcccagatgatgagggtgatggtgatggtgatggtgatagaacagacacaaattcgagacaataacgtgcagtctgcagacacccactgtagacagaaggagcaggaaagaggaaatggacagaaccgcgcactgtggagacgaggtgaaagctggagggggagggctgtgcttcagataatacgtggtgaacaggaaacccagagaggaaggaatttcacgatcaaccgttcaataagaaggagaaagtaagacctaacagtagcttcaagatataaagtaaaaacggaagaattagcttcccagaataaattaacctctggtcctctgggcgcgggcgttcggngtagactcggctca

SEQ ID NO: 1909 - DNA, 534 bp, Rattus norvegicus
  Genbank Accession No. AI171795
aatgtaactgaaaaccctaatttaaatttgattttattttaatgatatgtccaaaagttaacaaattacaattaaaacggaatttgttatggtaattccacagaacttaaaaacatgcaacactgcatggtaaaaacagcttcattcatttacaaaaaatattcctttgaaactcataacagtgcctggaaatttttgacataagctttttgcaaagaatattttaaaaaatgtaaagattcgattaaccaattagtgcagtattaggaaagataataaacattattagtaaagaggttacagtgatttataccaggtttagacagggttcaatgtagtctcattaaataaatgttcagttaagaaaatagttttgaaaaaaatcttatattgaagccatgttttaattttgttgaatcagcttatataaatcaagtcaagtttattcagttaaagaaaataggactatgctttcttatactcataaatagtacgtatatatagcctatttacaagtaaagaaaagttctttgt

SEQ ID NO: 1910 - DNA, 734 bp, Rattus norvegicus
  Genbank Accession No. AI171803
cacgtttttcaaaactgtattttttcctaaggcttttttatttgtattttattattcatgatcagtatagaagctcacaaaaacttgatgaggccatataaaaacaaaaaggaaaaatgctggttttctgttttagtgatattaaccttaatatagccaaatataaatttcatctaagaaacaagaaattcttttgagcactagtagctgctcgtatctgttgattataattagaagcaatacaattctgattagtcataattttttaaaagaaacttccttcatatctaaggaaaatattaggagtctagattaaattctatttggaatttagataataaccacttttcaacccagcccaaaattgttggattaaattaagtatgaactgtattttatgcagtcacgaagtataaatgtctactttgctttagggtggaaaacaaaagaaatcagagttgtggtttgttaaagtgaccgaagctctgaattctaccgaagccggttgctctaaaatctatatccaaagagtaggaaatgtcaaggttttcaccacctttatctcaactcaccaaagcccacatggactggagcagcactgtccacacatggctgtacagaacagagggaaataaatggccagcgccacatctcactaagcactaaagactaagcagaacccatagcctagttcagaaagccaaggcttcaggtcagatggacaaactgttctg

SEQ ID NO: 1911 - DNA, 398 bp, Rattus norvegicus
  Genbank Accession No. AI171844
gccgagagtgaaccgtgttaatttattggcatagtcaattcatcaacaagatgggtgtctgtctccaggaggtacggctgacctccatctgccggaacaggtgcccacatgcttcacctggaagactccgcacgtcaggcttcagtcaggctcggctactccttctttattttcactgtttttatgctggtgcccgaagtcttctcagcgttcgctttgaactcagtcttcagggcatccctaactggttttgcacagatctgggagaaccggatgtagctgagtccagcctgtcgccagtacgccaccatggtgtctcgagcggggcgtgtcaggcagaaccgctgggtcgcttcagagtagcctgagcccggaccggcagcaggaagccttgtgcc

SEQ ID NO: 1912 - DNA, 522 bp, Rattus norvegicus
  Genbank Accession No. AI171846
cttcttcaagagaaaaagcttgtttaaaaatgtggatttatacacataaaactctaacagtttcactcccacacgaaaccaaacctggtgtcatgcctttctgcttttatcgtttcttgattttgtccaggaagtctgtcaaagagcgagccagaatttagataacatttctttcacctcaaattatattaaaatttggaatttactactgcagtgtcaactgtgcttataatagtgttaaaaatggaagacttaaaaaaaaaaaaaaaaccctgaagtcaccctcattggtatttgttcagtcttcttgtttggatcttttaaaaagaaaacaattcacaccacacaacctaagcacttgtttcaaattcaacatcttccttctacttgcaaacagtgtctttctaattaaaaaactacagaagacccaagtcagttgtttcttttcttcctgaagtcaacaggacagctgcatcctcagggcttttctgtgttgagtctgacaagaagtaaaagaaaagc

SEQ ID NO: 1913 - DNA, 587 bp, Rattus norvegicus
  Genbank Accession No. AI171953
gctctgattggtattttatttctcctttacaagttccacataatagacaaaggctttttgataacattgttatctttgctgaaaacgatcatataatcattttaaacaacacaaatgtgtacatacatgactgaggtttctgcgcctataaacatctctgtgggtttaacaaggaaaaaagcaatatactgataattcaactgtaactcttagaaaaacaccggtttccttaccaagcacgagtgtcctatacagggacctatcatccaagatggcaatgagttcagcctagggcagccaggagcagctccccacaccggctcagaagacccttcccacccagcacttcttccaagggctccttaacctcatcacaggaagacagcagtcgccccaagagaggacagagcagcagacacactggttgtggtttctgagtgtcgtgtgcggcatttcacatccagcgtctcaggaacgtgtccatgcaagcatgcgtaccattctttagactgctcccctcatttctcgagtgaggggaccaggccttcctaattcactttaggtgcctgggataacaaagtatttca

SEQ ID NO: 1914 - DNA, 577 bp, Rattus norvegicus
  Genbank Accession No. AI171975
aagctcttttgattaactttattgaatagccaaatttataagttagcacagatcaaacgattgtttgcatgggttacaaatgacttttttttaaaaacaggaataaaacagtgaaaattacaatctgtaaaaaggaagaccaatcttgcctcaacatttcagagcaagactgagcacaacacactggaggtcaacacatatttttgatttgagaacatggacttaatgttacaatatcatacaggctactttacaaaattaaattttctatgtacggattgtgtttatagtagttaaaactgtgaactcacatttggtggtccctagatgagagctgttctgcatctctgattagaagaagtaaatcttttactctaattattgcaaaacagtctattagactcaatacattacattaaattaaaatatatgcaagctaaaataaatgttactgcttgagtgaatattagtatgtcagacttacagaaacattattttaaaaattctagaaattagaaaaatagagtactttttatggtagaactgccatgctcagatttatatatcaagaatgccc

SEQ ID NO: 1915 - DNA, 619 bp, Rattus norvegicus
  Genbank Accession No. AI171982
cagggcagactcagattttatttcagacgagggcgggatctgaggcttgaccactcatgatgaccactgctcgtgatgacctttgaacctcgagaagaacacaggggatcacaacgcagatggtggacgcggttatcaatcaacatgcgatgcacacagggggaggggttaacacacggcacgtgctcggtgttaaaggtctgttattggttctgtaataaggacgatatatatatatatataaaataaaatacctcaatgtacaataatgtatatagtaaaataccataaatattatatatatataataaaatacattagtgtataatagatataataaaataccataagttattatatatatataataaaataccttagtgtaataatgtatataataaaataccataaaatattatatatatatatatatatcgctgtaagattcactataaggtttgctataggatttgctataggatctactataaggtttgctatgagattggctataaggtttgctataggatctgctatagcatctgctttaagatctgctatagggcctgctataggattcgctttaggggccacgtgacacccttaagacgccaggccg

SEQ ID NO: 1916 - DNA, 677 bp, Rattus norvegicus
  Genbank Accession No. AI171999
aactatgcatctcattttattatgactccatatgtcaggaggggatgctattgaagtaacaatcatttaaaaacaacaaccaacaaaccagcatttaatttggtatttaaaaccaatcattgaaagtcaaacggaagcagtatgtaaaataactaagataacaagtagtatgaactcaagctctgtgtattgaaatatgataattcatcacgagtgagctacaatgtacctgcaaggacaggaagggcatacgttagcaaagagaggctgttagagtgcaggattcccctcaacattttaaagggctttagaacagattttctatgcaaacactaaccaactataatttgttgtatgttctttcacacatgaccttatttgaagcagtgttcttactaacacagttcatattaataaaacattgagaagaattttctttcccagatatttcactagtttgaaagagttattccagagattagtctgaatttctgtggcaacctaagccattaatgaagacatgcgtctgaaaataaggcagtctctctataatctgttcatgaatagaaaacaaatctttggttttctgcttaaagtggcagaaaagattttgcaaaaagaaatattaaataacaaacccaaagagctcttaacaagcaatgggaaactccaaaccc

SEQ ID NO: 1917 - DNA, 647 bp, Rattus norvegicus
  Genbank Accession No. AI172041
atctttaattttccatttttattttaagcgatcacctacattttagtgattaaatttaagagatatgtacccattaatcagatttattatcaattcaatttgaaggcaattttcaacctttaataagttatattcatatctgagattgtttaagctttctcatggagaaaaagaaaccaggcagcagctagagctgcaacccaagttttcttctgctcatccttaggcatttgtactgtgtggaccgagtgactggggccaggtcttctttctatgaaacagagtcttactgtgcagccctcgctggcctagaactcactgtgtagaccggctgctgcctcctaagatctgagactgaaggtgtggactgcggtggcctggctgcccagctgcccagcctctaagttaagggttgtggtctttcacccactgctcgatccactttgagatttggttgatattgtcctctagctgctctggctcgttactgggcagctgatgcacaatttcttctttgtaagatgccatggcttcttcatagagaacttgaaaaatctcacactgaatattatcttgtagtttcttctcgtgataaccccttgtttcaagtcgtttgtacaatataccattgtctgtccttaacacga

SEQ ID NO: 1918 - DNA, 520 bp, Rattus norvegicus
  Genbank Accession No. AI172045
atcacaatgatgaagcccagagggaggggggcctgggtgtcacagggcaggctcctgctccatgggctcctcggctggccgggggctgtgctcttgagtggcagcagcctgggcctgctcagcccccatggaaagcagggccatggcgctcacagtctcggcctcctctttctcacccgtctgagcctcccgcagcgagcagcccagaccagtggcaaacctctgtacacagctccagtgtttgctctggatctcgatgactttctctagtgtggcaactgcattgacgctgggcttttgctgcaagactgcttcatccaagggctgcagctccacgctgagcagagccgagacacaggcctcagaagcatcacagatggcggtcaagtcatgacctccctccagggccagcaccacccggccccctgccagtgtcatgagctgcctggtcaagtggccaaaacatctggcggtgacagaatagccacccagtggagacagatgtccttcaacagcatta

SEQ ID NO: 1919 - DNA, 621 bp, Rattus norvegicus
  Genbank Accession No. AI172050
tatacacaataataggtttcactgacattctcatacatgtataatgtattctgagcatattcacccgttatcttcttaccactttccttctcccattaattcccctttctcaaatgcaagaggccttggattcaatccctaatacctcaaccaaccaaaaaaccaaccacacagtcccaaggccacaaaagttacacgatagaatttttcagtatttaaaatgtcatatgaagtaaaataaagtttttgggaataaatgtctcaaagctgttcattcccatgagttattttcttacataaaatcccactcccataacacacatgtctgtcacagtgtctcagagctgctacttcatttcacgtcttcataatctgtgaaagatgaagtctaacgtcctcatttcacaccatgaagcaatcagaatgaatgctctatcaatcgaagagggcaaactgaattctttttccttctagagatgttttataccacctctcccttgctaaggggttaactgtatagttaaagttctagatacctgaccaatttaagatctgtatcctggctggaatcgagcagtctcttcaaaaatgagttctttgagcttctccttaagtaagtcg

SEQ ID NO: 1920 - DNA, 669 bp, Rattus norvegicus
  Genbank Accession No. AI172051
ttttctttatgaaatttattttcttatataaattatgtatttctctgggcagacagccttcaccttattgcactagtagcacatctgtaataccaaactacaggacaagtcttaacaagaggtttgtgttcttgaacgtagcacttgtctaccaggcactgtagaagagaatgaggaaaagccaggacctgctcaggagcttaagggttgggttgggtgggatatggacagtaacacttctaacaactggttttctcccaggaaggcaaacatgcaaagcttccatctggattttgggagcagggacaggttggaaggcaactctgctccctttgtttctgagagaagtgggcacttacctcgcatttgtaacaaggcctaactgatgctttggggcaacaatcaggtgtggagttttcatcaccagatttataattagcagcaattaagaatgggccaccatcactgccacagtgaggtgacccatcctggcaccagggacccagaagctgtattctagataggtgccactaagatccagagctgggacctcaaactgctccttatctcaccatggctctgcaacactagttagcaacactccaggtacagggttcctcaaccactggtcaaagctatgatatggatggagtctgtaggcagaatgaa

SEQ ID NO: 1921 - DNA, 647 bp, Rattus norvegicus
  Genbank Accession No. AI172056
gggggggaaaaggtttattttttcctcagaagaaacagactggggaacatttacaacccacattaacttgcagttggtcctaaccctttcgggaacaggtgttaaaatgttaggtgctctacggaatgaaggtgttcaccccagacagaatgtacatggacgatgcttgaagactgcatgttttttccctgagagacgtgtaagacaaacagaatttgctgagagccatctttccaaacaggaagcataacaagccaacatgtaaaggaaggagaagccaaggttaattcaataagacaggtgagacacctagaaagaccaatacaaaaattccaaacaaagcttggcagtcattagtagaaaagaaatacatatttgttttattgacaccaggcttaaacttgtgttaaacaagtaaagcctgtgaatagcaccgtggtaaagattagtctgctttcccaaagcattttacaatttagtaagtcaacaggggatcaaatgtcttacatctacctgtgatccttaaatacagaaacagattggataattaaccctgcatagttataactcggatttgttctactacaaccagtccacacacacaactggctctgcatatacactagaactgatcatgacaaagtttt

SEQ ID NO: 1922 - DNA, 660 bp, Rattus norvegicus
  Genbank Accession No. AI172057
aagtggaactttctctttatgacagatcagcataagcaccctgcggagtatttcttataaaacagtataacagtgatgcagaatgatctcacaaagccatcttcggacctgacatccgggctatagcctaagagcctttagcaagtgaccgatcaatcacaacattactatgatgctcattatttaccaggtaaacctgaaataaatcaacaaaataaaacaaggacaaaatccaagatctgccaaacgacgactgtgtttagtaatgggaaaaacactgaatctgagccggtccatctgaattcttgtctttgtccttggatggatgatctgagaggacagccttggttaagtctttcagtttaaattgacagagctgcttttatggttgtgtacagtctttttctaacaacgcaaacttggcaaccaattcgacctgcatataccatataactcctgtgccctgtgtcatctcagtcctcaaattaacaaacatcgtgtggttccttaccagacacaaactcgagagacatggtttcatgacagattacaaagtcacggaagtccgaagaaatatgagttgacctcagacatccttcttggtgaaacaatgcaaggacttacggagagaaacaagcgagttcatacattaattacacc

SEQ ID NO: 1923 - DNA, 546 bp, Rattus norvegicus
  Genbank Accession No. AI172060
ggctgatagctgaatttttattggcagttctagtaaaatatgtaacttctcatttattctaagcaaggctctccccacccccagctttcttcaaataatctctttactcttccattagaatgtgaagtcttggagattttgaacagcaaggtttcgggtgataagcagtcactttaaatcatgtgttggctatgtgggaaggaagactaggggaggatgtcgagatggtgagtgagagagatagttagctcatcggacacactggaagacaacaggcatctcaaagctgctttcggtatctcacgaaggcccaaactgctaccagggtaagggcaaacactggcagcagcaccacagctacaggaactccactcggctctccgtcgcctcgatgaactataggtccattctgcactggtaacctgtgctgcactctcagggacacggcatatcctgcattacggaagaggtctacggcatcttggtgcaacaggttcttcaggtcttggccatttaccgagaggatcttatcaccctcctggagcc

SEQ ID NO: 1924 - DNA, 511 bp, Rattus norvegicus
  Genbank Accession No. AI172078
ctgggaactgtaagtttattaacacaggggtgttttaccaaacacactgccttaaataaataaaatcccagtttcattaacaccacacaaacacagtttgacagggcacaatacaaagttgattgtttatgatgtctgacttgtattccctagaggtcccaaaaaaacttggtcggtccctcagtaaattaccttgcatcaagaggaaagcagacttaattatgtcggggattctggaacaatgatttgaaaaaactcagctttgaaaaaagtaagggtttttacaaatctgatcactcgcagcagattacacttcgagacttgatcaaaaacaaagcaaagtggctggaaaaggcttcgttctcccttcccccacactacaaccacttttatttttggcatgagttattaaccttttctaacaggaggaaaatgtgttctgcaaactcccggatggcttcacggcccccgttgcatttgcaaatgtagcccacagccttttgggccctgg

SEQ ID NO: 1925 - DNA, 391 bp, Rattus norvegicus
  Genbank Accession No. AI172086
gattgggcatttaattgtctctaggatgccccgaggagaggacgaggggcctttggcagagctctggctgatgaagtaacagaaacgatgccccgaggagaggacgaggggcctttggcagagctctggctgatgaagtaacagaaacgctggacagggagtgccaggcagagaggtagccccaaggtctggctagggaaagccatcaccagggcttaagacagtcttcgagaccagttggtgaataaggaatgttgcctctgaaggaggaagaggctacagaaagggcctgggtttgcagggagggaccccaaggtctgaagattaggaacaacaaggagttagttccgagccctggtgaaaactgggtagggtctgtggccatcctgac

SEQ ID NO: 1926 - DNA, 580 bp, Rattus norvegicus
  Genbank Accession No. AI172099
gaacacaataaatatttattgaataaataacatctttcaagtgccttaaacagattctctaacttacctaagttctgaaaagtataacaaaatgaagacaacgggacaaggtagacatctttggctccatttggaggagggccatagctcatcatctgatttctctcaggctgtttgacttctggaaaatggtctgacaccatttccttttctataaagagttagctgcctcgcttctagttccatcatcctgtatcaactggtttttcttctactgattgatgcctgtcttctgattattgggccagttcaaggcagtatagtccatctgggggaaaggcctggattctacttacttctaatgagaaaagccagactcagtagaccccagaatggaccagcaaaggcagatgggcactggattcaaaagttactgagatcagttcttttaaagaaacactgtttgaatctgctctatccctccccaaggaaattcacagcagacagggctccccaaagaacctgacctggtcctctgactaattggagatgaatacagagagcacggtgggatgactga

SEQ ID NO: 1927 - DNA, 560 bp, Rattus norvegicus
  Genbank Accession No. AI172102
ggctgtaattgcgtttattagcttgacaaggcagatgtgaatattttctgtgacaaaatggtgacaaaatatatcagccacatatcggccacatatcagccggcacacattagatgccacaaggaaataagaactaacgattttagaaacagtaggcatgttcttccctgaagctactggtgtgggaaaggcaggagatggggacaggaggcgtgctgtatccttgcgttgctcaacctccaccatgcatgtggcctgtcctgacagtgcagctcctgactacctttatcttgcaccctgaagagcatacagggcactggcagtccatgtatttccaggtcctgaggtgcacagattggtttgggggccatgctttcccagcccttgggccttacgcaacttcacagcagatgaggcacacgctggcacgtggtctgtccagggcagtggtgcaggccaggccctggtgggctagctgtcataccagtcgaggaagagcaaggaaaaggaacacatcaccaggaagaagaggatccacactcggaagcctgcgttggttt

SEQ ID NO: 1928 - DNA, 498 bp, Rattus norvegicus
  Genbank Accession No. AI172105
aggtaaaccatccaagcagtttttattcattaatattcataaatacacacagcagcttcattagagatttcaatttcctcttcagtttgaatgtggagtattaggagagccttttgcatgtcaagggacaggaagcagagatcaccctgcactgctacctacatttacctgctagaagtaaaaattagttaagtggaaatgattatcatatatatccctctcttccttttgaatgtacccaatgtaacaagagtgacagacctgaaattacaatcaccgcacaaacccaggatagctgttgtccactttcattggcaaatacagcacagaggacattgtctgccagtggggaggtcatcaaagaggacgtggtggaggctcatttcctttattactctcttttaaatttaggttttctaaagcgacatttaaaggcataatatctacacagcccatagcaccaaaatctgccattttcccccgttcatcctcgtctga

SEQ ID NO: 1929 - DNA, 652 bp, Rattus norvegicus
  Genbank Accession No. AI172152
aactaaaagagctgacgactttattttcacatttcacaatgtaagtgaaaaccgcacttttttgtaccacttctccctccagaagcgttctctctgttaggaagggaagttcctcatcatgcacctaggaaacactcagggtcagcaccaagatctcctggcgaaacaacaagaaatacaaaaggataaagagcgcttctgctcttatctgtctggccgggtcatgccaggccgtgtgggcaccatcatagggcgggcgggaggtctcatcattggaggcccgggcatcatgggcatatggcctcccatgggtggtctcatcccaggagctggtcccacaggcatcatcccaggaggaggggggcccatcattggcatcatgggagggcctcccatgtggggtgcaggcatcatgccaggccgaggaggacccgggagactggggggaggcgggatcatggcccctgcaggcggaggagcagagaacggagctggagggatctttccttgttgaaatgcagccgttgttttgtcaatcaggctctgggcctgttcttccatccatttctggtaatagtcttttacattctctttgtgtttccgaccactgcagtgtgtcttccttacagacggagaatcgtgggtaagatac

SEQ ID NO: 1930 - DNA, 524 bp, Rattus norvegicus
  Genbank Accession No. AI172171
aggagctggggaccgaacccagggccttgcgcttgctaggcaagtgctctaccactgagctaaattcccaaacccctcttttgattttcttatagataatcatggtttccccttttctagtttctgcctttaagatatctcagccctttaatgttttgctggcccttagcgctctcacaatctctagccttgcaggagtgatatcaggtgtacagagagtagaatttcactacaagtgggaaatcactaatggggaaattcatggggagcccataccaaggtctggagtgcaaaaccctgtctcagaatctttattctagggtcatttcagccctggactgcaacctcgtgtgattgagtaaggtcgatgactcctgtccccactgtttcctttggcacatctttgtgttttctcacatcaacctctctcctcaaaccgtttccaaactagtcacgggttgctggcctacttactgaatgcaaaacctcagaacaaagaggaccgaaagaagccggactaggca

SEQ ID NO: 1931 - DNA, 719 bp, Rattus norvegicus
  Genbank Accession No. AI172184
attttaacttttttattgtttgcttattaaacatacattctcaaactgacactttgccatgaataaagcaacaaaaataaggcaataccataagatgtgctttacatacaaacatcatcctggaagagtaggaagtctgaatccatgtacaacaaaaaaagccaggaacaaaaagcactgtattctgaacacacacaaatgtgtatgtatgtaaagacagcacacacacaatacagtttacttgggttctttatgagcataattccttaatcatcctttggaagaatgaatcttaagaaataagaaatctgaactgcatttattttcacaatatcaatgttaaacttaggagaagcaacttcattgactaaatgttaaatatttcaagagtaaaaggcaaccttaatttttagtaaccctctaaacagggtctggaaaacagtaggttttcctctcttggtatgaacaaaggatggtaagcaagcatcattgagagtgtggacacatagaaaaccatcttgggaaccgtgctcttcacaagcctaagaaaccaccagaaataatgagtagaccccatgcaacccaaatgcaaagctaactctatacatgttacaattttcaaactcttgcttctaagacaattttagtacacctaataagtacagcaggtcatttagaaaaacagaaacaaaatatatacccagtctttgcaattcaaa

SEQ ID NO: 1932 - DNA, 646 bp, Rattus norvegicus
  Genbank Accession No. AI172185
cactggccattagctttttattgacaggtgatgcttccacagaatgcacaagagattgtctgtacagcagtcatgtctgccttgttagcctgatggttgctgtggcctcctgtgttggacagctttcaagtggatacctatacataccggtctactcccccttgacgaaagcaaggccttatctcaaagccctttcatcctaagaataaattctgttctttgtgtcccattccagagattccaagtccacttcctctctggatgccagtctgtggagagcactgccacatgggctgaccatcaggcctcagaagcctttctcaagaagccaggctttaagttgctcatcaaagtagcccttgattcgaagagtacctgtcacctcattaacctgggtgacaggcgtctttcccagcaatgggctcaaaaattcttccacatccttctgtagagcccagatgtcaccttctaccttgcgaattaaggtcatctgtcggttgccatgtgtgatctccttatagacagggatgttgtgcatccgagagcgacgaacaaagtagggcaagctgggaaggggatctctgggaggctgccaaccactaggagtgggataatgtttatgttttggtggctctgggattttggt

SEQ ID NO: 1933 - DNA, 529 bp, Rattus norvegicus
  Genbank Accession No. AI172199
atgggggaaaaaaagtatatatttagaattaaccatctggactcactttagatgatcccaatcttgttggcaacatctagagcatcataatcaggagccaagcgaacatatgccttcttctctccgtcaggccgtatcagagtattgactttggccacatctatatcatagagttttttcacggcctgtttgatctggtgcttgttggccttaacatccacaatgaacacaagcgtgttgttgtcctctattttcttcatagctgactcggtggtcagtgggaatttgatgatagcatagtggtcaagcttgtttctcctgggtgcactctttcgaggatattttggctgcctccggagccgcagggtcttgggccgccggaaagtgggtgacgttcggatcttcttctttttgtgactgtggacacctttcagcactgccttcttagctttcaaggccttcgctttggcttcggctttgggaggggcaggagcttccttcttcgctttcggcgccatctcctcgtgcc

SEQ ID NO: 1934 - DNA, 656 bp, Rattus norvegicus
  Genbank Accession No. AI172260
caatggttttgaatctggcatttctgtgtatgtctcactctatatgtacagtacattggtgatgtacacgtagcagggaaaacacatggaaaaagtgacttcagcaaaggtggcttggtggtgccaggccatgcaccaagcgggatggctcagtagaagcagacagtatgcagaaaggcccggccactcttctcctcaaactcctgcagcagctcatcgatttcattctccatatcctcggtgtgctggatacactggcagagctcgcagataaggaatgctcccagggtggcctcttcatggttgtcctggatgtccacattgaccacatgcactggctggcaggtctcctgttccctggagttcagatcttctacaacctggtcatagactctctcttcacaagtgaggatcaggtcaaacaggtctttgcagttctggaatctttctggacggggcttgatccttttatttctgtccaacatatgtagaattccattttgtgtatagagttctttgtctttcctgaggagatcattgtacatctggtcatatgtggttttgaagtcataaacattgggcttgtcaggtgctggtcctgggagcttcacatgagttcctgttccaaaagagcggacactgaaaccacgtttgct

SEQ ID NO: 1935 - DNA, 625 bp, Rattus norvegicus
  Genbank Accession No. AI172263
gggtggtgggctttaaagaaaacaagttttattttttataatcagaacattctaataaaaatattattataacattactccctctgtcctccaggccttgactaacaggcatgctgtggagtgcctacacactggctccctgaggtaggtgtggagggacccactgcccagcctgtgggcagcccatgctgccagagatgcccactcctcccctcccagacgtgtgtgggctggaccttctccctgtgcagctaggtcatgctccagactggtacaggtgacaatggggggctgggtgggcacagagcctgcctgaggggcacagggccagaagaaggcccccatggcacagcaacagacacctgagaactcgccctggcaggcacctctgcaggtgaggtgggcagcatcagcagacaggagcccagccccctgcagggctgcagtttgtgagggcaaccctgcgggggaggggcagctccatcagtgacaccggcacagagaaatactgtcaactgtctccacagggagctactgaccaaagccagtctctaagtaaaaataggtttggggctctcggtgctgatggtcttgcctgcaccacagaaaattcccagcaggacat

SEQ ID NO: 1936 - DNA, 551 bp, Rattus norvegicus
  Genbank Accession No. AI172284
gtggtttcacttgtcttcattttttgaggtagaagccatgaaacatcattccctatgaacaacaggaactgaggatcaaatcaatgatgagcgtccaaggttgtaacagaaaccaggcctggatctgggaacccagttcatgatctgcataagatccatgctttcagacagtactagtacaagaacatcaggctgggttgttttgagacaaggccttgctgtagcctacactggtcttgaacttccatcagtgtttctgcctcagcctcctcggttgctggggttatagacatgtcgcactgtgactggctgaacagcaacttttacaaagaatgtaatatgctggctaagacaaaagttctgacatagtacctaagatgtatacaccaaagaaaggccagagactggagctggctggggcctggtgctgctcactgccactgcaggcagttcaaaggcggactatcccacatcccagttctccacagtcaggtctctgaggagcaagaaccagaagcacaaatggtcttcccagcgatgcccctcgtgcc

SEQ ID NO: 1937 - DNA, 634 bp, Rattus norvegicus
  Genbank Accession No. AI172285
aggtgtcacacttcatttaatctgaagaacattacaggctctctgtcttcagatataaattataacagtacagaacacagcgaactcgaacaatttaaaaactaagtaagtctacacggtgttaattccggcaagagtcttgccaatctgtttgaaagtcacccctgacctcatttcagtagacgtgcaccatgccatagaggaatgtccaaaagaggacgtaggtgaagaggcctccaatgaggcctcctgtaaagagaggtcttcgtgacttgaagtatttgttccacctccttcccgctttgagaattaggagcagggagagcaggacggaggcaagcaggtagaagatgaagccgtagagaccggtgaggccgaggatgccggctgtggcccccgacagcgctgacactgaggtccggcagtaatccaggaccgcggcgttgcctcgcacggctgcctcgctgatgaacggcggcccttcccgtttggccaccaccgcggccatcgcatccgccggggctccgcttctgccttctcgcggactcacgcggaactggaatgtagcggcacgcagtccctcgtgttccgtcagacaggaaaaagcggagagtccagcgccgcccctcgtgcc

SEQ ID NO: 1938 - DNA, 574 bp, Rattus norvegicus
  Genbank Accession No. AI172313
caaattgacatgagtgtttattgcacaaatttcccctagaactgggaggttattataatacaggtgtacatttgagaaatgtattcagaacaacaaacaagtatgtacattttatatagtcatcatctaaataacttaagagaaagcagaacattctcataagacagctactggatgtaggcattatgcaaattatttttagtgatcatctgcactgtgtgccaactgcaacaaaatgaaatctgtagtaatgtttattgcacttaatagtttcaaattcaatattaagacatattaataaatgcaagatatttaaaatcaaatcaattagttaacatatacagaaaattagttttaatcctataatataaaagatccctttttaatttcctgtaacaatgaacaggtatttttaacatgtagcacatatttatctgtaccattaagtagttgaaaaattattaaacaggccaaaactctcttcacatttatcacagccacactgtaaagaagtagcagctcattccttgggctctgagttagtaaagaatatgatgatcaaagcattataaaa

SEQ ID NO: 1939 - DNA, 550 bp, Rattus norvegicus
  Genbank Accession No. AI172403
aggctgccagtatttatttatttcagttactcctgcctgaaagtccttatttctcaagaacagcaatgcatctgagtatccactctctccagtccttgaaggcttccacaggcttcggcaaatacacatgctcagagctgcttttcggagtcgctcctgactcgccgcaagactcatcgtcaatccacttcaccagggctttgtatctctccacaatattgaagccgatagcactctgcagcttacgtaagcagatagggcagacatttagaggacgacggtcagattcctccaagtgattggagccttgcattaagcacgcaagccactggcagtgtcgcaatccaagtatgtgtccgatctcgtgggttaaagtcttacaggatcgcagcagcaaaacactagtgatctcagggatgtagtagttatcaaaaatggagtagtcactggagactgtccgctggggaaccttcacgctgccttcatatttcgaggtgtagaagtccttgccgtacctggcaaagctgaatatgcccacgccacttgacag

SEQ ID NO: 1940 - DNA, 695 bp, Rattus norvegicus
  Genbank Accession No. AI172435
gaatttaatgatgttcaacagtggttttattatgctaatgcttgataatatttaacagtgaattcaattacttcacattaatgtttgccaatagttattaacaattcttaaatattttaaatcaaccaacctagaagtacacaaggcttactctcaactcttctgaggggacatgaagaccgaaagaaacctacgccctgagtccaagtgtctaacccacaacaactacatcatgactggtgaactcataggtaggtacttccacgttgagaggtgcatggcccttcctgatcctgccagaagcatcatagtgtgacccatggcaggggcaatagtctccaccaaaatctcctgcgtttgcaatgggtacacaaccaagatgagtacagacaccgatcagaataacccattcaggcttctttacacgctctaaatcatgctgtgggtcccttaactgggacacttcaactgcagcttcctggtcaatctccttcttggttctatggcgcacaaacagaggtttgcctctccatttaaaagccatgttcttcccctctggaatatcagacaacttgatctcgatcttcgacatggccagtacattcgcagaagcactcatgcttgaaacaaactgggagactgcatttttcgcagcgtatgcaacacccacagtagtagttgcagttaccaagtaa

SEQ ID NO: 1941 - DNA, 557 bp, Rattus norvegicus
  Genbank Accession No. AI172452
ctttgtttgcaaaatgttaaggagactatccaaggggggaaaaaatgaattcaaagggtttgtgtcacaaagtaaaccagtcctccacaggcaaattcatttgtttttgggcttcgaggccatgtagagggcgatcaggcagtagatggtccctcccactgtgagagccatggtggtccggtaaagcatttggtccggaaggcctcgtttcaggtggatgggcacaccgtcagccttctggaagaatctctgtagctctggaactttattcttcccagcatagtcatatgctgtcacactggaggtcagtttggtcggtgtggcaaatatgataggcggtgcttctctggaaaccggcttaaaacccttttttggtttctgccatggtggctcacaacaggtccatgtatcctgagctggcctttaactcacttgcagcccaggctggtcttgaactcctgatcctgttacatctgcttcctgcggagtataggcttccgaagcccaagcactaaccaacttctgcgtgaaactgttaaactggagtacatgttggc

SEQ ID NO: 1942 - DNA, 674 bp, Rattus norvegicus
  Genbank Accession No. AI172465
acaagaaaatggttttattctcacttttagttccagacagctcacaaatacactgcctctgatgatacccggatgcacatacactcatgacgcaggtggggaggcaacagcttgaggtttctctacacaaactattctgttaatgtcgcttaaaaatccgcagactacacgatatgcgtgggcagaagcccgctgagtgcgtctcctgacactaaagtgtaatacacagcaaacagccaacacttacatgattcacaccaaaatgatgacacccaaaacacgttccttttaaaggacaggtttatcagtaaaatattatatttctttaatactctgcctgatgcttcctatgctgtgggaaagctaagcgtgagtctagtcaccagcttcttggatgggcctttcccactagcttttagtaataagagtcacaattaggtcataaataaacaggtatattattaatcccatgattgaagtttaggaggggaagttgtcaaactactttgatgcacagccaggttctacagcaccgacaggagctgctctctgctttgctgtgtcccgaaaactctgcaagagcagagctgctagcgatgggagatgcagtaaactctactcgggagtttctttccaagaaggggaagagattcaacaaaacggtaggctagcgc

SEQ ID NO: 1943 - DNA, 601 bp, Rattus norvegicus
  Genbank Accession No. AI172476
ataccaaagaaaagtctttattgtaaacaaggtataaagtacaacaaaaaatattgtgcaaattgtaactcgtgattttttttataatttttaagaaaactctttttttcaagggttcaagtttgcatgtcagaaacctatgagatacagaaacggtttaaatgggaaggtatggtgagtttttcactgtggactttgaataatttacctttactaccaagtgtgtcttctatccactttacaacagaacagaaatactgttagcaaaagtcactgctttcaggtggggatacaactcggtgacagagcttacagaacacaagcaaggctctggatccccagaactgcaggtgtgaccacattatgacactttaaagtctcggagtttcccggacacccagacactgcagcggcaggaagaacgtatctgcaccatgaatatccttgtcaagtcggaagtgaatgttctagtaacaatttcctacctatctactcagacatcctgacaaactcctataaataaaaggacacctgtccatctgtgatggtcactaacttcctgatttgatagaaacagtgtacgtctgacgtaagtgtcctt

SEQ ID NO: 1944 - DNA, 340 bp, Rattus norvegicus
  Genbank Accession No. AI172524
tttttttttttttttttcaagcaatagccaactttattgtgagcataggaccattcatactctgagggtcaagagaagtcacccacgagaggaaagcgtaaaatccagaacaagccgtatgtggcaaaagcatgtttttccatagggggatatgaataacgacagttgcagtgaattcctaaccgccatacgggaagcgctggagaacacattccaagaaaaccccatgttgtgaaggaacagagatcacgggactcttgtcttgttcacttggaattttctcacagggtctcagagaactcctcacgcagcttcacggactgtgcattccaaacgagaa

SEQ ID NO: 1945 - DNA, 261 bp, Rattus norvegicus
  Genbank Accession No. AI172572
tttttttttttttttttgccagtagttatttatttcagttactcctgcctgaaagtccgtatttctcaagaacagcaatgcatctgagtatccactctctccagtccttgacggcttccataggcttcggaaaatacacatgctcagagctgcttttcggagtcgctcgtgagtcgccgtaagactcatcgtcaatctatgtcaccatggctttgtatctctccacaatattgaggccgatagcactctgcaccttacata

SEQ ID NO: 1946 - DNA, 511 bp, Rattus norvegicus
  Genbank Accession No. AI172600
tttttttttttttttttagggttcctaactcaaaatttaataaagttatatggtaacaaacaataacttgtttcaaggaaagtgtccaactctcccaattaggtctcactgtacatggacagagctctgtctgacatacggaaccttcctttcagcgcatataacatctaacgattactagggagatcaggcatgaatacaactctgaccctttgaccaagccatctacagtttatcttctggttctttctctggtgaaatggattcttttccatcttagatggcaaaccctctctttcgccgcctgggaacggccatggcaagagcagactcattttgagcagggaacaagcaagcagcagggagcacaagtcctttgggaaggttaaacacagacagaccccagaacacatcggccagcagagatttgcccaagtaagaggctgggatagagtaactgtagtgggaaaatacactttacagtggtcaatttacaaagagaaagcgcccc

SEQ ID NO: 1947 - DNA, 358 bp, Rattus norvegicus
  Genbank Accession No. AI172610
tttttttttttttttttcaataaaccaatttaattttaaatgaggcattgccagaaaattttgtacattgacttggcccagcgatgttctgtacccttggtgctgtgaagcaggacacgagcggaaggcaaagacgggttctcacaaggactgctgcaagtcaggccagacagtgtatttaaacagtcttcttagacattttcttgcctttcttaaaaactagcttatttttaacgtagccacgcttccttttagtagtcttctttgacaaatacttctgtttggggaagatgttggtgactcgaggcttgtgacctaatgtctccctgttgtcgggtgctttcacttcctcgtgccg

SEQ ID NO: 1948 - DNA, 535 bp, Rattus norvegicus
  Genbank Accession No. AI172618
  misc_feature (1)..(535): n = a or c or g or t
tttttttttttttttttaattttancaagtttatttgtgcttcaaaatacaaagcccaatccttactcaggaaatctatcagatggttttctaagctcagcagggcctccccagctgtcaaaggcttccagggtgaccacagtcactccattttgctagctcctcttgcagaacaaagtccaaggtcttttgatggctctttgggaaattaaaggcaggagcagcagcaggctgtgtggttctctctggcaccacagggcaataaccaggacgcagccatcctgaaggccctgatgtgccacgcctttcgatgatgcccctggagccgtcctggaatctgccacttagcgcagaagcacggatgctctgacgagctgtgtgtggaagctcctctgctcgcaggcagaagtccaggcgcaggagggctgcccccgtggctgcagcaacaccccttgaaggcccagaaactatggttcagcctcccccatgcagactggtcacgaaggcccttcctcaccgcgcaacacctcaatca

SEQ ID NO: 1949 - DNA, 580 bp, Rattus norvegicus
  Genbank Accession No. AI175011
  misc_feature (1)..(580): n = a or c or g or t
cacaatttttattgcaacgtggccacttttatgagggcagggagtttgatctcaaaacaatgttccatttaaggctcttttatacagaaattgccatcatgactgatattcaaaatatctgtagtgtttcaagactcatatggtaaacataaaactcctataattatacagtagtgtacactcattgggaatccaaagacatcaacacatctattcctttgaagaaaatatgcaggtaagaaaaatgaacactgagatactaggataaattgaggacaggtaatgaaacttaattggcattctttataanggactaaacgcattacaaaataaaagtgcttttaaccaataatgttaaacctgtgctgccatgtcacaataagcgagccaaggcgggtgaggtgtgtgactgctccagtgccgcaaagaactgtgatcaagtgcagctcgactataaataatactgaaacaagtttcccatatgaccagtggagaatactttcaaggcattcaattagctcaaccctctgtagtactctaagctattcacgctgacaatccgttgtagtgctcacgcaag

SEQ ID NO: 1950 - DNA, 649 bp, Rattus norvegicus
  Genbank Accession No. AI175033
cattggcattaaaagtgtttattgggaatatcatccaatctatacaagttatatacaaggcatgaaaatggcaaacagcacaaaatacgattgaggtataagctaagagcacagtatgtcatgtttcaataaatataatccaaaatttgtaaactaagtaaccagatagatgagtcattttttctagtaaaaccatataaaatatttatttcatgtgaggtagaggacagttttgtgtgtcgtgtaatgcaaccaaccacagcaattttaatcataaaactatatgcactggcaaaattatcaatcgagttatgctcaatgtacctaatgtgtttccgtagttgcagaagggaccattcacatactgccttcccaggttagaaactgcggggtaattgaactattacactgccttaaaattactacgggaagtccttccagcagaaaagctaatggtgactacatgtatcacaaactcacaactcaaaaggtgtcctagatttagcaattattctaatggggtgttctcatgagaattactttaatgtgctgtgctttctttattttcaagtgaggtatcttatattgaagaaaaaatcttataaatttcttttatactaaactaactttaaacactatttcggtttct

SEQ ID NO: 1951 - DNA, 649 bp, Rattus norvegicus
  Genbank Accession No. AI175045
tttttttttattattataataaaaatatttattataaaataatcacatttctttgcatataaactaaaaacataaatgtaattcacacattaataagttaagtgggcctaggcatttagcatccatctactagagtttaaagtctcctgtgggttcataaataatagggaaggtattttgatttaatttacacagttgatgctattgagatcttaaagcttttctctattactttacacatagctcgtggtatttgggctaattaaccaaatgccttagatctttggtaaacacaagtattcatgtgcacaaacgtgtagctgaaatttcagtgaaaacatcaataacaaaacaatgatacgagagataacccaaatgccgagagtttgtgtgatcaatcaaagttattgtccacaacttttatggatcacatctgaaatgcaaaacaaatagttgtggctcctgttgtcacaaccagaagcacctcagctctaagtcaccaggaaactaaatacacatttcaaactcaactgatacacaggactgataacattacaatgcagaaaagactttcaacgttaatttgacacaaattaattaattatttcaccttatcttgtaagagtgagacccactgaagaagccacac

SEQ ID NO: 1952 - DNA, 517 bp, Rattus norvegicus
  Genbank Accession No. AI175095
aacttttcaaataagtttatttgaagcaaaataaactactgccaaaaaactttatgaaagttccatctcaaaagggtcaaaaaggggaattaactgctatgaattctttgcattcagggcgtcaaagacgcagcctgtgcagcgtgatgacgaattcttggatgagaaagcatgtagacagaagtattcctatggcagaatatttacagcactactttcaatgaagtgcttcttccataaacatttgaaatgagatgaactgcagagattaaatgaaggcttcatattgtactttcatgcacgctgattcctttaatgatcaagtcctctccacaaagagactgggcaaccttatcatctgcaaaggtaacaaaggcaaaagctctgaatggtttgggaatgaagacatctaccacttctccatactgacagaagaactgctgaagctcttcagcagtcatgtcctctgtacaacgttcaacaaacacctttctgcttctcaaaagctcgtctgggc

SEQ ID NO: 1953 - DNA, 479 bp, Rattus norvegicus
  Genbank Accession No. AI175101
aatggtttttgatttttcttcctcttaaataaacatgaatatatatatatgtgagatatatatatatatatatatatatatatatatatatatatatatatatatatatatatatatatatatatacttttctcttataaacttttgtggagtggggtgggggccttctagcctcccagcatcactcatcatcaaagttctgactcaggaggaagttggcagccaagttctcatttttctcacacgctaagtaggcctggatcaccaggctctccgggaagcccagtgccttcagcctttctatagcttccttctcctgcggtgtcacctgtatatagctcatctgtggggcctcctcacctagggcaccaacctccccctctacatcagagatgtccgccagctccccggggggctcattcaacatctggatgaactgctcctggtgacggctaatttgctgcaagagctgacggttc

SEQ ID NO: 1954 - DNA, 453 bp, Rattus norvegicus
  Genbank Accession No. AI175208
gatactaagccacgattagtcctggagggagaggtgtcttcacagttaaggcatacatttcaaaagggcctcccagcccacttcttgcttgcacatgcgcacacaatgggaaggctgtccagtgctgggtacagctggctcatgtcaggtactgcaccacgagaaacataactgcacaagtgagcagcatcccaccgatcatgaagtacttgtcctggaaggcccgcttctcaatcagcctcatcacggtgttggacaagccgagcatgttggcaatgtcgaggatctttttctgagtccccttcaaggtcagtctctgggccctcagtccctccagaatactgtgcccgcctccaatgaggtcatccatgccgtggtgaatgttctggagggaggagttaaactgcagtgattcatccatgggaatggtggtgtcagagtccgtagtggtga

SEQ ID NO: 1955 - DNA, 437 bp, Rattus norvegicus
  Genbank Accession No. AI175294
actttgaaacacctatttatatccattttaatgagaattaaaagatacaatgggtcaacaacattaaaaaaaaacctattggggtaagacaggagaatcagatcttgtttatagcgtacgctttacaagagactttgacattgtagtgttagttcatcgctgcccactgaacgatccccgtgtgcatcgtctttgtctttggtgtcactggtaccaataaacacagttcacggctttaaaacctaatcacactaactaggaaaaagtaaatcaacgtcacctttttcaaaattaaatacaaggactaatttttgtctcatggtccacaatacctggaacatcatgccaaaatattaagggttaaagggaacattattcttctctaattgcaccaaaatgtggctactgtatgctggtgtgatgacaaccagtgggca

SEQ ID NO: 1956 - DNA, 551 bp, Rattus norvegicus
  Genbank Accession No. AI175440
  misc_feature (1)..(551): n = a or c or g or t
aatcgaagggaaatgtctttatttggagcagcgggtgcagtgaggccactaggggtaaaacaatcaagttctggcacgcatggtctgctggaggtggtggctctcattcgtgaggcacataccttcattattgacaattatggaggctgttcctgtagctgcatctctggtctggtatgtaaactctgtagaaatatgattttgttttaagttttctatgtaattattgccaaaagaatcattgccaacctataatcccagcagccaggagatcaaggcgggagtattatgacttggacgctaataggggcttgcagaccatggctgcctttgctcccagtcgggcagcttggacacactggttggcaccttttcctccaaagccaataaaaaacttgtgtccatggatagtttctccagtttttggcaagcgagaagtaagactgaccaggtcggtcatgcaggaacccaccaccaccactgctgccgcctcttcctcctgccagagcctnccgggctcccctgacgccgncattactaatcctcgtgcc

SEQ ID NO: 1957 - DNA, 658 bp, Rattus norvegicus
  Genbank Accession No. AI175477
  misc_feature (1)..(658): n = a or c or g or t
aaatctgcattggcaatttttaatgtctcacttgtgcagaactgaaatgtgtttttaaaggcacagaaggaaggaaaggcagttgtctgagcatgaagtcacgggaaagggtgctggagagaaaccgtgggctgctctgcgtagctgtaggaaatgaacaatgcggtgccgaatgagagctggcgctactgtggtccaagtgcaggcatcgctcacacgtcagtcggcagagcgcagataccacagtgcacagtcgatcactgtggagtgaatgcccaggaggtgctcgatgccagtgaccaggagctgcaggcgcagtgtggtcctcattcaggacgtggacagacattcgaagcagtcaagcacataccttttcctaccagaaatcactttctctgcaagtaaacaactgtctgcctaccgagaattataattttaaaaaatggagttgggtctaattataatttgtgaataaaaaaattacaaaaataaaagcagagacttctgtccttgaaaaaagagatagaaaactagatnttcctgtaataagaaaatcatgaatatttcacctttatgtcttttcaaacgtcatctcttcttttttttatattctgccataattcacattgggagatgtatacactatggcaacttctgt

SEQ ID NO: 1958 - DNA, 644 bp, Rattus norvegicus
  Genbank Accession No. AI175486
attatgaatgacattttattcagtcattttctttacaactgaaactctgggaattcaaagttaacatccttgcctgtgagcttcttgtacacgccagaaaaagtttcgaccttatgctccacgttgttctgctgtgctttgtctaaatgaacttttatgagccggctgccatccagtttcacacggatcctcttgcccacaatttcacttgggaagaccaaatcctcaaggatggcgtcgtgcactgctgtcagggtgcggcttctggggcgcttttgcttatttttcgtacggctttttcgggttggcttgggcagaatcctcctctgagcaatgaagactacgtgtttcccactgaactttttctccaattcacgaactagccggacttggattttctggaaagatttcagctgaggaactggtacaaaaattatgatggcttttcgaccaccaccgacttcgatttcctttgccgcggtgatgttgagttcccgcagctgcgccttcagatccgagttcatctccagctcgagcagcgcctgagagatgccagactcgaactcgtccggcttctcgccattgggcttcacaatcttggcgctcgagctgaacatggcttcgtccttacggagcctcgtgcc

SEQ ID NO: 1959 - DNA, 628 bp, Rattus norvegicus
  Genbank Accession No. AI175515
gaagctatacccgatttaattccataatcagtcaaccatcaattacaatccatccaaccctctccttgggcttctctagagctctgttggggtcctgggatggggcattttttatgcagaccagggaaggccatcctatcaaagccagaacaaagtgttcatttggtcccagactgtctgtgaagccccaaggcccaggctgggatgcacagggctgtaggaagcctgggcatttttaaagcaggacttgccccacgggagcactttgcataaaggaggagtcctccacatcgagagaggctttgagggtctgatcaggtgctgaggacttccatgggtcctcgaagctatcagtaaggctccatgttctctcgattcctgaacatggtaaaagcagctcgaggcttgtccgtggggaccatgtgtccggcacccttgatggtgaggaaggtgatgtgtgagcattccttcacgaagccagctaccttgtccccagaccgaagcagtagagcctcaggaaatctcctcttgagtggcaagcgagtgaagatattgccaaaatcctggactacaagtgtgtcctcagacctatcacggccgggttccccaccagcacacggggcgtaaa

SEQ ID NO: 1960 - DNA, 670 bp, Rattus norvegicus
  Genbank Accession No. AI175528
agattatttgaaatacaactttattctgattctaaacgaaaagaatgggaatgacagtaacaaacaagatttcaccactgaatattgtgatgcgactgcagcagtcttatctttgaaattcaggaaggaaacaactctgttccaaacagctaaatatgcaagtccaaaaaatgacggtatgtttaactgccacattcactcgaagcccattcatctttcagcatcccaatgaagtacacgatctgcttagctaaataaggtggcacacgcgctgcaccgctgacatcacaggacagttgcctataaaactagacttctgacgcagggctccagcttcattttctcacaggtcgtcatcctcatccgggagcgcagtcgtctgagcaacctctaaatcatgctcgtactgtgctgccaaagctgggtccatgaccacctcaggtggggcaagagcaggcatggcaacgaactccaagttaggatctccaatgagctttctggcaagccagaggaaaggcttttcaaagttgtagttacttttggcagaaatgtcatagtactgaagattcttctttcggtggaagacaatagattttgccttcactttcctgtctttaatatccactttgttgccacacaatacaatggggatgttttcacacacgcgtac

SEQ ID NO: 1961 - DNA, 641 bp, Rattus norvegicus
  Genbank Accession No. AI175551
atctttcaagcttttatttaagtgcacagacttaaggatgatttagattttgttaaaagcagccacatccatggactgtacatagtcctcaaaagcagtaatctgctcttccagcatatctgttccaaccttatcatcttcaactacacactgtatttgaagctttttaattccgtatcccactggaaccaatttagaggagccccacaccaagccgtccgcttgaatgcttcggacacactcctcaagtttcgtcatgtctgtctcatcgtcccaaggcttcacatctaacaagatggaagacttcgcaacaactgcaggctttttagctttctttgactcatactgagcaaggcgttcttctcgtagcctctttgcgtcttcactttcctcctcatcatcagatccgaagagatcaatgtcatcatcgtctttagcatctgctgctccacttcctgtggtatctgccacactgacagggccatacttgcccaaagatttcttcactcccggcaagctggccttttctttttcgtaagatttgatatgattataccaacgcagagcatgacacaggtcagcgggtggtggaccagagattgcttcaaatactgccacatcggcttgtgatggcacgtacc

SEQ ID NO: 1962 - DNA, 556 bp, Rattus norvegicus
  Genbank Accession No. AI175578
aaatgaaacaaaaacctaacttttaattcaatgagcacagcaatgatacactgtaaatgaagtgacatggagatacaatgtcaacagaatgaagtgacacagagatacaatatcaacagaatgaagtgacagagatacaatgtcaacagaattctgcctatctcctgctaatatggtttgatttgttcttctggaatcccagcacttggaaggtagagagaagtagatcaggagttcaaggtcattctcagatacacagtgagttcaaggtcagcctgcaccacatgaattcctatcttctgaacaaaaaccaaatcaaaccaaatcaatcttctttccccattttgaataaaagaaatgaaggctcctatgtgaaaacatagtttattctctcatccagacatctgtagtttacttttacaaaataacagacaaaatttggttctttacattagtacagaatatgtgatattgaaatatatattatatcacttgagttataaacacacagcaaatgcattatcacttcacaatcaccatgttctccatacattta

SEQ ID NO: 1963 - DNA, 605 bp, Rattus norvegicus
  Genbank Accession No. AI175590
tttttttttttttttttcattttttctttgaatttaatgagtttacatcaaaaaaaattaagtagtcattttacatctaaggaataaaaaccattttaaaaaaatacaaagagtgaaaggatttttaagcaagtttacatttcttttggctatggttctgaacaattcatctcatgatatcttatcacaatgtgcaaatgcatttcacagcacctgtgacaatcatcaagttaactcttaagcgtatccactgtcagtatctcctcagaggaaaccgatctgccttctatgaaaagctccatggtacatctcagcatcgcacaaggccaccagtcacccgccctcacaggaatcgaaaaagttagttggaaataagtccacataagaatttaatatctaaaaggtgaaatgctccttgtattaatgttagcaagatctttactttttcatcactaagaaacactttaatagttttagagcaaaagctgttaaagagtctagggagctaaaaccgtacccctgaggtcaagcttacagataaatcttttgtaagtacttctcaaaatatcctccctcccatccccaaattctgtattgtttcttac

SEQ ID NO: 1964 - DNA, 321 bp, Rattus norvegicus
  Genbank Accession No. AI175642
aacagacttaattcatttatttttcttgtttaaaaacccttatgtggtagccacagctggagcctgggtcctctgaacagaaactctggtgtgggttttcacaagatggtcagtgaattcctgataaggagacttggtgaacacagtctttttccaaaggtcaggggtcaggtagctgtaggtcttggagatggcatcaaaggtggccttggcaaagttgcccagggtggcagtgcaacccctggctgaagtgtatcattcatctataccggccatcatcaatagcttcttgggcacaggagcatagacaatgccagtgcc

SEQ ID NO: 1965 - DNA, 488 bp, Rattus norvegicus
  Genbank Accession No. AI175760
gcattcaaactaaggcattttattagctggcttttcaacttaaatagtatctttgtgacctaagaacaggtgtccgtcacttcccatcacactccagaaggcagactagatggacggtttcattttcagcacaaaatagctttactctgttaccttcactaaatcttttcttagtgttaaccaaaaaaagcaccaggtcacagatggactctcccagccccagtaagataggcttccttagaacacacacagcaggagagtgaaaacagaggcttctggttttggcttggctggacgttgagtccactgagttaagtgtcttctgatcttcacagtctcagcatcaacaaatgcatttactgccaccgcaaaaggaaggaacgagagtccaatgctggcagcctggaagccgtgcgggagtgatcgttaatactggtgggcagctacctgaactttagtttccctcgtgccgaattcttggcctcgag

SEQ ID NO: 1966 - DNA, 506 bp, Rattus norvegicus
  Genbank Accession No. AI175790
caaaaagagaatcttttaataaaaattatccataaaaatcctaataaatttcaaagaacaagatattccttagtacatttataaaagaacgtctggtccttttacaaaaatctctcatttaatttaaattcagttcatatttacagattaaacatgaaatatctatggtcgccaagcatattgcacatcacagagagagagagaaacatttgtgcatctcagtaagtttgcccagagtgtccaactctagactttttattttgtagaaacacatttactttttgtgcgtgtaataaataaaaacgcagcttgtgggatgctacttaacactaaaacaaaatatcctgaaaaatattatttgtttccctctcagagagagagaagcagtgaaacagtttcacaggtacttgatatctgttggttattcgcatccaaattcaagggggaccttaacctgagccccactgagtcacagccacaaggcccacacccattattggctccaa

SEQ ID NO: 1967 - DNA, 512 bp, Rattus norvegicus
  Genbank Accession No. AI175791
cacaaaattattaaaagctttatttacgattggaatcattcaacaaaaagcaaaagcaaatgagcctgaaaaaggacctaagctgctgtctcgaatgtcctcggacactcaacagctcagtagctaggctgccttgcacctgactggcatgacaacagtggctcaacatacacagcagttgcactaacagcagcacaatttccccctttaacccttgcctgaaacaaagcaaggaaagaaggggagggcatagactctgccaagtaagtgtatttaaatactgcatgggactgttaacagcctgaaccttttccctcatttttgatagctgcagattgatgtagtaactgtcatttagcaaatgcagaatgcatgatgaagaaatcaggtgatcataaaaatccaaacacgaatgatactgatgaacgttcttggtttgtctttccaggacttctttcctgtctgttctctgtctaaggagagctccagcatttccaagcacctgaagcaaa

SEQ ID NO: 1968 - DNA, 586 bp, Rattus norvegicus
  Genbank Accession No. AI175794
ttgccttttaagtagtgttcttaaagcactacagcttggtaaacaatgtgaattagtataagtcatctcaaaagccagagttttgttttcgttgttgttgttttttaatgagttgttaaaaagatgcagcctattctaacaggataaatatttttaaccatttcactttgagttaatgaaggctcacaaatgagcaacactcctcattgaggaaaacaaaaagctgttgtcgacaagcgacagcgcacacacacaaacaaaagaactgtgtaaaaataactaactgttcccatactttcggagttactttacaatgggatgatatgcacatgatcttgctgcaactcgacacacagaccgtaatacatgtagtccagagacaacgattcagctcaggaggcgccaacttcagacagcgcagcgctataatccgttagcgcaactgcttttactcagtatttccttctagactgagatacagactagaaaaaatgctccctaattaaaatttgtattgtttacaagaaaaattttataattaatttgtattagaatttacaagtgtattctcaaatcatacttgctg

SEQ ID NO: 1969 - DNA, 523 bp, Rattus norvegicus
  Genbank Accession No. AI175871
aagttttgtgagagctttaatggcacaaaatgtttatagctacaagttacatgtgttctgtaaactgaaaggaatgacgccagtgctgacgaagagacagacgaaggatgcatgtcactctggctccattaataccaggaggtccaacaaacgcttcactgtgagattcgtctcgcgggctgtctccatttcactctttactgcaattgagtgactcactgtgctgtctctgtgccgcttttctcttgacctacaaacatctgagccaggtttcaataaacttagaacgaagcctgcttttcatcccaaattgtaaacaggaataaagctttttaaaccttatcttaaatttcaactctgttgaatcctgctttgtgataggacaatctgttttcactcaacaagaatctgtgtaggagcatgaacatcctgtatgttggaaccgcaaatcgacatcgtacatgctcactgatggacagttgctctgggacatattccatgattttattgatactttcaaaaa

SEQ ID NO: 1970 - DNA, 448 bp, Rattus norvegicus
  Genbank Accession No. AI175935
gaaagaagaagacattgcactgactccgttacatttattgaggaggtaggggaggacggcagaggggtgacaggagatttacctacatggagagggtcagggggtctgaggggctgtgcaggaatgcagtgactgtctctctaggcaaagaggagagggggcgtctgtaagtacctggtgcaaatcctgtaataaaacctaccttcacgaatgggtacagtggaatactacctgcggcattcatacgtgcttctaaacttttctatatacagtatatggtcacttttttataaatgtacagcttgggtggggggggagatctttcttcttataagcacaacattaaacataaaaccaacatgggccagccacattacaagcaaagaccaagggaaagcaagaccatcagtcagcccagcacccaacttcctccccaccagcagtctta

SEQ ID NO: 1971 - DNA, 421 bp, Rattus norvegicus
  Genbank Accession No. AI175959
atctcttatttacaaacactgggtaggacacccaaacaaacaaacatggaataacttacaaaggcaggaagctgtttattatagacagtaatcagctttcatcaaattaaaaaaaaatatatgtacatacacagttgagagaggcaggccaggggagttcatccgcaatctagcctggtactcacaagcctccctccccttcccagccctccctgctttgtgttcttacggagcactacagaagcaatctacagtctctattgcagtttgtaagcccccacccaccccccttaatactgaatgagatcgaatgttaggtccatgcagttcttggtcaatgttaacgaaaagtccatcgttctggtcgcgcgggcacagcccgttcgcaaagcgtggcggtcaacaggccgctgctctctgg

SEQ ID NO: 1972 - DNA, 525 bp, Rattus norvegicus
  Genbank Accession No. AI176101
gacaatggtaaaatttaagagctttattaaagcattttatcacaaagatgaaaacatacaaatgagaagcatgcaaccgtcatcttccaggtcaagtcaaaatgctctttctctctcctgtttcacagagctggagactgcggatcttcgaccaactcactctctggaaactattcagggcatcagacatccaaaacataaaccattatacaaagaaagtgcaaagttaaaaaagaaaacatagagacccttcccctccctaccctcagttaaaggctaacaatggcactttgctcttgcttaacctagattgtcttcaaaagtttctacaatgtgattcttaacaaaatttttaataatgtccaaaagctccttagtgtttgaaaataaatgctcagacaagacagtgcactttacatcaaacgagtctgagagccctgcattgcagctttctgtaaaataaacaagacaagaagctggtataggctttattgcacaggtagaacgtcctcaggcaggcaggta

SEQ ID NO: 1973 - DNA, 425 bp, Rattus norvegicus
  Genbank Accession No. AI176140
gaaaaaaagaaagaaaaaaggagcagttaactccttttattttctctgtttaaaatcaaacaggaaacaaacatcaactctgttatacactaacggtcttcaaagtacatcatttgtacaagagaaggactaaaaaccaaactgtttacagagatccaagcacgagtgagagagcacactccttacacggctttccgatgatactcaggaggagccacttcataatcactggcactgaacagagttgcagaattctttgccaggtacttgaggaaatcatgtagatagttcagtaataaagcaaggcttttctcatctagaggtgtataggccaacatcgctccaattcgcacaaacaatctcagtaagtgtggcgctccatacacctgggacatgggtgcatccgggtgatcggccaaaatttc

SEQ ID NO: 1974 - DNA, 463 bp, Rattus norvegicus
  Genbank Accession No. AI176160
tttgttttcttttttttctttctcaaatttatttaaaaaggattagagctgatatagtaagacatttatgacagggtcaacataaaaatgatagctttggttatactcagcacatgcaacttactacagcgctaacacgggcaagcttcccatgtgaagctgcatgggtgggtggggcagagttgagagaacagggctcacgtggagtacaggagagcaaaggcataaggggccacagggaatgcctactgtcacactagcagcaaggtgcactgtatattacacaaacacctgtgtagcatccccttgttctgatacgtcccatgtttctagttacgtaacagcatttgcagtctgtggttaccagactaagctggtgatcacaggactaagaatctctacccaaccagtctggtgcgttttcatgctgaccccctcactggtgttgacaactaattaaaac

SEQ ID NO: 1975 - DNA, 469 bp, Rattus norvegicus
  Genbank Accession No. AI176170
gaaaaaagccagcataaagcacttttattgcaataataaaacttgaaccgcatatgtagtgcaaaggcaggggacaaaagctttctctcaccaaatcactacacgggacagcagagggtgaaaaggaactgaaggaggaaaagccaggaagctgggatcagcagagagccaagcatcaaaacctgggagatgctgaagctgtgatgaccagcatcattttcttagagaacactcaaggatttgttgtggtggctgggcatccactgggtggtgagtctacaaacagcaccttcagtttaaactttccaccgaagttctagaatttagtaagtggagcgtgatagttacaagattacaaaagtccagaaaatccattagaaaaaccataggatgaaaaacaaattaagccaggtcacaaagaaggcttcaaaggtccctgccgacccagggacagatattgtagtgttca

SEQ ID NO: 1976 - DNA, 509 bp, Rattus norvegicus
  Genbank Accession No. AI176245
gccaagtgaggggaaccatgaagcccctctgggttgagattctttattctagaggtaggaaggggatcagcatgctcaggtggggagggtccagcccagctcctctagccccccactgcatgcttgtccccaataagttaccctccctcctgagtccatctgtcctgctccaccccagatggggctgacctggctcactacagaagctgcttgtccccagcctgtgggcagtgccacatggcaggctggaagaaggcagagaagcaactgggccacaccctgtggttggaggggctgcctctggttctgagggatcaggtcttaaaaaaaaaaaaagccacatcctgggctggcctggagcccagtcccacaaggtatgtgcctaaaataaggtagaagtcagggtgagattgccatcacacctcaatagctgggtctgacccctggccctgtcgctgtagctgttcctcctgcttcatcttcggtttctctgtccgggtatgccacac

SEQ ID NO: 1977 - DNA, 497 bp, Rattus norvegicus
  Genbank Accession No. AI176276
actgtccagttattttcttaaaaaactttaatgcttgataaaataaaacaaaattttagtaccatagaaaccttctgacatgtatgatgacttatcaatatgtacaacttcaaaaccaaatgcttccagcacaagcgaagtcatgctgaacgtcccaactagaggcaagctgatgaagcttcctgtttgccgtgtgagccttggcttggaagaacttagacagttagaaatataaataaaaccttcaatgagaatcaccaaaaaaaaaaaaaaatgcttgtaaaaatgaaatccagtcgtctggatctgggaagtctgtcctgcttatcagataccagcaagcaaatgaaactccatgaacgtccaaatgtcagcggtccaggagaggtcctgcaggtgcacagttgatctatcagaaaccatggcttcctaggtggcccttaaggaatcatatgccatttttcaccagctcatgaactccgttctcacctcgtgcc

SEQ ID NO: 1978 - DNA, 572 bp, Rattus norvegicus
  Genbank Accession No. AI176284
cagaatagtataaatgtttatttctgtatgatttactcttctgccctgttttcacaacatagaaaagtgtattttttgaatagctctagtaaatataatctttctactttgggatgtaaatagggcttaaaaattctagaccgaaccctccccaaataatcgttagaagttggtgatttcgtgtggctgttagcgctgttcagcgatttgatgcaaatgcctgacacaaacgtccttcagttagaaccgcacagaaggaaagggacggatacggtaaaagcttcttaaaaatcaaaactagtagctttgattgcaccttcaaatttttacaagcaaaacaatcttatgcaatgccatcatacataatctacaaatataataaaaattcacaaacattttgtgcacactgtatatacacatcacaatggtgcgattagaattaacacataacatatacaaaatgaacaaagtttaggtttagaccaaaaacttattgcagtcttttgaaaaataacttgattagatattcctttgtcctcttagactaatttacatttatacagagttgactt

SEQ ID NO: 1979 - DNA, 566 bp, Rattus norvegicus
  Genbank Accession No. AI176319
ctggttgtcaggtctgaaattttattaaattggaaactatattaatattagatcttaagtcaggcagggttggggtcatcaggaagaggtttggctgctggggaaggaggtggctggttttggctcctgcgactgtgaaccacgatgtcatcatattcatcgccttcatctctgttgtcactgtcgctgtcactgctgctgttgctgcaagggctaagcttatcatcctcatcctcgggctcaggagccccatgtgcacggaggaggcgggcgaggacagggttgggccggagcagggcactgccaagtggggtgcggcccccatacatgcgtgcggtggggtcagcgccagctttgaggagaagcgccagcacgccggctgcctggccttctactgccaggtgcagaggggtccggccacacgtaggctccggtttattgaggtcggctccagcatccctgagcagttggaccatctctgcatctttgtggatgacagctacatggagtggggtgtggccatcatagttttcagcttctagctgcaacctccaatcttcatcacg

SEQ ID NO: 1980 - DNA, 583 bp, Rattus norvegicus
  Genbank Accession No. AI176346
cttgacagaccacataaacataatctttatttgagtatatgttgtaattctcattctcactttgtccagtcagtaacttttgtcagagatacacgcacaggaaggaacagtccacacagagttcagtgttctctccaggtatggcagccaggggagtctgggaacacgtaaggaaggcccgggcactcctattcacatctgaggccaggcgatattttatttaggccgtgactgttttctgaggtgtggatggaggattcttccccacaacagcagcaatgcagtccaaatgactgacaggaaagaattgccctacaacagcaagctttaaagtgtagcaagaattctggaactttatatgtctttgaaataccactcagatacaaataaacactttgtttccagccagctcactgtcaacactcgtagtcatgacactgttttatttgggaaggacgggcaggcagaagtcaatgatttctcctactaacagctgctagaagtaatgacttcccggcgcctgctctggtgaaagctgtggggttgatagggcaaaattgcttttggggtttacttcactgca

SEQ ID NO: 1981 - DNA, 540 bp, Rattus norvegicus
  Genbank Accession No. AI176351
ttgagttctctgataaatacatagagttttaatgatcagtattcgatagtggatgaagacatgcattagttagactagaaatgccacacatttgttcatatatttgttcactataaaattttctgtttcgaaatttaacgttttggttcccattttagaatacacaataatcaggaggatacatgatggggagccagttttcagtaaaagacgcacaatgggtccatccgagtaatttcatcagttgaatacaatttttccagttttcttttgttggtttttcttctacgagtttggttgcaaacttaaggcctctcccgtacatcttatttactaatgcatgcttgtatgcaaatgtcaaaaccttagtgtcaaaaagatctgtccactttgtagtttcccaataggtttctgatagagattccaaggtactttctccttcctcttcttttgcttctgcatcttcagctgctgccccatcgtggggctgtgcatgaagaaagtggtctgccagagcacattctttcctgcagagggcat

SEQ ID NO: 1982 - DNA, 428 bp, Rattus norvegicus
  Genbank Accession No. AI176358
ctggaggcttctccacctgccatttatttaaaagaaaacaaaaacaaaaacaaaaaacaacctctaagtattctcaatccagtaatttaaaaagcaatcaacacttgtgtcaaggatgtgaacagtcaagttcacactcagattcttattctcagtgtagtagtgaggagctgcagttcaaagcaccactgagtgacaggatgcagctgtccccagcccccaaccccaggctggaccagcaaggttgaatgtggaagggaaggaaggcagtgcagggacagggtcctgaagtgcagggcgggctgggctccacagttcttcacacagaagccatagaatcacaggaaacttcagacactggtgtctaaagagaactgagggctctggatgtcacaggagagacctgaacacatcgtctgcctcgtgcc

SEQ ID NO: 1983 - DNA, 472 bp, Rattus norvegicus
  Genbank Accession No. AI176380
ttttttttttttctttactttttattatacaccaactagtttatattttagtttttacagagaaagtggtaagaaagttataatcgcatgtcatggtattaaaatcataattccagatttctttacacgtaagacgaagtggtccagcagcttgcccactgtcaggccgcagtcccgttcaactgatacggctcatcctgccaaagtgactagtcacacacacacacacgcgcctcaatacagtaaaatgcacacgcaataaaggaacttacagttacaaacaaggaatgtacttctcgtggctgtgtttcagaagcctgcagtcgctagccttagggaaggcacaggaggatgagtaaccacaactggccctaggagtaggcgaagtatgtacatcactgatgaggtatgcatgcacgcagaggactcaaaactgctcaatcttgctaccaaaattgatgtgagttaaagg

SEQ ID NO: 1984 - DNA, 393 bp, Rattus norvegicus
  Genbank Accession No. AI176401
caatcaaaagtggcaccatgtctataaaactaacagcagacaaggtctccagctctgaacagattatacagttatatttgtttcaccttggcccaatttgtcattctttcttccatctatgcaaacttcccttcaaacagtttaggttgcagaagcacagctgcccacaggtttgctctgaaaggataaaccctaaggacagggctcagtgttttatactgagtaatggctcaagaaatcggccgtcagcataagctgcttgaggcagagctgaaaagttttgcttatggctccagttcactgacactataaactatgagctggaaacatcagagtctgaggctagcatttttctagcctaaactcttgacactttgcttcaaaggttcaaaa

SEQ ID NO: 1985 - DNA, 430 bp, Rattus norvegicus
  Genbank Accession No. AI176422
ataaagttttattaatgacaaatatttcatgattttatgggacgttagatacaaagttttttacttcagtgtttgaaggacacttgttcagaagttatccaaacatatgggaggttagtttggcatacatttacagtattctagaaactggctgtcaagtgtgccagtaagtggaggcacttgggctttacatgccattgtaagcaggtcctcctccaccttctgggaccacccagttaatattttgacttgggtctttgatatcacatgttttacaatgcacacagttctgagcatttatctgtaaccgtaagtctgggcatcacagctggccctcaaatcaaactttttataaagctgcttggctaggtgtccatggcagccttctgcaaagattgtgactttggcatgcaactccaggcctcgtgcc

SEQ ID NO: 1986 - DNA, 370 bp, Rattus norvegicus
  Genbank Accession No. AI176456
caagtcaagtttttttattttattgtcagttacatgctttatagaaaaaagtgtggagaaccggtcagggttgtacaaaaaaaggctaggttcctacgttgttttatttacaccattgtgaggacgcccccacttcaggcgcagcagctgcacttgtccgaagcctctttgcagatgcagccctgggagcacttcgcacagcccacggggcagcaggaacagcagcttttcttgcaggaggtgcatttgcattgtttgcatttgcaggagccagcgcaggagcaggatccatctgtggcacaggagcagttggggtccatggcgaatggaggcggcagttggagatcaacgagagatcgctcctcgtgcc

SEQ ID NO: 1987 - DNA, 630 bp, Rattus norvegicus
  Genbank Accession No. AI176473
gtagaagaaatatttaataaagaaatacagttcaaatacttaaaaataattatgtaaataccaggtagacatatgaacaaagatgacttctgagttaaataaattaaacagagaactataccaataaataagaaagtcactggctgaaaacagtcaagattttatttttcaatattatttcatttggaactcctagaataattttctccaaatgaccactctcctgtacccagaaagctctggccagggctcctagactttgctgcattggtcctgagacttctagactgcattagtgcttctggctggtttgaaaccaaatttcactgttcaccagaaagcagctcttaatgcattctaattctgcagtcaagttacttaacttataggcagggctggggtgagaggggcacttaaaataataaggtcactctaagaatgttcttccctccattctcggttgacacatgaatctacagagtaaatataaccttcccctgggtgcaaggctcaacccgaagcttctggctggcctacaggattcagagccaaggacactgcctaaaaagctaggctacagatgtagctccaggaacctcagccaatgaggctttgccaacctgtagtaga

SEQ ID NO: 1988 - DNA, 416 bp, Rattus norvegicus
  Genbank Accession No. AI176479
aggagggatgcagctgcagatggtggagcacgtcaggatcagaaaccagaatcctctatcaagtctggagacgaggagcattaagagcaatgatgacgacagtaacaatagtgataatgaccatgaggatgctgaggaccagggagctgatgttcaggcataggcaatgaagcccaggcagcagaagttcatgaagagcgtattgaacagggaccagaccacatggtcaggcacagagacctctctgggcatgttgatcacggtagttctgacagaagccgatccgtggggtgcccccagttcagacacctcatattcttccttgattctttcgtagtttgggggttgtcccccagtggcagcgttcacgaaggcttgagaagtgtggttcatggtaccgagcaaaagcagcagcg

SEQ ID NO: 1989 - DNA, 575 bp, Rattus norvegicus
  Genbank Accession No. AI176491
tttttttgaagagcacaagtatttttatttctttctttttttttctttttttttcctttttttcggagctggggaccaaacccagggccttgcgcttgctaggcaagcgctctaccactgagctaaatccccaaccccttttttatttctttaacaatgcaaaatatacacgttgacttgactaggacatattcacatgtaaattttttctcatatccacaactctggatagatcagaggaatgacaaagatcatcacaggaagcagacaaattatgtcgccttgctccgagcactacgaacacaatgcctaaaggactgtagtatctccaaagtttattccagtccatttcttcttttatactccaaaacatcttcgttgtgttggtggatgagataaatccacatgaaaatcgaggtgcccaaggtcagcccaactttcacccagttaggtttggcattgactggctcccggacatagaactttgaccgtgttgaagagcagctcggcagcctggcgggggccagcagccgcgaaaacgagcgcagtactacgggcggcgccatcctcgtgcc

SEQ ID NO: 1990 - DNA, 655 bp, Rattus norvegicus
  Genbank Accession No. AI176492
aacaaactattttattcttcagagtctaaaaccttctgtgagcagcttccctattgtggagagagatccagcccctcaggcctcaaactcgaactcgaagtactgagggtcgaagtagtggatgcggacatagccgtcttcgccaccgctgctgtagctcttgccatcgggatggaaggcaacactgttgataggtccaaagtggcccttgactcttccaaactcttcctcaaaagccaaatggaagaacctggcctcaaacttgccaatcctggtggaggttgtggtcacatccatggcttcctgaccaccttccagcaccacatggtcatagttgggagagagagcagccgagttgacgggacgttctgttcggaaagtcttctgatgttcaagacttgtggagtcgaagagcttagctgtgttgtccttggatgcggtgacaaacatggtcatgtctctagacaactggatgtcattgatctgccgggagtgttccttaacgttcaccaatacctctccagacttggcgctgtactggttgagctctccgctctcgtggcctgcgatgatgcactcccccaggggaccccaaacagcactggtgatccttggaatcattacaggggatcttcatgtaagggctcgttgctgt

SEQ ID NO: 1991 - DNA, 536 bp, Rattus norvegicus
  Genbank Accession No. AI176589
aggcagacaacttgttattttttatttttttaatgacgaaaacaaaaatacatctaaaagcgaagcttctggaaaaaccatttgttcttccctgtcttgtatcgctcctcaaacttgaccttggcctcccgcctggccttgcgtttcagtgctgggtctctgaacacatccttgttgacaacagttttgtccaaggggatatccacagagtaccttgtgggcatgaggtggttgtagttataaactttcacaaaggacttgatcttggatcgcttggcgatcttcttcttgcccatggcagctgtcacttttctgggatagcggtcaattccagccaccagggcatggctgtaagggcggtcggaggtgccatcatcaatgttctttacgatgacggctttgcgtccggagtagcgtccagccaggaccagcaccactttcccgggtttcataaacttgcccatttcgacagcgagcagcaggcacccagcaaaaaggaaagaaggccacttccgctaacctttcaccctcgtgcc

SEQ ID NO: 1992 - DNA, 632 bp, Rattus norvegicus
  Genbank Accession No. AI176595
tccagaatcagaattaagcattaagtgtccaatattataaagctgtttataacaggagttttaagtagtggtaacatttaacccatgtaaaaatgtcaacagaatttaaatcgtgacttggatcctgaacgattcaagtaccatggtctcactcagagacgggtttggtcagttttaagatgaactccttcggatgtagtgtccgtaagtccttattatcgctgtccatcaattcacgataggatagctggctgcggtggcaagtccgcagtggttgttccggtctttggctattttgatgtagccatccataccccattctttaccccagctgtttttgacaagccagtatttatccttatttgaatctgttccttcataaccatagccaaccaccagaaccccatggtcgaggtccttgctgctacagttgggttcatagtagatacctgaactatagaactggagagacggatggcttgcatccatggcaacagaaataggccccaccgtcgctacagccttcatgagggctttctcttgctgagggatatccacaaaccctgtgtcgttagccagtccacagtctccttgtgccgaattcttggcctcgagggccaaattccctatag

SEQ ID NO: 1993 - DNA, 748 bp, Rattus norvegicus
  Genbank Accession No. AI176611
  misc_feature (1)..(748): n = a or c or g or t
ttttttttttggtttcaatatagtttattctgatgaagttacaaaagtaggtacaaaatacttttttaaaaagtacagttaacgacttagaaaaatagataaagccctaaaagttttaaaaatacaacataaattttttacgtgaggaatattttaagttattttagatggtaacgaagactactttatgcaaactatttttgaggcagaccaacacagaatgctgttttataactagtccacagcacactggccatccagaatggctttacagaaaactatgtgatacgttctgatgagaaaacccgagtgaatttcaatgcagttgcttcagtaaaattactgctgccacatgtgctccaaagcccatcaaagccctgcatcaaaattgaatgtaaagtcaggaagaccaaagactactgtggcttccttctttgtcagaactctcactgacctcaggcggaaagaacatgactgctaaaggtgctcagcagcgcatgcccaggctggcagtgtttcaggactccattctgactggggagtggacacacacttgtaggggcctcactcttcagtcttgatttgtttatgtgcctgaggtaatgacatgtctgagaagctatgagacgctatatttagtatgatcttggggctcagagagaagccaagagtacaaacaggaaacctnaccgncaggactgtgcctgtgcctttgctacaagccatggagaacagagacctgcaattc

SEQ ID NO: 1994 - DNA, 667 bp, Rattus norvegicus
  Genbank Accession No. AI176616
ttttttttgactaactccagagttctttatttaattggaacatccgacggcaaccacattcacacacacaactgttacaaacagggagcacctctcagtgactgcggaatatgcttgcctctcctggtctcctagccagagtagcaaatctgaacttctattcaggtcaggactgctatggcctgtgtgtccctgcccaggacactcatgctcagcctcaagattggccacttctgccctagatcctagggaaaggtgaacatgagggagtcctggtagcactacaggagtctcccttctttctgtagtgtcctcccccacccccaccctggcccccatccagagctctagggtccatgaaattgattccctcacaaaatagtgctagggacctgcaggggctggtcatcagggttaccatacaagccatccattcattggacagtggggaaggcatatctgggggttatcctgggctatctccacctcatctgatagccaagaaggaagcaaacttaaggatggcagcccacccaccattcacaggtccctggtaagtgttggtcaccaaggtctccacacactctgggcccggcgagctgtggtcaggatgcctaaggatgtgggcaccaaatctggcccctcggcaggcacccggtttagttca

SEQ ID NO: 1995 - DNA, 700 bp, Rattus norvegicus
  Genbank Accession No. AI176621
catgaaaatatatttaatcttattcaattagaaatcctgtctcgctccccggttactttcaaaccctgtcaacaaatgttgaaaatggtaaaagacaactcacggtgattggaaggtaggtaatcaaacacttgggacggccgacctagccacaaggtcttcgctcacttggaaggaagggatcacacgattactatgaatttgaagtgtgacagagtctgaagctatgtcgttaacactggtgtgatacacggaggaatgggctctccagggaagggtgtcactgagcacagacagacagagtaacagaaagggtaggagacacttctgagatactggctagttctgctgaagattagtcagagtgaaaaaaatcaatgaccggtgatgagtgactttaaagagaaggtagctctctttgggactatggaccttcccatgattctagattccggattacagaaaaggataaaaagattaacaaatcaccgaactagagactcctgccgctgagcctccaggaatggcagggcccacttgctcatcttgctagcaccctcacgagaagtagaggtggctgctcgccaggcctccaccagcggaggcctggtacctcattgggtctagcaccaagcgcgggtctcctgagaggccagcacctactgggccatctttcggatcatgtaattcaggatgcctc

SEQ ID NO: 1996 - DNA, 604 bp, Rattus norvegicus
  Genbank Accession No. AI176658
gagcagtagtttccaacttttatttgagaaaaacagaaagtacatgtatcaaaagagcattcaaattgacagaaagggagggctggtgacggctactggggatgggtagcaagctgaaggcttctacttggctccagactgttccgactctgggcctccaatttgggcacgggcctcgaaagtgaccggaatggtgatctccgctgattgtgtgactgctttgggcagcggagccttcaccgtgagtgtgccctcaggggacagggaagaggacaccaaggtggggtccacacctggagggagcgtgtatttccgggtgaagcaccgagagatgtagccatgttcatcctgcctttcttcgtgcttgccagtgatctccaccacgccttccttggtcttaactgtgagctcctcaggagcgaagtggttgacgtccagggacacgcgccagcgatcggccgtctgtcggatctctgagacaccgctactgagttgccggttgagcgcccggctgaaggcgggcgcggccagggtcactgctgcggggccctcggcggtcgcggcgggcaaagggcgcacatagccgggccaaccagcggagctg

SEQ ID NO: 1997 - DNA, 608 bp, Rattus norvegicus
  Genbank Accession No. AI176662
  misc_feature (1)..(608): n = a or c or g or t
cggccaacttgatgttctagtgctgaagggagcaagggccaggcatgtggtggagatgatgctgaaatggtttatccaataccatgcaaatcaagtcctttggatagaggtgaagaacttggacatggctgtttcaggcagctgaagtcaaaaggaccgggactggggagggcagggacgctaagtgaaagggctggtggccaacgggccttctactgactagaaggacttggctctgagatcttccatctgacctaagaggcagcccctcttgcgggccatctcttccctcctgtcctttattgtctctcgcactcccctccctttgctctctttcattccctttagcaaatttcaattgtcctaggagaaaaggttgctgtcatgtctgaaagacccgttgaggtgctgaaggagttgctgacccctgcagactggaaggtgctgacctgggcagggaaagcaggtgggacggaggcataggtggtggccaccgagggcgatgggaagccactgtgcgcaggagacgggtaggtagaggagcccggagaggagtaagaggtgggcactggggatggaaatgaggtggtggcggnggatgggttaga

SEQ ID NO: 1998 - DNA, 529 bp, Rattus norvegicus
  Genbank Accession No. AI176698
tattgaagtttttttaaaaaattttaaccagacaaaaggatgcacaacattttaatctattatatgatagtcttattctgtggtgattatgcttagtcagctgttcataatatacaatactgaattttaatcacgttatttacagagggcaaagcactcatctacaggtaaaggcgctctggtttaatgtgcacgtcacagccctgtgcaaacacccattatgtacactgtaaacaccacagggcatacccgtctccatcaccattctcacaggaacaagcacacaggggctaggctaaggtgcctgctttttcttttttgaggcataaattctcaaaggtttgcttgccttctcactcactccagatacagagccagtgttggagcccttcagggtccccttgtggagactgcctggtgacctctgaatgtcctggatggaggaaagcaggcaggagtccttcacagctggataggttaaagtgagcctcgtgccgaattcttggcctcgagggccaaattccctata

SEQ ID NO: 1999 - DNA, 539 bp, Rattus norvegicus
  Genbank Accession No. AI176700
ctatgtaaaatcttttattacaagcaatatcggtccatacgctacacaataccagcagtacaagtttaatctttcaaaaatcatcatttaagcagcaaaagaccaagaaataaaatttgtgtccactgattacttttaaaatattcttgatgtgcatgatcatcagttcccttatcacagtgagacatacaaatacagaaaatacccatttaacagaccctagtgctaaatggttatttggcttaaaaatctgagttaagaaaatcctttttagcaacctacatacagataagtagcagactttattattttattaaatacattcattccactaaaacacagagggaatttcatccctcgctcattccaatcccagtgtacattattctctcgtggccatggttcttcccttagagtcatcctgaaccttaccctcttccccaacacacctcagccaaacttctatccaacagagtgcaacctggaagcaagtcgccgccatctgatgccagtggctgcacagagcctacccaggcctg

SEQ ID NO: 2000 - DNA, 640 bp, Rattus norvegicus
  Genbank Accession No. AI176776
gaaaagccagactatgattacttaagaaagctttttactgacttgtttgatcgcaaagggtatatgtttgattatgaatatgactggattggtaaacagttgcctactcctgtaggtgcagttcagcaagacccggctctgtcatcgaacagagaagcacaccaacacagagacaagatacagcagtctaaaaaccaggttgtaagttctacaaatggagagctaaacacggatgaccccacggcgggacggtcaaatgcacccattacagcccctacggaagtagaagtgatggatgaaaccaagtgctgctgctttttcaaacgaaggaaaaggaaaaccatacaacgtcacaagtgactggacacagacagagcctggggagttacttacatgtttatatgctgtctcgtgattaaaatcatctctagagtgaccacatatattttcaaggactcactcttgaaacaaaaaagtcatactttcatatttcattttgcggctgtcttatattcattcccccacccctaatttaactttatggaagctttaaaatcttgtcagaacatgagtgctttgcccatccttgaatggaatggaccaatgaagtgtattgatgaacacagttccataggaaaac

SEQ ID NO: 2001 - DNA, 302 bp, Rattus norvegicus
  Genbank Accession No. AI176788
gacttttcagggtttttaatagtcacatgcaaaggtcctgttcatttcagctccttcactgccaaacctgggggcagggactgcttaagcttctccgccttctccttgtctgggataaccagggtgtaaaggtccctgctacagcggaccttgaactttacattatccttgtttttcttgatcttgacaaatttggcatccttccgccgggctgtgagtaaaaagtccttgatttcctcaattttccgaggcatggcaacgggccctcggttttggcgtcagcacaggagccccttgtgccc

SEQ ID NO: 2002 - DNA, 571 bp, Rattus norvegicus
  Genbank Accession No. AI176792
ttattagaacattgcttgttacattaatattcttttttttacattaatattcttaaaaaatataaaatgattttaaacacttcttgagtgattatcaagcacttatatagacatgcctgtagtatctgaacccatttttaatctttacacaaatctatgagataataattactatgtatttttttgtttttaaatgctgggagcaatctagaaggatgtaaagaaaacggttttcaaagcaaagagcaaaggtggaggtaattggagaaggcatttatcacaagtaaaggcgggatggtgtaaagagagctttctagtgtttcccaacaagtacaattttctctcttctggcccttcacttttaaccacagcagactttataacccttaggcagaaatcaggtagctggtgggaaaaaccaccggtgcagtatactacccatttcaatttcatgagacactaaaaagaaacaatattggcatgtttcttcagtaggtattctaggtttctactatccagggttttgtttgtttttgagacaggctctttcttgttatgtagctgggattcg

SEQ ID NO: 2003 - DNA, 599 bp, Rattus norvegicus
  Genbank Accession No. AI176810
tttttttttttccaattacagaacatagctttatttatagaatcttacaaataaacatttacagttcacatgacataagttattttgttttctaattcttctaatgacacctgagttatttaaaaatatactgtgatggaactgtaaagggaactctgactaaaatcctttctttttgcaaaactcaccctgcttatctgcatgtctttggaagaagggttgctaaaactggatcctaggtggtccaggcagagagaagtcctttaaaacccagatgaaaggtactggagaatgctcccccagctgacactaaatactggagggcagccatggaggactgaaggtgaggtcagagatgaggtgcttagtgacagaacccaaggcctggctaagggctcctccatgtgacaagcgctttccttgctagtgttaacaggggacagaagctaagggcactaaggccagaggagaaatgtctgctaagcaactcactgcccctgagacctctaatatgtacagatgcttaaaacagcaagtccgacatttaaaagtcaaaaaaaggtcaatggctgcatttccgactcatgggcgaatctgtc

SEQ ID NO: 2004 - DNA, 445 bp, Rattus norvegicus
  Genbank Accession No. AI176828
aaagcgaacaaatccatttatcttcctttccatcccctggccagcagaggtgggggttaaacagttcattttaaaaaagacaacgactcataaaatgaaaacagaagaaagaatccagagctggagagctgaaatgtggccctggggagaatgtgtatgtttccagtcttgatgttgggggtcatcccagagtaaggaactgacaggcttgagactgaggtgctccaagcttcctgaggctctgaaagggggactgactacgctcacaccataagctggccactggacctagagttcccacctctgtgaccttgttgttgctactgctgggcacaatggaaaacagtcaagccccctgggtgaatcgccagcccaagcttgtcttaccagctccttccgaaacaactccttagcctcgtgccgaattcttggcctcgagggccaa

SEQ ID NO: 2005 - DNA, 478 bp, Rattus norvegicus
  Genbank Accession No. AI176839
aaaaacatcaccaagtcagatttttatttctacagacagaaggccaaaagtttctatttcagtagcagtgtacaccaaaccactcctccccagccaaagctgactcttctttgcatcctgcatgcctttgaaccatgcccagccttgtgggggtggcagcaggactagactgctattctgtgttccaaggggtacctgaaagcaagaatagaccaacactggcatccgtgggttcctcaggccaacgcgctcccctctgagttcaccattcattcaaagcctggtcttggccgtcagcaaaccttgagacttaaggtgctcggcgatttctcatctccctggaggaccttctctccctccgacctccattctgtactgcttgatcagtccagccatctgcaaatgaatatcacagggaagagacctatcgtaaccacgagaacacctcacggagactcacctcgtgccgactggtgcc

SEQ ID NO: 2006 - DNA, 662 bp, Rattus norvegicus
  Genbank Accession No. AI176841
ggagttattaaatttttattaaatatactctgttggcacaaatcttcaaaatatataaacatatataaacaaagtatcttcatggcatcaaaatagaactccagactggacagtgaccatggagaagggcagccacagaggcagagagcccctaagccagagctactgggggtatatggggaagcaagaagatcagggacccatgacaccctagcgtctcctgcccagccggttgcctgatgcagggcttgagccatctacatggtgcaacctgttggggtggcccaggagcttccgtcacctccagcctcctggcatggggtgcccagcctctccatcccaatatggggccaggcagggaacagagtgggcagtacactcacaagagcacagtccctctagccaccagaggttgccaggatactgggggacatggtggggacgcccatcaccatacgaggaggcagagagatggccgagcatcacaagcacaaggtaagaaatacagaacgagctaggaccacagcaagaactgcacatgcctggaggtcaagccaccctgctcaggtcctgcatgtgagacggctgccgtctgtccatctggctgtgggaatcaacacccaggtcaccgcactgcacaggatagggggtttgtatgtgca

SEQ ID NO: 2007 - DNA, 666 bp, Rattus norvegicus
  Genbank Accession No. AI176856
  misc_feature (1)..(666): n = a or c or g or t
atgacagtggtctttattgtttaggtgacactgtttcatgatagacagtgaagacagagcatgttaaatgttggtatatcacattagttaattctgtgtgcagaggatctgtgtgcactgtatcagctatatacagattaagaacatacatgacaaagtacaaaagcacaagaagaggttaaatagggaattatttctgggttataatcacctggtaacatacaccttctgtcacacaactgtgtcactgctaaaaacagtaattagcatacatggtgatgatctctatttaatctagcacagccctggtgtgaatacataagggcatgataatatttcacaggtacaggctaagttctggggcatgaactcttttgagtaattcataaaacacacctgaggcatattttttgtttttgaaaaaaaaaagcaacgttctgacatagtccaagctttactgtgcaagggagacatttaataaaaacatacttttgctgccctgacaggaggtggatactctgatgaagatggtgaccagcaaaagaaatccctctgtagcagaataaggcaggctttccaactaagccagtaatctattagcttccgaatatgacaatngntactctttcctgacttgaatcctccttcctttcactgggttctaaa

SEQ ID NO: 2008 - DNA, 719 bp, Rattus norvegicus
  Genbank Accession No. AI176858
atgtgagagacactttatttacaaaacaaggtgcatcaaaaactcagtgtctgagcagggcggtggtggtgcatgcctttaatcccagcacatgggaggcagaggcaagtggatctctgtgagtacaaggccagcctggtctacagagttccaggacagtcagagcaacaaacagtgatactctggcttgaaaaaaatcagtgtctgaagaagagctctgcattctaagggctaaattctccccctcaaactcacccaacccttgtcaagctagctgcacaatctcaagtcttcaaagatctctccttccccggctctagccaaagactctaagtgctcagggcagtgggacacaccaccacaagtcaccaagtgtaaagtggttcatctgaggagcctatgtaaaatctctcccaggatgccaactgtaaagcacattacaggtaagcaagggctgcctgccttggggacagttgtgcagatatgtcaccttcctggagaggagcaagcaacttctcaacactaccaaggatctcactagggcctcctttcctctcatctaacccaggatgcttagactgagacagtctacttcctcttttgttcctcaagcagagaacttacaaaacccactggaacgtgatggggatcgtcactgggagcatgggactctgagcaggaatttggcttctacctgagagtaggttacaggaggtggg

SEQ ID NO: 2009 - DNA, 498 bp, Rattus norvegicus
  Genbank Accession No. AI176901
gctgttcacagcacctagaacagggcttgtcatccagacagcatcaccccactgtgcacaggaatgcatgaagcacaatggctgtttcttcctccagaaaggcacttacagtttagcttggcccaaaaaggcaggcgaaagctgagacaccagtactcaactcacaccttggagctgaagggccagttaaggtggctctagccatacagccccacctccccttactctgcctccttcagctgtggcccatctgggacaacctggtccatctcccttcggtcagaggctgataggccctcaggcagggcaaaggtccctctacggatcttgccaaagagcagggctggttcagagtcctggaacgggtatcggccagccagcatggtgaagagcgccacgcccaggctccagacatcagccgctctgccggagtaggatggccgggagctgagtatctttggtcccacataggcagggcacgcgtgcttgtcccacaga

SEQ ID NO: 2010 - DNA, 535 bp, Rattus norvegicus
  Genbank Accession No. AI176916
gtcttgtgaactttaatgtctatgacgaagtcctttgagtaatgccccttccttgccaatccaccccttatcagtctgtggctagcaggctccagagtataagtcccatgccaccctgtggtaaaacctattctgtccccaaaaccagcagcgtcagaggccagggccatcagggtagagtgcagggatgcgtctcgtcaggagccacctggctggggacggttcccacagacctggtcctgtgtaggtgacctgcagtgcccctcaggatgctaggcgttgggccagtgggaggggaaccgtggcatcccatggttctgtcttcaggcctggtcagagctctttgaaggtccaatgctcagctgtgggcaccgtcatgcctcatgcgctgtctctgggaagaaaagctctcggcatcgttgtacagtgtcctgaggggagaccacgctgtggccgactgtccgggggtccgcatagatctcaaagtcattcccaccaggactggtctcatttccaaagaagtggacctcgtgcc

SEQ ID NO: 2011 - DNA, 536 bp, Rattus norvegicus
  Genbank Accession No. AI176969
aaaaaaagtaagaataacaaaaacaaattttaacaaaagtcagggacagttttttcaagcaacaaaatcctggggtgaggaaagcttactctgaaggtgatcggaaactggtaacaatgtaataaaaatcgagaattgcatagcgctgcacgttcagcctttagcaaaacaaaaacagaagctatttggtattgatacaaatccatctatttgatagttagtcactcgttattatgtacatgttttatatactgaatgtcatttttaagtccccttgtccacactctttttctctgttggcaggttgttggtttgacaagcttgaacaaaaaggttttctggtgtttttgtttttcctccgaacgcactgcatcgatgttctctctctgagcagacgcggttctctgctacatgtcatccgttcatttaaaaaggaaacaatccacagtgcgatgtgtctgggatcaccacacccattgacacccaggctaaaccaggctggaccgatcggccccaggtgcaggctccttggccct

SEQ ID NO: 2012 - DNA, 370 bp, Rattus norvegicus
  Genbank Accession No. AI176990
cggagctggggaccgaacccagggccttgtgcttcctaggcaagcgctctgccactgagccaaatccccaacccccactcatttcttttaaagacagccattcctcattctcagtttcattatccaatcatccacttttaccttgtcatcaatggtgtcaaatttggttagaacaatgccatcaatgagccgaggtgtctgagccatagaatggtcagctaaggctctgttgaatttgacctaaaaagggaaagggtgacataagaaccgatctaatttgccaaagtttaagttgtaagggaactgggcccaaaccctcaccagttgatccacagcttcattgcctactaaggcctccccccctcgtgcc

SEQ ID NO: 2013 - DNA, 332 bp, Rattus norvegicus
  Genbank Accession No. AI177004
atgtgtaggggggaattccttttggctaatcaaactttgtgaaaacctaggttaaattttctaatttttaattgaaccatttaaaaaaaacaaacaaaacccaaaaaattcccaaaccccaaagggaaaaaggggtctggtgagtttgagctgtcaagtctataacctgggtctgtaacactgtaacctaatagtgccctgcccatccctcctactttacactttatcccccaggtaaggggctcagcaccacagcaagcttccgtgcagcagctccactggatttcaatgcaactgagcagcagtcacgggcccctggccaaaaagttccc

SEQ ID NO: 2014 - DNA, 594 bp, Rattus norvegicus
  Genbank Accession No. AI177016
aaaaagaaacgtgtcttttattactgttagttgcatgtctaagttacaataacagtctaagttctctttacagccaatttcctataaatattacattaccaaaaagagtggtactttgtaactttccaaaatgtcccttacatttttgtttcatttgatagaaaaataaaccaagcaaccacattaatttaggcaatgtttcccgataaaaaggtagaaatatttaaattacatattacagtgtaccaacatgaagtcaaatatccacaattacacactcataaaaaaatctagacatcactctgagcataagaagtctctgtacaggatttacagacgtctcctgcacactaagctctcagtgtgctacggagttcagaggttctgctcggatgttccccaagtcgagtgcagaatctgtctcttcatctatttccccaatgactgctacattatctcctctcacaatgtataaccccaataccacttgttctactccctgagaagagctgaacacccgctcgtggctttcatccagaatcaagttaatggtctggtcaaaacctttcagggttcccacgatcattctgccat

SEQ ID NO: 2015 - DNA, 643 bp, Rattus norvegicus
  Genbank Accession No. AI177022
cattgtaatgggtttatttggtacaaaaggatagagagataattacgtttactgttaaggactaagacacaaagtctgcaaaagctctatacaaatgtgggtgagatggcgaggagacacggtaacatatggcatcattctgagggacctccagctcttcattctaacacaggaactgaggatgcacagccatttcttcataggacagttctgacagaaagcaaatgtgactcagtttatcggctcctacaaggcaggcagagcaaggggcgatttcacccagtactggttccgccatatagaatgggtgctgatggtggtcagttctgcagaggctgttttctagcgctgggttcctatgtccttggattctcctgattctcaatgataagcttgtcagttgagtacagttggccaataaggacctgtctgcggattatttcaaggtctcttttggctttattcaccagggcttgaatttctacggggtcttttacattcttattttctcggaaggcatctcttattctcctgacagcatacattctgtaattgtaggcgctgaaatgcttgctctctctcatcatcgcccggtacagatctaaaacttgtgcgcggctggaggctgccatgttggaaaacg

SEQ ID NO: 2016 - DNA, 557 bp, Rattus norvegicus
  Genbank Accession No. AI177031
cagtcatgttatgagcttttattttaaaaagcacatttaatacatgtttagtttctcagatccacatttttcactttgtatgccacagaagtgtttgaatattattctttttacaaaacggaaccttacaaaaatactgacaatttaatgtttttatacagttctttttccctctagtcgcagttatttcattgtaaaacaatggctaccacagaactatgatatctttagttgagattaaaaaaaaaaaaaaccaaaccaaaaaaactcaaggctcctttaagcagctaaagtaaataacacaggtcaagacacagtttataatcatagggggtgtgactaacattgtttcaaaaataatatcttacatagttaacttttactgtttaatacattattaatataattttatatataaaatcatagctggctatatgttgaaatgaaaggacggagtctgggaggatatgcatgtggttgatccatatggttacatgtagccctttgaaagatttgaaaagcactttttcttctccttcttcttttccttggaggtt

SEQ ID NO: 2017 - DNA, 492 bp, Rattus norvegicus
  Genbank Accession No. AI177042
atgaatgaggcaatttattaacccagcatcctttgttctaatgcttcttgttggcagctgccacctgtccggcgatcctgtccagatctctctgtccctgaggtgttagcttgcggcccccatcttggtccttttccaccattttcagcccctccagggcttggaggacccggcgggccacactcttagagcctctgctgaagtggctgggcctgacaccgtttctctgccgtcctccgtagatcttggtcatggaaccaacccctgcaccaccacggaggtacaggtgccgtgctgtggaagcagctcgtgtgtagaaccagttctcatcatatggggcaagctctttatgtttggccaacttgactgtgtccacccattcggggactttcagcttcccagactttttgaggaaggctgccagagctctgacgaactcctgctggttaacgtcttttacagtaactccaggcatcgtgcggcctccgcgct

SEQ ID NO: 2018 - DNA, 521 bp, Rattus norvegicus
  Genbank Accession No. AI177054
ttttttttgaaaatgtttgcatttaattagcctctgaagtggctttaagccaccaggacacaggcacctcccacaccctttatcttctcttcagctcttctgctgaagaacttggccttcacgatgacaggttgcttagggagcttccccttccccagaactttgtagtagcctgatcgaacaacgtcaatgatgggagcaactccattcttgttttttgctgcattgacccgtgtctgctcgctgaccaacgtccataatttatccaggttgacagttgggcagaagctctggttcctcttcaagtggtaatgcctcatgccaactttgccgaagtaacctggatgatatttgtcaaagttgatcctgtggtgatgcatgcctccagcattcccgcggcctcctgggtgcttgcggtgcttaccgatgcgaccgtggccgtggctcacgtggccccggagtttccgggtcttcctcagtctggatggcacctcgtgccgaattcttggcctcgagggcca

SEQ ID NO: 2019 - DNA, 629 bp, Rattus norvegicus
  Genbank Accession No. AI177055
ttttttttttgcactgtggtatcctttatttaaaaattgtgagttaactacagccatagagttcttgttcaccatttagatggcataataaactgagagaacaataacacaatcccaagaaggcattaccctataaacacacgtatgaccacccatgcacacatacacacaacatacacacaaagattataatataaacaccaagtgatgaaaaaaacactttgaatgctctaaatcaaattaaaacccctttattataataaaccgtggcaatattgtgactataatgaaagatattgtaactgcttaagaagaaaaacaggggaatactggcaatttagcagcagcaaacagccaaggaagggtggaagctaagcagacgaagcagcatctctctctaatgttggcactgtgtaggactgcacggaagtagtttaagttcagtttttaaggaactattaaaacatcctttgaaatactaatttgctgcactttacaaacagtggaaaagaaaaaaaaagtatttggaatgttagacacgcacgcacacgcacacacagaggaaacatactaagatattggtttatggtctttgtttatgacctccaaaaagttttataaggaaaaat

SEQ ID NO: 2020 - DNA, 383 bp, Rattus norvegicus
  Genbank Accession No. AI177062
ctctttccttccactaagtaggtgctcagtgctctggcacctggttttcagagagtgaaatggtttacctgtgttattaacaaattaacacgttacacacaaatgtgggggagaaggaggtgggggatatctttccttctcttccagacaatgctattaagtctgtatgggttgggggggaggtacagaagttttctggggcctcagtagcttgaagacccctccccatcattctcgaagacaactgtcatccgaggctgcacaggtcgggaagatggatgctgtgagattcagtctcaaaagctggaagagtcgtacttcctgcctcgtgccgaattcttggcctcgagggccaaattccctatagtgagtcgtattaaatt

SEQ ID NO: 2021 - DNA, 620 bp, Rattus norvegicus
  Genbank Accession No. AI177093
gtcataacctacttttattccatatttcaaatctttatgcatcaggaagttacagaagcacaacctagtcacactctcaattgcttcttgatacaatctgaaccagcagacatggtttttctcttatattaaaggctgctttttatttaatgactggatatttaggcaggtcatagtttatgaaaccatgtctaaaattttcatttccattcgtgttccaagaagcaaaaatttgtaattgttagcaaaggtccaaccgcggaggttccgttcccatactggaaaatcaactacatacataatgctgcagactgtacagatgtacacactggagagctccacaggacgtcagtcagagtccactgtcggtctgagagaaccagtgagttagtgtcccgatcaaagcccaagtcaaattaacttttgtacaggcagttctgattgtgctgatccaggtaatgcaggggtggcaggttgggtgaaggtaagattttgcttttattttcaccaaatgctgtctcacttgatttaggagggcttgggaatacccaggagttatcttccagagaatttctcccgtaggagttgtgctcctgaaagtctgcaccgtcattaggaga

SEQ ID NO: 2022 - DNA, 560 bp, Rattus norvegicus
  Genbank Accession No. AI177105
gagtgaaaacttaaacgacttttatttctggtacaaatgataaatattttgtattaaaaatctggaattcaagttttccttgtacttcatgctccctccctgcctcaaaaccttgccaaagttcttcagcccagaggcaggaagaatcggtgcctgctgaagtatccaagttgggtctcagaaaaggcacacaaattgggtcttgggggcggcatccctgctccccgttgcccccagggtagaaagaaggcactgtaactggacacaagagctggggcatgagtccccagctgtccctctctggttcccttgctggtgaaaaggttcccttgctgcagggccacgcctccagaacaagttccacaaaagcagcctaggctggtacattttgattccacatatgtgggcacttcaggggaaaggagaggcaagggtaccagtctggagaactgctttaaccccctctgcctcaagatgggcgcagttaggcttcagggctgcctcagggttgcccacactgcaaccctctctcaattcatgcagatgaggccgtggcttca

SEQ ID NO: 2023 - DNA, 417 bp, Rattus norvegicus
  Genbank Accession No. AI177117
cgtctttgccaaatttttatgttactatatgttgttcttatttacctttttttctttttttgagacagggtctctgtactcctgacagtgctagaactcactatgtagacaagtactcacagtgatcttcttggctgtatcttctaagtgctgcaattaaaggcatgcaccatcttacctggcattattaggaatggttagatgttaaataagataactgtttttgttatagcttttccctgggatgggagagaaaaactcactggttaagagcactggttgcaatcccagaaaaacatacttggtatgcattcgttgataagtggatattagcccaaaagttcgaattacccaaaatgcaaacagaccacaggaagctcaagaaggatgacaaaaatgtggatgctcccactcctt

SEQ ID NO: 2024 - DNA, 590 bp, Rattus norvegicus
  Genbank Accession No. AI177125
gcatcaatcgacctttaatgtccaaaagaggcgtggatgcagagcatagatgtggcagggtctcagtccctgcacagaaatgagagatgaacaaaaacgagacacttccacctggccagagtctgggagggcagggaggaacacagacctggacattcgtaagaaaaataaaacctaaatcaaacattcaatcttgtacccaataaaggtttgaacagggaactcagtcaccaccagttcccaccctcccctgccagcactgaagaaaaacaaaagttcaacacacactaagggcttaggaggaaggggcattctcctgccttcccccaacccccaagaatgggctggggaaaaaacggctatatttccccaccccttacagtgtcaaccctacacgagttctgaatgtgatccgtaagaatcagcagctcaattggcaaggacaacccccacccaccccaatcacttcaccaacagacaagatttcccttgcacttctctccggaatctcctcattcccagcccttttccacctcctcactcccagaggtcattacacacttcagacctgttccaaggagcccctcccc

SEQ ID NO: 2025 - DNA, 597 bp, Rattus norvegicus
  Genbank Accession No. AI177180
attttatttgattaaacatagttacttttacattgtctacaaccatggtgaacacattcccggtataaagacacagcctttcgagtttgagatgtccccaactatgagattacatatataaaaccgcataactatagatgaggtaatcaaagtaagatagttactatctaaaataaaataaaatggaaataatttactcataagattcatatttaaatcatctttatttacaaaatactatcctgagaattataattccattaagcttcaatttgagcaaaaatataatcaggtaagtaacggcagttacttaaactgaaagtgagaaggcaatgactgccgacagacccaacacggtcaggtctcctgtgtttctggagggtcagctgcaggttctttcgaaggcggactcatgtctggcgggagctcactccgattttcatgatgtggaggtggggggaagaacccagctcttcattgatttcaaatattctaaaggtcgttttggcttcagctacttgtgatttgagagactttgattcatcttctagggactgtatcctttttgaaatatcagccatcaactcatcctgttca

SEQ ID NO: 2026 - DNA, 353 bp, Rattus norvegicus
  Genbank Accession No. AI177285
gcttccataaagcaggcgtttattaagtgtcagcacaccaaagggaaagaaagcataggcaccttaaagcagccaactggggagggagaagtcaaataaagagcagagcacttcctgacatgcttcaaaaaagaaaaaaaaaatcaccaaaaaaatgtagcaaatatagacagtcacaagcaggctctgggggactactgagaaaggccattttgtttgggtgggagtggcctctatttttacaaagctcatttctcatttgttaaactgcaaacaacttagtttagactgttttaaaaaatgaagaaggataaaaaaagtcggacatggtgtgcaggcccataatacttacc

SEQ ID NO: 2027 - DNA, 618 bp, Rattus norvegicus
  Genbank Accession No. AI177366
gtattttaggccttttattttaataaataacttcagttaacagcactgtcaaaattaaaaggcacttaaaacaaggtggtgactagcttgagtcagggcgagcacagcagggaaggcacgtgcaggaggtgcacagtggtcgaattgctgctgaggggccctgcccaggccctacagtcctgcaagcagcaggacggcttacagtatttgtgaaaaaggcaaatgtacagccacagaaaagaaaaggttataatagagtctgacccccaaattgcaaacagacacattagagattagaggtgataaaggagcaccaggaattaaagaaaaacaaagcagaacaggcccctgctccacaatgctactaaagttatggccttatgtaaatagtgctaagtcagggactttttagcagagaagttcccagtacttttatccaagcttggatttataaagagaaagcgttgggagttacaggatcaagtaactcacaatggcacacaggttttaaagctaagttttcctttccacatctcagaatttttccaatggacttgtaaatcaactgtgtcaaatttattttaattggaaactgtcaacacacttgtcttccgcacg

SEQ ID NO: 2028 - DNA, 662 bp, Rattus norvegicus
  Genbank Accession No. AI177380
cacgtggaaaaaaagaattttaatttttaaatatataagtttgcttaatttctgatgagctgttcaacactgttttaaatatcctgaattagtaactatgccaaccaatttacctccagtgtttccacaggagacattaaaataagaccaaattatagttttcttcaaccaaagcagtcttgttctcagtcctttttgtgcaaaaatattacaagagcaactcaaatgggaacgctgaaatgacatgccaaaatttcagggcacatttaaaacactcaataattcttgaaattactgtatcctaaaatattactaccaaccgtttatagattagttctgtatatctactcagacagatgcatattcctagacctctgaaaataaacaggctcattggtctcttttggtgtccacacaataggcaagataggtttacaatagtgtttaaatcaaactacgcaactacaatctcctgactccaccacattcaaaacagaagtccgagtttatttggctaccttgaaatcactcccataaacctgctacggttcactggatctaaacatttctcagaaatgtgtcatttataatttcacctaagtgatgattaggggatcctttaaaaatggttaatgcctaagattcaaactttatctaaatga

SEQ ID NO: 2029 - DNA, 637 bp, Rattus norvegicus
  Genbank Accession No. AI177383
agaacaatagattttatttcattaaaatagattaaaaacagactgtgtaaaagaattagaattttcaataatttactattatttacattagcaagtgctggtcgttagtagacacagtgaagacatgagcttgcaggacccagaccttctgcggtccaagctgtaagcttcccttactccccagcccttcctttctggttcaccatggcacttatgccatggagtttaccagaggaggggttttgagcaccctaagcagtggtgaccacatcactgcctggcagaagagctgacaggtgccggcagagaggagggagctctcttttctggaagaaaactttacacctggttcatatgcaccggactgtgaatgttttccccgccctaaagccagcaatcttctccaagcttgatgttgtgtaaactctccttccaactgaccccaaacccagtttccagggagcagatgtaaagaagaaaaagagaagacacacgtccttcttctcaggaaagtcctgagttacttaatatcccctgcccatgaggtccggaacttggtaacttaccaaaaatcctcttgaaaagcttagtgcctttgatacacatgagaaaagtggggagtcagggccatgtgacc

SEQ ID NO: 2030 - DNA, 646 bp, Rattus norvegicus
  Genbank Accession No. AI177409
gctagacatgatggcgcaggcctttaattccaacacgtgggaggtacaggcaagagaatctcttagttcaagctagcctagtcttttttatagagtcccaggacagctagggccacataaagagaccctgtcttgaacaaacaaaataagacagagaccaggctttagagaactcaaggtccccacctctatgatccatacactctttgggtacatagaaacactaaacacaaacaaagcaaaatatttaatctctgtattgaacctcaccctcacgttcccatttactttgatggcctccataaatcatcaaaatgacacaagccagcagtaccacagaaaccacggcaggtttgaaaggcatcgtggcctagttctcgccacggatggcattccgggaggtcttttcccgtttcatgcctcatgcctcatgcgtcggctgcgccaaaggaagagctgagctctacaggactcctgaggtcttctgctcttccgcggcctggcgcctggcactgcgcagctggaggtaatggtaggctcgtacgctgcagaggtagcccccgtacacagtgaggagcatcatcgaggcagagaaggtcttgtagccaatgtcggctagctgcttggcagacggcatgtctttccc

SEQ ID NO: 2031 - DNA, 660 bp, Rattus norvegicus
  Genbank Accession No. AI177412
atatgattaacagttcagtttattaggggctttaataaagtaaaaccttacagtgaaaaataacataagcttttatgatttgcttgcagcaggacagacatgagtgaggacgcctcagtaacagtcatacgttgcgtgagtacggtgagcaggcgtgcggctgcgagcaagtgtgagttctggctgtctgaaggccgaggagcttctgatgacaccgagatcctagccggaaattacgtcagcgagccggaaattacgtcagcgagccggaaattacgtcagcgcggcttctgagcatcactgaccttaacgagaggaaagctccactttatctcctattctgaagctgtggacaggaattcctttggctgtgatggcatttactcctgaatctcattccctttcgggggcctcttcatccgtgagtagggacttattgtgtcgtccatcacaaagtcatacagcactcggatccaggagttgtagtgtgggaggttatcatagtactcacttgcgatttttctcaccaggggcaggtttttcccaggaacattggggaagtcgtggtgttcgttgtgatagcccacattgaaggtgagtaagttcagaggcccatagtaggagtatgtttcgtgtccctttaggaacatgtaatgttcg

SEQ ID NO: 2032 - DNA, 601 bp, Rattus norvegicus
  Genbank Accession No. AI177428
acactctacatgcttttattacaagactaccgagcatacgagggaaatccatcatccggtaattacatctaaagcacagatatttgaaaaaaaaaagaagttgtttcattaaattatatgattaaaccatgaccaaatagaaaatttatataataaagccaggaaaaaagttgtaaaatatagtttacaataattattcacattcaaggctgtacatcaatacatacaacgtggccccaaacatgaattcaatccaaataattcatatattagaatttaaataatacagactgaactagaggccgacaatagccagcaaataaccttatataagaataaaaatacaaaagtgtatatcctagtatcattgcattatctgttttcataagtatttttaatttttcctttgcctgtacatcacagttacagctacagaccaggtagagaatattacatatgttctaactgactgccaccaacctgaatgacagcaatagactattgattcatcctactgtacgtggctagggaatagccgcagcagctctaaatactgtaacaatttttgatttgtgccatgttcaatcacactatggtcata

SEQ ID NO: 2033 - DNA, 457 bp, Rattus norvegicus
  Genbank Accession No. AI177481
aaaagaatgggaggtgcttgctgatctctgggccgggaggaagcttccctccacgcactgcgtttctctgatacccatttcacctctgcccattacaccaacctctggctccataaagtttattgcaaacaaagaagggacttcactcatcgtagaattttggcagctcgtctcccaggatgacgcgatggtccacaccatcagctgtaatggtgaccaggtagatgacacccccactggagccatctcggttcatggccagagtgatggcgtctgtggcagaggggagagcttgtcaaacacgcggttcactacggctgctcccgctgacactcgggaatcagagcccaccacgacacccccgtcaaattccacagccatgatggttgtcccggtgtggacttctcccgtccggaaagagccggcggtaggtgctccggcttgcagcatcctagca

SEQ ID NO: 2034 - DNA, 526 bp, Rattus norvegicus
  Genbank Accession No. AI177491
gtgaatatgtaagtaaaatttattatcataaataaaaagataaatcatataaacactgtacagaagtagcatgtgagctgtccttgcctggtctgaaatacatgcatcatcaatgtccggtttcatctctccacagccttcgtgcagtgctcctttttggtgtctccccagactcccggtacctcttccaaacctcacgttacgggataggcttctggtgttacttctgcagtcaactgtgactgctcatgcgatcatgtgaacactgccaagtatgggttttaacaccagcatttactgccccttacagaagcgccggacacagtatgtgttcccatttcatgaatggcagtttagtccacagaaaccacactgagactacctaggttaatgaggattagtgcatggaacaggtcctttaggcagggagagcgtagacaggcagcagcaagtacttgttaaagttttgtcagtaactgccatttaacaagtgactgtaggaagggtaaaacttaataaggtactg

SEQ ID NO: 2035 - DNA, 575 bp, Rattus norvegicus
  Genbank Accession No. AI177503
  misc_feature (1)..(575): n = a or c or g or t
acagaatttactacaaaatgccataaaaatcgcttcaacttaagctctctccccccgtatccggcgagccaactggatgtctttgggcatgatggtgactctcttggcgtggatggcacacagattggtatcttcaaacaaccccaccaggtatgcctcgctagcctcctgaagggcaccgatggctgcactttgaaacctcaagtcggttttgaaatcctgggcgatctccctcaccaacctctggaagggtagcttccggatgagcagctcagtcgatttctggtaacgacggatctctcttagagccacggtcccgggcctgtagcgatgaggtttcttcaccccgccagtagagggcgcgcttttccgggccgccttggtggccagctgtttgcggngggctttccctccggtggacttcctagcggtctgcttggttcgggccatcttctctcacccaaagctgaagtctgaggcccttgctgggaccgacgcgccgctgtaagcgctcgaacaagcgccgcaatcgcagagcagaacaagacgaagctccttcaacgaaccctcgtgcc

SEQ ID NO: 2036 - DNA, 557 bp, Rattus norvegicus
  Genbank Accession No. AI177593
gggacaaataccaagtttatttcacaaacactaagaagatgggctggatgggggttggggggcatgggcgcacagctgtacacagtcaccatcagtagcccacttcccacactgggattcagtctggactgcaatgcctccaaagtcaacaggcagcaagaggtgagtgcaggagggccctgaacaccaagccccagaaaggctaagggacacagctccagccatcccaggaaaaccagcaataaataacagtggggcacggccccacccatacaggtcatctagtcacccatcttcactctggaggtctgaaggattgcgacgatgaccccaaagaggccaatggcactgccaaagatctccacgatgagaatttttacaaagaggctggggttctgtgcgtcagccagggcagccccactgcccacgatgcccacgcagactccacagaacaggttggacagaccgactgtgaggccagccccaaacatggagtagcctggaggatacaaagtagctcaagtgaggcccatggtccaaggtgggctaccagggcc

SEQ ID NO: 2037 - DNA, 515 bp, Rattus norvegicus
  Genbank Accession No. AI177631
gtatttatattaaaatctttaatttatttatttcaagtaatttttcaaactttcaatgcaaagtttaagtgaaatcttcactctgagatacaaagggttaatgaattactaagtctctgtctctctctttctgtctctgtctctttctctctcacacacctatacactcaccacccccctcacacacctatatacttacctccccccacactctcacactttggatgctgttttaggtaggccaaggctgatgagctcgcactctacatctgctatatactacatctacaccagcacacaccagcttactccatattcatgatggtagcacttggcatagttatacatgcttttatactaaagaacaggacaataaagattatccattatacagtatgagggtaccttacaaaatgcttccttgaacagtctattccacatttaaacaaaacaccaagtagtgctctcagtcacctaagaagacagcctcacgggcattccattggcctcgtgcc

SEQ ID NO: 2038 - DNA, 434 bp, Rattus norvegicus
  Genbank Accession No. AI177683
tttttttttgaaaagttaaaaattccttaattttttattcctggtaccactaccacaatttacagggcaatatacctgatgtaatgaaaagaaaaagaaaaagacaaagctacaacagataaaagacctcaggaatgtacatctaattgacactacattgcattaatcgatagctgcacttttgcaaactgtggctatgacagtcctgaacaagaagggcttcctgtttaagctgcagtaacttttctgactatggatcatcgttccttctgtggcagatttttacagttcctctaatgcatttaggacgactgtctcaaagtaacctgcagctttcctgacaactcctcgctctctctcctgctaagaactgtagccgtttgttttattttaaaaccttctgctaccatatccaccacttccaccctcgtgcc

SEQ ID NO: 2039 - DNA, 696 bp, Rattus norvegicus
  Genbank Accession No. AI177751
gcacttaaacaatactgcagtttatcaaaaaacacataagaaatttcaactcttattctttgagttacaaaaatcaaggttcggctaagttataaacatgtttttcatgtaattatttgcataattctaataatgctcagtggcttaagatcagaactggttcttaaaaaaacactaaaaacataaaaatccttagcccctgtatttacctgtagaatatattcatttacgcttacattccaggatttgctatatcaggtataactttaaaggtcacatccaaaggagaaagcaaaccacctataaactggcattatttatttattttttggcttgtgaaacttccttaatttgttgatgtagcaaacaaatttcaactctgctatgcaaatgacagaagaaatctgctcagcgattcactttagagttcagcttcatacaggcaacatgctacatgtgaaaaattactaactgaactacaggtattaaatactgaaaaaaattaacagtttattataatttattttatttaacaatctaggaagttcgcggccatcagcagttccagtgcaatttcaggtgcaattgggaattcaggaatttcagtggagctgttagtatagcggaccttgtaggtaaaatacatgcacactttcgatagcacatgtgaagggatctctctaaagttgacctcat

SEQ ID NO: 2040 - DNA, 551 bp, Rattus norvegicus
  Genbank Accession No. AI177765
tctagtatttattaaattataaagtgtttttaatcaaaaagaaaaatgcagactaagagaaacctccaagtacaaggacaagacagcaaaccttatggaaaggaacaccatgaagtatgttatagagtctgaaacttaatagctacagcttgacatttctatcttagtgagaccaactgtaaagtagttgttagtcatctatttttaactcccaaattcacatctcttttccacattaagcttcctgctcatgataccaagtatctcacagatgccaaattttagtgaagattttataccaatccatgcagaaaaataaggtagtgcaagagtcagatgagagccattaatgcacggggacacactagccaaaagaactaaagactttaaaaaacaaacactctaatgtaaacagatgccaagaaaactgtgttatactgaacagctctcaactatcaacaccccaattcctcacattaaataaatttcagcagagacatgttagacattttcctcgtgccgaattcttggcctcgagggccaaattccct

SEQ ID NO: 2041 - DNA, 338 bp, Rattus norvegicus
  Genbank Accession No. AI177774
ttttttttttcctttttgtttttttacatttgagtaatggcctttattgagcagagtccaccaattcagcttcaagtaggttttcccttcagcagcagcactcatctctcccaaggctccagctgagaccccttcttctcctgtgtctatgagggaagtagaagtgcgtcactattctcaatggagaggacaatgccttttttggacaggaaaacgaccggcttatgtatgtatgcaagacaacacttggtcctccagtcagttccttaattaattctgtcctggaatatatacaagttattggtggcagctacagcaataatgctctccatggggtg

SEQ ID NO: 2042 - DNA, 429 bp, Rattus norvegicus
  Genbank Accession No. AI177790
taaaaagacaaatcccataaaacaccatatttcccaccagatccaatcaggggcaaacatatatcctgatttatttcccgcccgtgtacctccccactacctgtgaacgagcacacccagtgtggtgtgtcaaacaaagttgtttaggggagcaggccacatggcttgttgtctcccaccaacagcagcctccagcctttcaggaacgtggcccacaatagaggtatttttgtttagtgggtctcttaggcaccgtaattgaaacttaaaatagtatagcattgtctctcacatcctttcctcgagttgtatcccgagtcgaatccctggctctgcgatgggtacctgtttacactgggatctaacagccatcagcctaacagtacccaggcaggaattattatctacttaagtcactaatgagcaaga

SEQ ID NO: 2043 - DNA, 449 bp, Rattus norvegicus
  Genbank Accession No. AI177804
aacagaactctgtgacctccacagagaagtcacctgctttattgcatagatggcaagttttacaagcatatactttaggtataattacataaagtcggaagacaagatatttatgtccaaatgccactccattaatgaacggtttaaaggtacacagtgtgtgaaattaattttgaatgttactggtgtctgcctctgaacgtcacaagtaacacagcacagaaagtaacttttccaatgccctcagtattccacaagctgatcgcaggagcaccaatgatgtgactgcttttcctacaaacacaactggaataccagtgactatgctttataaatgtcgtttaaggcaatcctcataggaaacaaggtcaagattcataattgcacatatctgtaaggtcttacatcgttgatcacaaggtgcgctgctgtcataactcacaaaaaaa

SEQ ID NO: 2044 - DNA, 565 bp, Rattus norvegicus
  Genbank Accession No. AI177869
aaactgcagtttatcatgaaatgcaggccactgtagacagctatggctcaatactgcttggtgttcactcaggacatcatcttcttacactccacagaacagaaaaccatcccttccacaggcatgaacttctgcccgatcaggcacttgctgcagcaggagcagaggaagcactccgtggacgcgtgccagctgaagttattgtacgtcactcgctgcacttccgggtcgatggcattgtggcacccttgacacaccacagcatggttcttcacatagcacggcttgcacacaggcttgtcacggaccatcacgtatatttttccggccaggatgttgtcgcagtcaaagcagcagaagtgcttcagatgccaattctggttttctgcctgggtatactcattgctgaatatcagctggcaggaggagaaaaacaaaacccgtcaggcatctctctcctttaccccgcaggaactcacccagctcctcctgatggccgtctaagcctacaagggcagatgccttcttgagggctgaatatttgaagatggtaacgtcaggcttg

SEQ ID NO: 2045 - DNA, 630 bp, Rattus norvegicus
  Genbank Accession No. AI177871
aatgaaaataagctttattacatcaagtaataaatacaaagatgcaacgtttcagtcgttttcttccagatgttgtgatcggctcacagtaaacacggaactgagatctagtctcaggacggacatttgcagggtgcttggtaggttgggtggattgctctttcttctgtatttataacctgtgcattttaaagattgacttcaaagcactcagtcatgcaaacgcttaagcagagaagctccgtgaagcagggtctacactgtacacaggcaggccagctactaagcaaacgtgctgtggtctgcactcaactcctcagaggcaggtgagctcatggaaaggaagtcaactggggtgatgcaaatggaaaatgtatccaaagggaggttaaaggggacactggtatttggggacaaacaatagcttgctgtgaagtggcttgacaaacatctttcaaatgcttgaaaagaaaaaagagctgggtcattcctaactacttaaaatgcacatcgtcagttactgcaaaatgtcttcccaatcttttgagtgtgggttcagagcttaatgactgtggtagaaaaattactgccattttgaacaaagcctctcatctccatggggtagagatg

SEQ ID NO: 2046 - DNA, 549 bp, Rattus norvegicus
  Genbank Accession No. AI177873
aggggtttattaaggcttgtattctcctaaaggacaggtatccgatgttgtccgtgactccgtacaggcagtaacagctcgaggaagtgacacgttctaaatacaagtctaaataatacagcttaaatgttaactcaaagggtcttttggagtaaatagtttcaaaaggtatctgctctttaaaacagtaaggatcctttacagggggcccgtgcaaattcagtatgcgagggcgtcgggcatgagcaccactttcatgctaaactccaactccaggtggcggtgagctcctccgaggctcctcattccacaaaacatgatagcaaatttgttttctaaaggattttttggtttttgcttttttcacccattcaacaggaaaaaaaattagacccacagtgaaatttacagtcggcagcagcatccatcacactgcctgtactatcagatcctacatttaaagcttagcgttactggtataaaaacttaagacagcatcaggattctcaagagaagaaagaggacaactaaaaatgatctacgaacaac

SEQ ID NO: 2047 - DNA, 607 bp, Rattus norvegicus
  Genbank Accession No. AI177887
ccagaaaaagtatttatttgacatcattaaaaaaataggcacatgattttccatgtttatgtcacctgatttacataccttaatgctcggtacctcttaaaaacactaagtaaattggtgaataaaatctatattgaaaagacattgtaggcaaaggtcagtccacagcatgagaaaagagacatctgtgaacaaaataatctctaaaaacatttctgtgagacaataaaatctaaccagtagatctttttaaaaaatatttttcaaaataaaggttaaaaaactaaacactagagattctccacctcacaaggtgaacagtaggagcagaaggcaagcttagaaaagtgatggtgccagactaccgagaggctgaagccagtgtgttttgctctgaagtcgggaaggaaggcttgggactacctcagggtgacagctgagtcttcactttcatactgaaatgcggttgactcccactgagacagaaaacagagtttccttttccatatttgccaacataaatatgaaaataatgctctttttaaaaagcagaatcacagtggctataattgtgcagagaaaatttttgttgagtatcattttcaaa

SEQ ID NO: 2048 - DNA, 585 bp, Rattus norvegicus
  Genbank Accession No. AI177894
ctagagaaaaacacaagaccaggtttatttcatacaatgttattcacacgtttcattttctaatttatacataatatacaaagtgaagatgacatttcatatgagccaataagagccaggacttagacaaactggtccagaaacaatctatatcaaaaagagacactcaaaagtaaagcctaagcagattctgcccaatcagatgtctttattctgaaatgtccgatttttctaaagttccatgccaacatactagaaggtagaatcggggtgggcaccaaaattggcagatcataaattttctacacgaacaggtatttttctagaatatgcctaaaaatatcaggaggactgggttgtcagcactgggaggtatgaatcaggactgctagaggaggattcagttccaaataactttctctaggacttgccaccttctgagccgagtgacagctgtcgggacatccaaagggaaaggtgaggacacaccagaatgggctgcatttctgcaagaagagctgtaaccaatctctaacactgacagctttaacccgaaaccatgggctgatgaagggaagttaaatt

SEQ ID NO: 2049 - DNA, 395 bp, Rattus norvegicus
  Genbank Accession No. AI177911
aagggggtgaaaggtcaagattttattgtcttcataacaaaatcagcttagaactggatcacttggccctttctcttcttgtcacctcctagttcaaaatgcttgcatctcttaatagccagcatcctcttagatctgcagttgggctcaacgcactccagtctcagcacaatcttctttgtagttttagcctttttgcggaaaatgggcttagtctgcccgccgtagccactctgtttcctgtcataacgccgctttccctgggcatacaaagaatccttgcccttcttgtactgcgtcaccttgtggggttggtgcttcccacatttcttgcagaatgtccggcgggtcttaggaacgttcaccatgtttgcaggagcgctacccctcgtgcc

SEQ ID NO: 2050 - DNA, 469 bp, Rattus norvegicus
  Genbank Accession No. AI177919
acgaattcaattaaatatttattgaacaaatgcagaataaatgaaccagggccgttttaacctgaagatacattaaccaactcaaatcttcaagggctgctgccataggagaacaaaaagagatgcactgagcttttctacacggggtctggatgcgcagcaggaggatgcgcagcaggagggctgcaggccggccctcagctcaggagctccctcagcacacactgcactccatgctcctcccttcctctgaaaggaggcatcagaacttcgagtttcccatctgcacctaagttgcgttctcattgcagactgtctgtctcatgcaatggatgcttgcacaatgggaagacaaacatagcattgacaagctcctccccaggagacacctgccaccatcggctctttctgattctacatcactgattccttgttctgtgaagggaagaagagcacattctccagagca

SEQ ID NO: 2051 - DNA, 420 bp, Rattus norvegicus
  Genbank Accession No. AI177921
aatgggaactggtttatttaaacaaggatccagggtagacccggagaatgttctagtagagcatggcacagacgaaggttagttaatactcactagcaccttacatgagacagaaagatgaaaaaggtaacacatcacagaaggaaaaccacgcacgcggaaaaggcacctggcaggaaagcccgtgtcccaacccctttagcaaggtcgttcttgtgcactcagtctggacagtatttggaagggaacaaaaacagttctaatctaaagccgaggctccagggccagcagccagccttttcactcaggctgctggtcatttgccgtgtggctggggactgagtatgctaagcagggatataagctccttccaccctttgtttctccaaaaggaacccttccccagttttagcagtggat

SEQ ID NO: 2052 - DNA, 264 bp, Rattus norvegicus
  Genbank Accession No. AI177960
agaacatctgaattttttaatccttctttacaggttacctagaccacttttgattaagaaaactggacaaagttagtaactgccacaagcggacgccagttggtggcacgtgtcaatttccacagagtcctgctttgcggggtgtctgaatgcactgctaggggtctctgctcaaacttgctggaatcactcgtggcagattttagtccacaggtcgcttttccccatatttctttgtaaactcttcagcattcttacagaata

SEQ ID NO: 2053 - DNA, 535 bp, Rattus norvegicus
  Genbank Accession No. AI177992
  misc_feature (1)..(535): n = a or c or g or t
gtgaaagtaaatgccttttattagtaggacagattttcaaaggtctttgtcattttgacaacaactgacagatgctctcttgggaacaattgaccattgcacaaagacaagagcaggaaaagaggtttagtggtacttgtgagccagggcactggccactccagccaccaccttctggaaggcagcctgtgcacagggggtgaattccttgcccaggtggtggcccaacacaatcacaatcatattgcccaggagctgtgggaagagggaagaaccatcaacataattgcagagcaaaaataccagacacttcaggctcatttcaaatggtgttttcgtttccaacttaaagtactgaaaaattataatgagaattcttctatgtcagacagaatttattgtaaaatatattcttctcttccactctggcatgaaagccaattactgctactactctntagagctgtgggaagaaacagggactcacatatcttccttgtcctcacctcgtgccgaattcttggcctcgagggcc

SEQ ID NO: 2054 - DNA, 558 bp, Rattus norvegicus
  Genbank Accession No. AI178025
aaagaaaatactttattacatcatgaaaaaggtatccaacaactagattcatacttgcttgaatctataaaaaaaaacaaacaaacaaaaaactgaaagtttattcattagactgtatgtggggtcatgttccacatgggaacagagaggcacaagggcttctaagtattgcacagtcttgaaaaaaaaaaaaaggagttgggaggagaagatcacatgatactgggaacgtctcacattatgagaaactaccaagaaacattcgaaaagaaaaccctctgtttctacagtagctttagtctgcagttcttggaatgactattccattgaagacatcttagtaacaggaagcttcgtttgagcaatcccatgtgcaaatattaataggaaaatatataaaataatgcatctcttgccatcacccccggcaattcaggaccgtattttggagaactgttttgtttgacactcggttaagctgtgagtttggcctgaagctccatctctgctgcctgcttgagcgcaacgtccaccaggagctgaaatccactaaaatcc

SEQ ID NO: 2055 - DNA, 510 bp, Rattus norvegicus
  Genbank Accession No. AI178039
acagtacacaaaacccattaataatgtagtgtagagaccagaatgtaaagagagaaagagagaatacattattgatttgtatattaattcgagttcaggcatctacttgtgttacagcacagctgtcaaaagccgagggtgagtaaataaacagacgggtttgtttctttccacgttattttataaatgaacaccgatgggtagtgaagcaatggttttgctgtccaagttcagaggccgctgctgtggcggggggcggggtttagttctgcatctgctcaaagaacttgtatgttggattctcatatccattctgctgcatcttggagaggtggcgctcctccggggtcacagcagcgtcaaccttcaccacgccatgatggatggatgtgtactgtgtcttcttcagcattaccaaggtgatgacaatcactgttgctatgacaacgcctcccaccatgagtccaatgatggcacctttgtttgaacccacatcttctgcaaagaaca

SEQ ID NO: 2056 - DNA, 432 bp, Rattus norvegicus
  Genbank Accession No. AI178069
ccaaaaaattttattgggggaaaactacaaaacatttacagtacaatgtttacagtcacaatttgtagtgaactgattccccaaaatatattacaactcaagttgacttatctcgttacattcaaaaacctacttctgtcaaagtagtccagagtgcactcgtggtgctccaactgtacctacggcacaaactaagcggctgatcattcatttgtcatccggcaaagccgggagactttcctgcctctttacaatgaaaaataatagtacaagttctggactgtcattaagcaaggtatattcgtgtaccaccaacaattcagcgtgaagacctggcctcttcacatcatagctatggttaaaaaaaaaagtggtaaaattcttttcctcttgtgcaggctaacccatcccacattcaaattctcaagcact

SEQ ID NO: 2057 - DNA, 439 bp, Rattus norvegicus
  Genbank Accession No. AI178100
tttttttttttttttttggttctttttttcggagctggggaccgaacccagggccttgcgcttcctaggtaagcgctctaccactgagctaaatccccagccccctaaatagtattcttgatgtaaacatcaagaatctagaaatatacctatcaaagatgtgatggacgttcttggataaaattataagaactcactgaaatataaaagggcagacaatcctaagtaaagaaacagactagattcttgaatcgaatgactatattatattaattctctctaaattggtctctagacttactacatttttagtcaaatcataatggaccgttgggtgttgtaatggaaaagcaacacagcagagcagtgggtctgacacagcttggatgctcctgggcgtgggaaggaagcactgggactatgatggtgctcagagagt

SEQ ID NO: 2058 - DNA, 578 bp, Rattus norvegicus
  Genbank Accession No. AI178135
agatgaagtcagatttattgttcatcatcatgtcatacaaaaatctacaaataatagatgtgtacaggaaaagagcccaaaggaatagtaaatggaggtgtaacggcgataatttaaacttgctttcccccatatattaggatgacagccatttcaaagcatagttgtgatgtcaaggcagcttttgctcgcccaccagagctggccgtttagattgaggccttcagtctcacagttctactgactcttgacaaagcttttgaggtcctcaagaaaggtgatatattcctggtgctccagggctgtgctgagctccaccaactcatctgcaaaagtgttatccacccctcggtccgcaaggaaatccattaggtggtcatacaaggcccagtccagggagtctgtgttgagtgtgtagtttgtatccctccactcagagtcaccagtggtctgaaagctcacttccttaatagagaaaatgtcactctcggcctcatcttcgtgtccgatctcgtcctcaggatagtggcagtccagtacaagggcctcgtgccgaattcttggcctcgagggccaaa

SEQ ID NO: 2059 - DNA, 506 bp, Rattus norvegicus
  Genbank Accession No. AI178142
acaatcacatcacattatattaagcactcaaaacaggcgtattaataaaaaagaccagctaaaaatgtaacacatcatacagtccacaaaggtcacgtatgacagtaattttaagtacttcatttcgacacaataaaaataacaggtgaagtggtgtctctgagaacactcatttatacgtatgacaaaatcaaggaactttacatttaaccaagattacatcactgaggaaccacagtagacacgccaaccacatacataagaccaagtgctgcacaagtaacccagcaccggatcctcccttcctatgaccgccacacaccttatacaatcttttcatgaaccaagtggaaaacattttcccatcatccccttcttcaagaggaatcaagagaaaccaaacaaaaaattcaaaagttggtttcgccatcctcctcaggtgtggttttatgaggacaaaaaaaaaatccctccgttacagaggaattgcgtcatctgtaggagtt

SEQ ID NO: 2060 - DNA, 580 bp, Rattus norvegicus
  Genbank Accession No. AI178151
ccttggaagaaacatttatttataatctttattgaacagtttcaacgactccagaacaggcttcacagtttgagtgtggtgcagagacactaactcatgcgggaatagctactgtccagcgtgtccctgacgtatgtgagtgtgaggatgctcaggcacaaggcagtgcgagacacatctgctcagaaaccagctggaaaacatgatttaaactctacagtaaggtttattacaacgaaagtgttcttaacaacttctaatttcaaaacaaagtaccccaggaatcaactatccttttaaataaaaaaaataatttatactcttcttaaaggaattccaacaacataaaggaagttccaactccatgtatgtatctatgcatgtatatacacacgtatgtatatgtacatataacttagatattctggcactctatgcttctgctcatgcagcagtgacgctggcgaggctctacagaggcctctcggagaacgccgtgtagcttctcactctggcgaagaacaagggggtgtacatcttgtcaatatcaaaagcactcactgcagtctcacctcgtgcc

SEQ ID NO: 2061 - DNA, 601 bp, Rattus norvegicus
  Genbank Accession No. AI178159
ctgaatttcattttcctactttattttttatgaacaacttgctttacttcttaatctgtaccacttcatttgacatttatcaaagctgtataaaagccatgcagtttatttacaatattgtacattaaagtgtttgaagatcacacaggaagttcacaaagctatacatgaaacacatactgagaggttcttataaaatgtaggacagaatttggcagactgttatggttggtgaatattatgcaaccattagctagaaataagacgaaacatgcaaacctgtagaatttgaagaaattaaaggctaaaaacatttagctaatagctaagttattcatatagttgaaagtttactatgtaagaatgggaatttataaaacaggtcagtttttaaaagttctccatgaataataggctttcagtaatatataaaaatcttcagaagttatttttcaaattatgttcaggattgaactatattatcaatagatatatagattaaatctatgacttttatataatcatttattgcattctaaggaagtcttaatttttcaccttgggaacaaaggtgataagaaagccaatcaggtaacattgg

SEQ ID NO: 2062 - DNA, 551 bp, Rattus norvegicus
  Genbank Accession No. AI178161
gctaataacggattttaatgcataaggcacagtataaggctggaatcagtaagcatcttcatacataaaaggcccatcaggctgagcaaaaacagcgagaacactgacaccctcccccccacaaatcaggcaccctggagagccccagaggaataaagggtcatccagtctttggcatggtgcctgggggcaggaaatgactagcatggtcccagctaccctctgggggcactgacatcaaccgggagctctttggtctggggaaagtcagtgcaaatacccaggggttgagttctggagcagttgggggtggcacggtaaccccgggaatgtgaagtctctggaccatcctcagtgctcagggacaacatgtggcctttttcttgctggcagctaggtacaggtttttgtcatcgctgttgatgcgaacaacatccccaatgtgccgagatcccgatttctccagttcagccaggacattggcctcaaaggctaacgctgccacacggaagaagaattcccgggacgttctaacttggaaggaagacact

SEQ ID NO: 2063 - DNA, 513 bp, Rattus norvegicus
  Genbank Accession No. AI178207
cacaggtacttattatcacttttatttataacaaattattcccgatttcttctggctcaaaagttctttgagacaattccatcagccttagccaatcggagaatagaatcatctgactcgcccatcctgcgaatggccccgcagatgccgtaggttttaaactgaccattaaatcggcctgtactcctgtcaacctcggccacattcatctggatggacgcgtggtccttggcagcaatgatgcggttgctcgcggagcatttccgcggcacgtacaggtccacaaactcgccggcgtcgttctgcataccgaggccgtccctgcagagtcaccacgcggatcataaggctagtcaggccgcactccgagccctagccagacccatgtaccgagcgctcccggccatgcgaccacgacctccccaaccgcgcccggcccggtccagctcgcgcccacagcccgccgcgcggcctacctgctcacgggtctacggcctcgtgccgcctcgtgcc

SEQ ID NO: 2064 - DNA, 545 bp, Rattus norvegicus
  Genbank Accession No. AI178267
tcagatttatttggaaattcacagtttctaatggtactacagctctgtagttacatatttaaaaccctcttttcacaacacatagtgacttcccactctggctctgctggcatctggacttcaagggcctgctgtaccatcaggccctattgctctgaatggctaattgtgcagactggaaggggtaaaattcatttcctaaaacgtactgttcacctaaagcagcaacttaaagaaaaaggccttaaataaatcacattacaaacaacaccaaaaaaggtattagacaaatttaaaaacaattattaacaaaagtgctcaataagttataacttaaattttacaacacaaaatggtcaattctctcaaaaacacatttcactttcactcatccctgtacaatccaccttaaagctttgtagtgttgcagcttaaaaaacctaataaagttacaaaacaaatcaactgacagaaaaagttctccctcctcttccagtggcattataaatagacaaaaggcacataaatatgggaaggtgcaagaa

SEQ ID NO: 2065 - DNA, 532 bp, Rattus norvegicus
  Genbank Accession No. AI178272
ctgagcagtaggtacctgtgatctttaattaactctaaatagataacgtatctctataattataatatagaaatgataatgaacaaaaaatagatactcggggagtgaggcagggatttttctaaaatattgctgtgagcaaagtacgctcaaggttttcagcatgagcagtcgcgcagccagggagcttggtcagcacttggggactgaggtaaatatccggaggccgtgcatgcccttgatctcttctttcagtgcctgattgaccatctggtgctgctggaccatcctcttcgctttaaattcttctgactcgattttaatttcatacatcgccccgcagcctcctgagatgtctgtgacttggatagccgtggctcgaggaaacttttctttgagaacctgggtcactttgagctccccctccgtctgggaggcgaacatccgatgtgcacagtgccacagagggagcccgcggctcccgcggagcaaaggcatagcggccacggggccccatgccgcccctcgtgcc

SEQ ID NO: 2066 - DNA, 488 bp, Rattus norvegicus
  Genbank Accession No. AI178326
tgcctagggaacaataattgtatattcagtttaacagaaataaaagagtatttgtcttaaaatgcaagattttgagccatgcaattaaattgttaaaaaaaaatttcaaaactgaaaatcctttgctatttaagggctggaatgtttcagctttttaaaggaaagcagagatgtatggtacagctcccttgcaagaggggattcagattcacagttaacatgaaaatcatgtagcagacgtgtgtggagcattcttcgtacactggtttgcagcagtgacattcacacagatttcccagcgtcctggtaagcccgtgtctgcagccttaccttcccacatcgtggaaatacaagttcgcacatatacacagcatgatgatagaaaacaagatatagtaaatgagattcctaaatttcggttctaagtctcctttgcgataccagtagataagtatgcaggcagtaatactactcaaagagatgcagac

SEQ ID NO: 2067 - DNA, 624 bp, Rattus norvegicus
  Genbank Accession No. AI178475
aaaaactaaaggttttttattataagcacacagccaatgtattaactgaacaaagcattaccaaaaaacctcagtatttatgtgaggtcgatctttagtgatgacatacgtctaccttaagcccttcgggaaactgaggcaatgttaatctacagttgtcttgagtcaacatgaggcaaaacaagtaatccgtaatggtaataaactttaaaaagaaaaaaaaatggctgaccaaggttgtgacgcagttcaatccatcactccatcgctgtagcaaacaaactgttaagtacaagaaacaatcattcagccccagatcagacttaactgaggtcagtcgtccaggtagctgccccctcatatgtcttggcgccagcatcggacttcctcccacacttcaaggctaacacccacaggagacgctgagcccagagggtaagtccggaacgcgtttttccacaggaagcgcaaagttcggaatgacgcccaaccaaactgaatgaagtcccaagtggaagtgagccaacagaggaagggcggaacttccaaatcaccttacagtccaatacgggctagcgccaggggttgctttctgctgttgacagccttggggagggtgcaaca

SEQ ID NO: 2068 - DNA, 578 bp, Rattus norvegicus
  Genbank Accession No. AI178490
aacacaaaataattttatttttgtcactgtcaacaaacatgtatctctggtttattaaatattacttacgtactcattaaaatacgtttacatttaaaaatgtgacacaataaggaagttctctataaacataatccttcctcaatatatttcctactttgtttcacacataacttaatctacaaagtcataaataaaattaccaactctgtggtctagaagtacatacatacaaattgtgaaatatgagaaagtactttttgatttaaaaaataatacacaatatctgcatatcactaatcaaatgattcttacaagttcttactgtctcccaacttggaagagatgcctgtcagtttacttaggaaagatgtcatacttaaaaaccaaaacagtgacaaggcaagacttggtcgagctcaggtctccctgtgctgactgagtagctcaagccggcctgggagctgcaactcccctgcctcagccttctgagggcagggctcctgtagctcaggttagtttaagagcacagaggaaatagctacttaattactaaaccgtgtgaaaaccacctttgc

SEQ ID NO: 2069 - DNA, 366 bp, Rattus norvegicus
  Genbank Accession No. AI178503
acccaaatgataattttcaaaacaagaaaatttgacaatcaaaaaaaaaaaagttcatggcttctaagtgactttttttgttgttttaattcttttttaaatcaaaacgttgatgtactaagataaattaaagcgatactaccacagacaaaaatttgacaatagtcaattattatacaattgttcaaatgaaaggaaaagaagtcaaaggattggaaggtgattctgtctaatctacggtggactgatttctacaagtgttcaaagggtttgtgtagtgcaactgtctgtacttttggtgcatttaaaaaggctagggtgagaagaaactgtcctgcacagcgctggaggaagagaacgcagccc

SEQ ID NO: 2070 - DNA, 616 bp, Rattus norvegicus
  Genbank Accession No. AI178504
cactgcaaagttacaaatttattggtctggaaataaatacaaacatctcattaagaaactgtcctggaaagacataatacaatgatttcttgtcagcattcagtcactctagcctggatccctgatctttctacacaaggtcagtggaaggctccatagtaggagttggcaggtaaactgattccttttctctcatgccacctacatggtgtgactacattcctctagcaactccaagatcctgggactcaccaagccttgagggctgactcccaacagtcaagtgtctctgatctgatcacatttcctataggaaaattccaaggttagccacagtaagaatcgaaagacagtagtatagggcatgggcattaggctggcattgcttagagaggccaatgctgcaaacccagtcagcaggaggggcaggaaagggaagcaagttcccacggaatgtacagaatccaaaaaccagtcattcccccagcagtacacatggttctctctgaagaaccagcaaggggccaggtgagagacattcagttatcaagtttaaagtcaatgctacatatcaataatgggagacaaggtgtgactcattctcacaagattcccc

SEQ ID NO: 2071 - DNA, 490 bp, Rattus norvegicus
  Genbank Accession No. AI178516
aatgtaagcaaagatttactaatttttggcatgctggtacacacagcactgggcaggaaatggctaacttgttgacaagttacttcattcttttcctctttttcagaagtgcatctcgcagtgctagctgcttctcccggaaggagcgtgatgtttttgaccggacattctggctataccgcatcatcatgaagttcttctgctttttcttctctttatttgtggaactggaaaatggatttattttggttttcttcctcacaaactcctttcggtctgtccttccagccatagcggttgctagtctcgtctccttgtcggacttgggctttttatgaaggcgttcaatgtcccgaagagacagcaactcccccctggactcctcgtcactgtccatgtccaagtatttccttttctgggctttccccggggcagcgtccatttccttcttcatctgggccatgcggattttctggaagtccctcgtgcc

SEQ ID NO: 2072 - DNA, 502 bp, Rattus norvegicus
  Genbank Accession No. AI178582
caaggtctcattatttatttgttactctttaaagacttatttttgactggactcagatttagaagtagaagctctcagcgaagacagcctacgtctcttggcaatctgttcctggcgcttctctttggcttccttcattctcttggccaaaagtttagcatattctgcagcctcctccttgtttttcttagtgcgttgcttcttcagagcaatacgtcggcgtttgtgttgcaggacacggggagtaacaagacgctgaatcttgggcgctttggtcctgggcttcttactggcggacatcatcttctttggagagattaaaaagctttcggattctactagctcttttaggtcccaaccgacgaggcacagtggtatctgtcagtcctggaatatccttctctcctttttttacaataaccaagttgagaacactcaggttggcatccacaatgcatcctcggacagacttgcgcttcctctctccagttctcctaggtct

SEQ ID NO: 2073 - DNA, 487 bp, Rattus norvegicus
  Genbank Accession No. AI178734
caagtgaagtaaattcaatttttattcttctttacaatacatggatatgtggataaatttttcttttaagagcttgcaaccctgaggcaatgctgtgggcacataatggataaagcaacagtgaatggaatctgaatgtggtaaggacatggacttggaaaacataattgaacatcgtgaaattgcagtctatgctttctctggtctcttaacccagctatctctcagccatctcgcacactagacatcctgactctacgtacacttttgtcatatataatggcttccttctgactgaaatgtaataagttaacaggatttgtatctaaggggtctttatctggggtgtgtattgccagaagtgtgcccaattttggaccacataaaaactttggccccaaaggaagctggctgccatctggctgtggtaaccgtgaggtttccgagggtcccctgggagcccccacaggataatttttcatccggg

SEQ ID NO: 2074 - DNA, 658 bp, Rattus norvegicus
  Genbank Accession No. AI178752
gatgattaaatatatttataagattaaactctgtgtctgtgtatgacaatctgacacgttcgagggactgacgtccatccacagactgcctggggcatttgagaacaaggctcacccttttattgactgcacatgcctgtcagggaggagctacaggctgctatgacccatcaccaaagaggatttggggctgtgaccatacccgtaagtggtaccttctggcgggtaccatgtgtggcttgcctggctgtcctggaacacagcagtccacacacttcaggtcctaggcaaccaagtgaagtctttccccttaggcggctggtccagtggggacaactcagcttcccgtaggccctgcagggagtcgccagggtgctttggagtgacagggctgcactgccccaatccagggcacacctactctggggcttgtcccttcccactggagtcattggtgggtggcaggtgtctcttggcctgccagctgctggcccccagctctggccccggtttcatctcagggcgaaactgtagacgtgatagatctcatctggcaggttctcctggcgctcctcagccaggaggctgaggcctgcactgcggatgatccggcggaccacctcgaggtcacggcacacactgctgtccacatcgtcca

SEQ ID NO: 2075 - DNA, 485 bp, Rattus norvegicus
  Genbank Accession No. AI178756
atatacacaaccacatacagtccaaacagcacccagcagccataaagactcctgggggtagttaagcctgagtttcataaggatagtaaacttaagggagccacgaagcctgaagacaaattcaggacaggaaagggcaaaacagccagttccctggtggctttcctcactggaaaatcaaacatgtattcttactccaacagtcctgtccatgtttgcatgtcaccacacttagcaaaacacaacgagatcatatatgactagaactaagtgcatagaacgctgtcaggatcactgcttgctcttcctttttctcagtctttttttcccagagctttcaggtgctggagtcttttgtgtgtcttctttcactggtgacacaggcagtttcaaaatgatttcatcatcgtcattgatttccatcaactgtgatttccgtctttccaaaaacgttggtgtacaaactggcgtaggatcctcgtgcc

SEQ ID NO: 2076 - DNA, 552 bp, Rattus norvegicus
  Genbank Accession No. AI178762
tgttttgtttttttatatataaaaataacaagttttcctccaatccttgctctgggaagacatgctatgctcaccatgtcattttaagtatgttccctccacccctggtcctgttggacatgtgccatggccatagggttcctgaacagaaaatgctgaggactgaggaaagccagcaggaccaggcaggcggacaggctgccccagcagggggtgaggatggctgtcaatcttgcccagtgacttggtgattgctggagtctggacccttacccccttcacaacccacgagggtgctgccttcactgatggaggtacgcatccagccagatgtcaccagacttcttcagggacccgatgatatccaccagggcggtgaggaagggcttcacttcgtagtgtagaccatgcttggcacagaatgccttgaccaggggggccaccctccggtagttgtgccttggcatcgtgggaaagaggtggtgttcaatctggaagttgaggtgcccactgaacccctcgtgccgaattcttggcctcgagggccaaatt

SEQ ID NO: 2077 - DNA, 708 bp, Rattus norvegicus
  Genbank Accession No. AI178763
attgtgggaataccaccttatttattcagggtacgatactttgatagggcttgaaagcgttcaacatagaaggaatgcaagattaatattgaaaattcaaatgcgtaagagtttccctcttaaccatttcacatgtgtttaaaaaaagtgtcaaaactgatggctggcataacttcaaaagggagctctttttctactgaaaatgacatccagctcgcacgatcgaaggtcctgcaggagacatggcgcgtctggttttcctctaggctcctgggtcatcagcttccccaagttacaactgagttgctctttccaggctttttgaagcatccttaagtttccccaccaaatcctgtaactgctccatgctgcaactaaaactaatctctgggtaggattgggaatcagcgttctctacgtttaaggtcactaaatatccaggtcgacacatcttatgaagttggttggtctttatctgatattccaatcgccaggaaacatcagttatatgagggagagctctacctatacttcccagtaggatttctagagaattcttattattctgatactccgtgcaaaacagttctattcgctctcggtcaaatttacagtcttctaaataagtgcttaaagtagacttgtcaactcggtgctttcctgcctccagtatgtaagttgcagctgccccatgacaatgctttaaaa

SEQ ID NO: 2078 - DNA, 687 bp, Rattus norvegicus
  Genbank Accession No. AI178784
  misc_feature (1)..(687): n = a or c or g or t
ccagtttttatgaaaattaataacattaatacctcacagacatatacatacacacatccctatatacatagtcattaagttattaattagtctctgtataaaacgtttctacattagtgttccgagctaggcccagtcagtccttggcatattcacagtagcagccctagggcttggcccatgggcgggcagtgaggagtttacagaacggccagcccagcagtgagcacagatgtcctgggctgctcaccctccagtccttggtccctgtcttgacataggaagaacagctgctcagtgcaagggcaaaaagatcccatgccctaatgctacctggtgccccaggtcctttgtgcggtggcttcaggcaacccggcaagtcctagagaatgctggccagctctgtggagtctgtatccgagcagcctgagctgctggcttcatctcgtaaagcctgcagagctttcttgttctgtcgccgcttctcctcatcaatggggtacagcttgaagagcagcaggcccagcaggatgaggatgataggagccatggtcaccagcatcttcagtgtaaacttgacctcttctggctgggagcacccctgcgtctggtacttagcanagtcgagactgagggtagagacacccagtgagactccagaggcaaacttggtgaagaagacataga

SEQ ID NO: 2079 - DNA, 700 bp, Rattus norvegicus
  Genbank Accession No. AI178793
tattttattagagatcttatattacatattcccaaaaagttataaaaatcttccaagagaaaaatatcaaaacctgttgatttcaatgagcaaaataatcagaatgaaagtaaacattttcttctagacaaaggactgtgaaaacatttcagcacaagtacagcaaaagacacacgaaggtgatcacaatgtctcagaacaccatacagccttttgtttaaatcgatgattttagaatgctgatatttgaaccatgggcctccaaattaaaatttcaggaagtggggagagggtagtgagacaatcgtggtccactgaacgcctgtgaaaacagatgtgacaggcctaaccaaacagacccctgatgtcatgtctgaagtgtggctggctgtccacgagtgtccacagacactcaattgtttagttagttcgtgaccataatccaaagcaaaacacaccctctcttcatttccctgatgttggtaatgtgaaagtaactttaaaaagcagaaacttgctggttaaatagaatttctgcttcacctgtgagtaagtagctggtggcaaggacacagggtaggtccgctgtgtctgctgttttcctttttcatttctgtcagcctctggtttcctttggcttcatcaggacttctgtggtgattaagcagagccacttaaccacagagcacagtgaacatcc

SEQ ID NO: 2080 - DNA, 562 bp, Rattus norvegicus
  Genbank Accession No. AI178819
acccattaatcagatttattatcaattcaatttgaaggcaattttcaacctttaataagttatattcatatctgagattgtttaagctttctcatggagaaaaagaaaccaggcagcagctagagctgcaacccaagttttcttctgctcatccttaggcatttgtactgtgtggaccgagtgactggggccaggtcttctttctatgaaacagagtcttactgtgcagccctcgctggcctagaactcactgtgtagaccggctgctgcctcctaagatctgagatttggttgatattgtcctctagctgctctggctcgttactgggcagctgatgcacaatttcttctttgtaagatgccatggcttcttcatagagaacttgaaaaatctcacactgaatattatcttgtagtttcttctcgtgataaccccttgtttcaagtcgtttgtacaatataccattgtctgtcctcaacacgaacactatatggaaccagcgttcaggaaagaaatcacaaccgtggtaatcaacgatcacgccgccctctgtcatctgag

SEQ ID NO: 2081 - DNA, 603 bp, Rattus norvegicus
  Genbank Accession No. AI178828
cagagagtaaacggtgtcatcatatcaacttggaaacagttcagacagggcccggctgtgggcctagggtaaatgtggcttttatttcctctcagggaaagaagtaaagggtggctttcccaggtaccccaacctaaggtaaggtgggtgtgctccagaggttggggctagaattgccagatcattccgacagactcctctgtgtccactcgctggcgcttgatgcagggagggtgtaggtgagagtcattcccctggagtagcagctcagtatcaacagaggcacaaggaggtatgtgctggtattcacaaaatggaaggcagagcaggtgccctgagtgaggagcaggactgggtggccgatccacacccagtgtctgccgggtacaaggcctgactgctgtggctctcctcccaagggccccaggggcccagaagcatcactgcgtcctatggctggtcccttaaatgtccatctcaaactgtgactcttcaccacctgcccgcttatcttccgggctgctgtgcagatggctctggctggcctgcatgggaggctcatcgctggtagggctagtgacccctggaatggttggcaagtcc

SEQ ID NO: 2082 - DNA, 535 bp, Rattus norvegicus
  Genbank Accession No. AI178830
ccaataccatggctaagtttattatctctgctctcttctcatacaaaattaaaaactttgaaagccaggcccaggtggcagcttgagtcctttcatttggtaaaactgagatgcttgcctggcctagctggattgccaggtccagccataggctgagatctggagaagggaccagacaaggcgtgccagtaaaagcccccagctggagtagccactttgtccctgagttgccgttcacattgagaaggctcagaccgcagagcaatggcgaggctgtgaggttctggggtgcccaggaatttcccagcaaagatgcttctagacctttcttccttggcctgccaactcctttcttcatcgtaactctgtgctctgggtcccacttgccagccagcttagggaagaattcttccaggagacgcccaggcgtctgtttgatctgtctaggcagaggaggcaatgatgcccccggggttctcagaggaaaaatgtgattcgggatgccactgtcttgcagccattggagcctcgtgcc

SEQ ID NO: 2083 - DNA, 380 bp, Rattus norvegicus
  Genbank Accession No. AI178850
cactgcaaattgtttattaaaacacaaagcaatggacagtgaaaacatcctgacttcttactttttggtgggagtgggtggggcatggaagggatagagacggatggagacagcccagaaggagcgacagctctacctacccctgctgctttcctggccagccaggttcaaggtccctcactacaccttgccacgctgctgtagatgcatggcgtggccgagtcaggctggcctcgcagggagagatggaaagaataaagcgctacaaaggctaaggacttgacgcctgctctccagaactggattccacacaaagcagccaagttcatactgagggacaagccaggctgggccaacagtggttgaagaggctaccctga

SEQ ID NO: 2084 - DNA, 667 bp, Rattus norvegicus
  Genbank Accession No. AI178902
acaaaatatattttattttgacagcaatgcacacgatgctgtaggtgaggcatgcgactaggaatccgcatcacaggccagtgcagaaatcagtggaaataaatattgttcttaagtcttgaagcttcattcaaggtgaagacagagttgtgtcactcaactgggacgcagtattatacttccactgctccagacagccatgccgctgaccaagagtgcagagctatggtgatgactcttgttccgcagttcatgaatccgactctgatgctaaggtgacagtgtatgtaaggagatttttgttttcagtgaaggagacctgggaaaagatgggtttatcttttttcttcaagagttatcagatggtacatgctcctcaaagccttcactctctcgaactagtgcacgttccaggatcacacggccttccttataacgctggctgtcttcagtagcaaactcatagatccatcccagtttgctattgcagtttttgcagctcacatctcgaaccatgtggcggccagtgagcatgacccgatcttgaacttcactgtactgcaagttaactaccttgttaaaaagaaatgctctaccagtggcgcctgtgaaccgagtagagatgagttctgagcgattggtcaggattgtatcacagtttgcacaa

SEQ ID NO: 2085 - DNA, 712 bp, Rattus norvegicus
  Genbank Accession No. AI178912
aaggacaatttactctttattgattaaaaatgaaaaaaaaaaacatgcagtaaaatacaagtcaagagaagagggagaaggtaatattttacatctttcaccacccagcaaacctcccaaggaggaactgacattcctggttcattcttgtgttagccttcaggttacgtatcagtctcagctggctctaggatttggttgaaaacagaagggaaaacacaaaaaacaagaaccaacccaaatgatgcctttatcatttagaaagactatttcacacattctcttggctatattggcacacactatcttgtgctatagtcagtccctactccagggacacgggcatcttgaggacttaatggcagagtcccctggaagctctgctctagctccctggcttctgagctgtcccatctctgcagtttccgccgctgactggttctctcgccatcactgcataagccagcagaaggaagtcaccacacatcacggagaagtaacattgtcctgggtcttagtgccgacctcctccttgccaaaaaagcaaaccatgaacagaaaaagagccccaggccacttttactgtcatgtctgtcccctcacagcaaggcaaaggtgatgatggtctagagaacaagagatatgctgctgcttacttccaacctggcactggagcaacccctaagtcgaaagccagaacagtgatatccat

SEQ ID NO: 2086 - DNA, 556 bp, Rattus norvegicus
  Genbank Accession No. AI179039
cttaaaaaaaaaaagtttatttagaaagtataaaccaattgtaccacttttgagttttcttttaatacaagactcatgatgcaaagctgacgccactgtgagcttggccaatagagctgcttttcacggacagctatggcccacacatggttaataacaaacgttcataatggttggcaggcgcctctgcgcctgatgcttaggaagcagacgtagtcttgtttcgagcctccttgccacacattttgtgccaggtgttgacttcaccctgcttatggggaggtgggtgaagggctgggcacaaacatacggtttggaggacaagacagacaggggcatggcgcgggctgcatctgcagggttaagagcagcagtgtctgataaccaggacggcaggaacggaaccggaaggagctgtgtgacatccaaccttagacgtcctgccgactgcagtctttggtcttgaggtcaaatgaatcccactgctcatactttattagaaagatggtcagcctccttgatggtggagattatagagcaagccgctaagaggact

SEQ ID NO: 2087 - DNA, 552 bp, Rattus norvegicus
  Genbank Accession No. AI179049
ttttttttcctccaaatttactttataattgggtggatataaattaatgaacagaaattaagcaagagatacgtgaccatttaacagaacctgataatctaatttcagtattttccaagttcatctttaagtatttccatcatgggatccactgggaaactaagcaaggttatgaacactgaacagttaatcgactgaatgtcaattaactatttatgacaatttcttccataacgcaattatgagggccttcaagaagcttttgtatgtaaaaacgtgttagtcaagtactcaacacaatataaaagaacatcatttcatttgtaaggtggagtgcttctgttcatcatttttaactacaatgtcactgagtagaaggaacaaattacctcgagaacataaggaaaaataaacacatgctaaatggataaacattacatctttactagaccatttctacctctaatccttcagacgtgtagagatttagagtgttcttacattaattgcaagataaaggagaagttcctttgagatcacaactataaagtc

SEQ ID NO: 2088 - DNA, 585 bp, Rattus norvegicus
  Genbank Accession No. AI179075
tttttttttttattgagcctggtatttctaaataattacattttattttatgaaaagaattcattacagctctgaatgcactgagagggaaaaaagcattacaaaagtctagttcaacaatgggagcagaacttcaaaaggtggacactcaacactcattcttaaagacaactcggcacctcaagactttgagataagtgtcaatcttatggatgtcacttttaaagcagcggcacagattataaatggcaaaaagatgagtgtcttcatcagatgactgcaagtctttgagtccagaccaggcagggtagtcaaaattttcattttcttcaaccttagtctgagtcctgttgaatattttctgaagtccctccagaattataagatttttgtccttcatatcaacagcttttttcctcatactagcagaagctcccggaagatcagtcactgcagacacaaagtgtttgagaggttctttccaggaaactgaaatattgatgattgatctcagaaggtcttcagttttaatttcatgaacttcctctcgattctctggaacgtggatggaagcaatgtgacaca

SEQ ID NO: 2089 - DNA, 443 bp, Rattus norvegicus
  Genbank Accession No. AI179092
agagtaaaatgatttttatttgctcaacaagtctgattttaggtttctttagcatatttccattttattaaaagcaaaggccaattagtcctcagactctgaaccatcttcatcttgactaatttggaagtaacgaagttcgtaagtctccttgtcagatgcgaccacacgaagccaatcacggagattattcttcttaaggtatttcttggtaagatatttcaaatacctttttgagaactgtttctcagaaacaactgtgattttattcttcaggcgttcaatgtgaacaacatttccaagatttccagtttttccattgactttaaccttctcccgtagaaactgttcaaaatttccagaatcaaaaattccatcttctactggatgagtaaggtccaaatgaaacctccaggttgacttcttaggcttctcctcgtgcc

SEQ ID NO: 2090 - DNA, 445 bp, Rattus norvegicus
  Genbank Accession No. AI179093
cacacccagagtacatgacctctgtacaaagaaaaatagaaaaggtctggacgatcacatttgtttacgctacataatttagaatgaacactactggttgggtttttctgctttgtaacctaatgtttttagttctgctgcatttgtggcacgagatctcattttccttccttacaggtaaggacattggcagcagcaacattacaatttaaaggttaacaggttacagatgtcctaactgtactgcgaaagatcttttcctctcccccctcccccttcacttcctccatgacttcctgaaggaaatgtaggtacttttccatggggtggcccgttttgagagagcacaaagacaaggtaacatagttctagttccctcacactcatctgacaagctgcttactgacactcaagacagtgtcttaggcctaggacagccattttg

SEQ ID NO: 2091 - DNA, 467 bp, Rattus norvegicus
  Genbank Accession No. AI179099
ggaccatttaaaagagaaatttattgcctcaatattctgggggcctggaagttcaacatgttagcaggttgctttctcctgaggcccctttccttgttgtagacggccatctttctctgtgttcacatggtcttcacttgattctcacctttgtcctgatttcttctgaggatagcagtcatatcagattaaagcccatgctaaggatgtcacttaggtatttatttcccaagacaccaagacagtcacgttctgaggttgtgggaactgggacttgaactgaagaactaaagctacaggatttgcctcttaagagaatggaaatgtatttattgagataatatacttaatagcccaaatgaacaaacttactgaaaattttaaccataaccgagtaagatgtataatagattcaaatgtcttataaatatatattatgatattttgaagtgccttttcctcgtacc

SEQ ID NO: 2092 - DNA, 429 bp, Rattus norvegicus
  Genbank Accession No. AI179100
gttatggaatttcttattaataccttaaaaaatttaaaaacataaaaaaaccccaaaatcaaaaaacaaaaaccctctcaaatgcttaagatgctgaacctagagaaggagctaaggatgcagccaaaaggaaatgatttaaggacagagggtgaataaagagagcaaaggtggaagaccatgatgtttcaaagctggcaaggttggcctcaatttcttttcttctgtctggatactggttctgcttctaggtaccggagcccaactagcatacccaggattgagaaacttgctaccatcaagggtgccagcacaccaactgtgggagccgctgttccaaatacaaacaactccgagaggaagtgtcccagggcaaggaggaatgtccacagtgtgatgtgataaagtgttttgttgtggatgtcaatg

SEQ ID NO: 2093 - DNA, 513 bp, Rattus norvegicus
  Genbank Accession No. AI179150
attaatttcattttaacattttgtcttcaacaattccagagattggtatgagaatgaggataattgaaaagtagctgatggaggctagttggccaataatgataaatgggtgttctactggttggcctccgattcatgttaagactaggaggttggctactaggattcagtaaaggatttgggtgattgggcggaatgttaagctgcgttgttttgaagtatgcaggaatggtaggaaggctaagattaggattgataagattagggctacgactcctcctagtttgttgggaatggagcgtagaatagcgtaggcaaagagaaaatatcattctggtttgatgtggggtggggtgttgagggggttagcgggtgtataattgtctgggtctcctagtaagtctgggaagaatagtactagggttattatgaataatagtaatataaatacacctaggaagtctttaattgtataatatggatggaatgggattttgtctgcgttggagttta

SEQ ID NO: 2094 - DNA, 261 bp, Rattus norvegicus
  Genbank Accession No. AI179167
tcggtgctcgtgtaaggtttttcttttcccctcaaattttatttcaataaaaggagacttgggcgaggtggattccccatagccggattctccccctccccccgagggtggctaatgctatctggggatgtcttcacagggaagagagaactatgggtgggctcctgcctgaggtctccaccctcagcccagcggacatatcacaggcagcttaaaaaaaaatcctaaaaaaaccaaaacacacatttaaatcctcgtgcc

SEQ ID NO: 2095 - DNA, 557 bp, Rattus norvegicus
  Genbank Accession No. AI179190
gaatcagcattgttttatttagggcagagctggggaagtctatgcccatctaccctcttcctcctgtcacttggtcctaccccaggtcaaggcactagaacctgctggaaaggctggcgagagggcaatgaagatgtgtggggtttgtgggcctttgcctcaaaggagcttccattcccactccaaatctggggagctccagaactcttccaatggaatcatagcttttctggtccttggatggaaggctgagagaagggacccgggattttcccttccctaaagcccctggaggtctatgaaagagacaagctccctcccctaacacaggtacaggggtagcccctcaggagaggagtgccaagtacagaggatagaaggtctcttgagtgaagcccagaacatgttcaatggctttggttcgaagcagatgccccacatgcttgttcatcacaagtgttgttccctgtctgacatagactccaaaaatacccagctccgagatgcactggaccacttgggcagggctggcaggccgtagtaagcaatttctaaaa

SEQ ID NO: 2096 - DNA, 505 bp, Rattus norvegicus
  Genbank Accession No. AI179234
tttttttttaaaacgaaccagtttaataacgctgctagcttatgtgagaggcagcaacgtcctcacacacctgacaggtggcagagtcacacagtgctcagcaggggaggggctggtgtaggaccttcatcttccatttctctccatgacagttgactccaggtaatctttgggactcaggatgtgtagctgcatttctgttctgcctggctgtgtaagtcgctctgtggcttaaaggagccgggacatcagggagcttggtatcaccgtcattacaacttagtcaaaggccgtttgccacaacgaccggcacagaagggggaagtgaagaggaagaaagacgtagaatcatcaggcttctgattaaatgtctaaggaagctagatccagatgacaccccagctgaaaggcgaggagggcagggctccctcccccgcagcagtccaaaggggacaggctggctgctgtctggaaacactcaaggtagacgtctgtccctcgtgcc

SEQ ID NO: 2097 - DNA, 570 bp, Rattus norvegicus
  Genbank Accession No. AI179243
ccagttttaaacactcgtctttattgacaaaataggctcctcttcagcacactcaagtatgtaagctgaaagctgttttttttttggggggggtgataggagggatggaaaacttgctaagaacaatgcaaatgtctttcaatattcacaaccttaaacttatatccaagaagacaaaggataaataatttttttataaaaataattacttctgaaataacatttcacaatagaactactcactccttgattctgcctcatctcaactgtgtagcctttcttctaagattctggcctgggaccaaactacatgaaagaatgaccactaaactaagggacactctccaagaaccaatagaaaagtcttagaaataaattcacctataatataaaatattaaggcctctgcatgacaacggtttatcacctggggtactggacctttcctacctgacctatgaccccactcacctcaaacttcagaatgaaaggttctcaagtaaaagtcctatgaattttgccaatacatgaaattacacataacattacactgcaaagtaatatgtaact

SEQ ID NO: 2098 - DNA, 555 bp, Rattus norvegicus
  Genbank Accession No. AI179253
ttgcaagcgtattcttttaatgactccagtaaaattaagcatcaagtaaacaaaagtggaaaagaacctacacttttaacttgtctcactagtgcctaaatgtagtttaaaggctgcttaaattttgtgtgtagttggattttttggaagctgaaggtatccatctgcagacattgaggcccaagttgaatttggattcaagtggattcttaacacttctgcctgtgctgaagagaagcttcataaggaacaagcaagttgaatagagaagatagtgatcaataagaggcatttagtggtctttttaatgttttctgctgcgaaacatttcaagatttattgatttcctcctcccccattccccccaccacactcacacacgcacgctcacactttttatttgccataatgaaccgtccagcccctgtggagatctcgtacgagaacatgcgttttctgataactcacaacccaaccaatgcgactctcaacaagttcaccgaggaactcaagaagtacggagtgacacctttggtccgagtttgtgatgctacc

SEQ ID NO: 2099 - DNA, 547 bp, Rattus norvegicus
  Genbank Accession No. AI179264
aaatttctccaaatctattcatgggacaacagatacacatgggtataaataaaatgctcatacaactagttagtgtggtgagttcctgggcatcctaacaggcccgtaagcaaaggctggctctcccctactcctttttatgtgaatacagacaggagtccttgggctgaggacaccccatatcctcacacctaacctgaatacctgccctgtaagatgatcgaagaagggctgtgggtagagagccatcctccactttctgtaagatttgcttgcaggagaaggtcggagcctgagaagggcatctctgaagaaagatcaaggagtggccagtgcgggggttgctctgcttgagccatgtggttcaggcaggaaacattgctgggggccaggaatgtatgttctgagctctccaactggtttgtgctgcccattggtagctctggctgtagggcagacagcttcggctgatgctggtcctcgctgggcaaggcacgaatcttgcggtgcaacacaacatactcagcgggcacactccccctcgcat

SEQ ID NO: 2100 - DNA, 493 bp, Rattus norvegicus
  Genbank Accession No. AI179300
ctagatttaattactttattaaaccgacatttctgtaatcaacaacaactacttagacagacccactgctgtctgattatgtccataggtcaggggtgttctgcttacgcatttggtgcctcataattaagttcagctaacactagggcctatagtttgctgtcagtgagaccaggtctggtcttgacagtaaagccaccatcaaaagctgcattgagaacttcatccaggcagctcgctgtgacaaaacttagatcctgtttgacgttgcttgggatctcctcgaggtccttttcgttcctctgcggaattatgatatgcttcagtcctgctcggtgtgctgccaggactttgtctttaattccacccaccggaagaacaagtcctctcagtgtaatttccccagtcatggctacatctgagcgcacaagccgcccactgaagagtgaggcgagacaagttactatggtaacaccagcacctcgtgccgaat

SEQ ID NO: 2101 - DNA, 602 bp, Rattus norvegicus
  Genbank Accession No. AI179329
ttttttttttgttgctaggtataattttattttatataaaatgtgttcttcagagcccaggactgctgcagtggttagagggacctgccctccgtaggtctagtcactcctcctcttcccacatgcgttcagaacctagactagaaaagcaaggaggaaatcagagcaagagcttcaaacccttgccaatccagttattctgtgacctctggggtcacgtataaggtcagcgtttctggtccacgccggatccgcactgccagctgtgattgggttcgaacagcctcataaacatcttcagcattttgtatcattttctccccaatggccaagatcacatcagcaggccgcaggccagccctgtgtgcaggggagcccaggataactttatgaatgaggacaccatgctgaacatcagggaaacttggctctcggagctgtagctcagcaaggatgctgggggtcagagtcagcatcatcactccaatgtagcggcgttgggacccactgattccaaaccaggaatttttcttctccccgcgatgcaggaactcccttaagcgatcagaagggatggcaaaggagattccagctgtcacctt

SEQ ID NO: 2102 - DNA, 626 bp, Rattus norvegicus
  Genbank Accession No. AI179335
cagcacaataagatagtctttattatattttaaactagaaacagcagatagcaagctcacgaggtatgatttgataattttaaaatgagtcttcaacaataataatcaaagaataaatcttaactgcacagataatttggtcactgttacaatctcctggggtacaagagccagcagcataaagtaacataaaggtaatgacaaagaactcctgatgtgccaaagctacaggtcacctcattaaaccctacctttgcattcttgtcattacagttatttagcaaaaatgtcagccatgcacagagtcctcatacaagaatcctgtttcgctgttgccactaatactaaacttttccttacccccaaaattcaatgaattgcaattccagtgtttatatggattgagtgtcaatggtaatatgtgaaattgatttcacgttcaaggttaaatggcagactgactttgcatttggtggtcagctgtgtatcctaatatttatctttgattttattaataaattgaactatatttcataagccctgagatattagataacctgctaatgattgttcactttacatgtattttctattcttgtcctaactctacttaagtattttaaatt

SEQ ID NO: 2103 - DNA, 579 bp, Rattus norvegicus
  Genbank Accession No. AI179355
atttgttcaggttagagattgcaatttaatttctgcttgtcctttccttaagatctacaaattctgctcctgtatcagtccagaacccattaccatctctgaccaggaaagggaacattcttcttcaaaaggagggagggcagggccaggcagttccccacagaaagcaagagtgggtaactccccacggggcagagggcatgaggactaacttgatggttccactccaaggaaaacccagaaaacactggcaaaggcagaacactggggtattctcaagttgtccccacttcctgtttggcattccaggctttggaaacctgcgggatacacacaaacagtacagcaccgaacagaatctgacggcagcatgaagaagccaagaaaggctgcacggcagtcctcaggcctccttgactcccgcacaacagttctgtctaggtgtgcctccatgatcacacaggttatgcagaaggttgctaagcagcgaaaggagagccattcgggtcacagagcagggactgcagggcaaggttcccaagaacaatataaggctaaactacaaagacctgtagtgct

SEQ ID NO: 2104 - DNA, 550 bp, Rattus norvegicus
  Genbank Accession No. AI179357
tttttttttaacagcaagaggtagctttattaacgagatcccaggtcttagcgggatcccgggtcgacacgtatctcacacaggagacagaggaatcgaccccgagcctccagactcgggggtttatataggggaggttaggggcattcgcgaggttacacatgattggtcaattcaaatggtgcacagttactttcggcgcgaaattacatcagcaaggagtacgtgctctccagcagctcggcaggcaggtagggtgactcatctcactcaggggggtgaaggaaggggagggggtagctacggatggtcagtgtccttggggctgatagctggtttggcaagtcctatctctggctctccctcaggcacgtcccgccctgcacatctggactctgacaatgagcaacctttatgaaactctagttctgcacattcgggctctgacaatgagtaacctttatgaaactctagttctacattccccaattctttttttttgttaatagttctaatcctagaacttcatggagaactcagccctcgtgcc

SEQ ID NO: 2105 - DNA, 632 bp, Rattus norvegicus
  Genbank Accession No. AI179381
  misc_feature (1)..(632): n = a or c or g or t
tacaaaataatttattacagcaaacacagcatcacaagactatgtacaagcacaaagcacctgactaccctattaaggaactctcttcttcccccttgccttacggacctcttctatcaggtcttttagatactgaatctctttggcgagagaatctgccttctctttcagagcctcgttcttcttttctagctctttacactcgccagtgagggcttcctgctcagccctcttcttctggcggtacctagtagctgctgtcttgttttgctccatctttttcagcttcttatccaacttttcagtcttcactttagctgtcacactaactccaggtgggtcataaggtttgggtcgagaaccacgaggaacacctggagaaggcagactgtctggtggggccctggaggtggaagggctgtgttggggagagcccaggtaggactcagggctcatacagatgccactgtcactatcagagggagtgtcttcctcctttacacactgaagggttagagtaatataagcagcagagtcaggcttcctatctccttcagagatatcaacctcacttcncagctctaaactaaaggaatgatctggagtggaagacagaaacctggggaacaagg

SEQ ID NO: 2106 - DNA, 668 bp, Rattus norvegicus
  Genbank Accession No. AI179422
ggttattgaatatgtattttttaactgaaaaaatcattcataaattaacatacagaaatgtacaaacacatgagtgaacaatgtaatgacaaggaccatttctgtgaaaagtgtttttaaaacatctttaggcttcagtgcaaaaatgtccccctggcacctttaaaacaaagagcaagctcagaacaaagacagtaatggtggctaagccagtggcgtcagtgcctcgtcgatggtatgcacagtcagtgtgtgctctgccgctctgaggaaggaactcgatgacaggagtccccattttagcaaaattaaagttttgcaaatcccccctccccaaagaaagcctgtgcggacagagaccttgcacacacagggcagtcagtcaagggcaggtcggcttaagggtcactcgtctgtagcatggagtaatttcagctgccaaagtacaccaaggtcacacttgattctcaatgtcattttctttaagcaatgacctaatgtgtggtccagtggtgtggctctgactgtgacatttcccactcggtatgtgactgggcggacaatgactgacagtgcccacaagagtccacactaataacaaacttggacatgattgcaagggaacataagtgacccgacttgagcagtaaaaagactttctttgtccc

SEQ ID NO: 2107 - DNA, 599 bp, Rattus norvegicus
  Genbank Accession No. AI179426
  misc_feature (1)..(599): n = a or c or g or t
ttttttttaacatttctaaacctttattaccaattagtaaaaacagtgatggcaacagcagtgacaagggggagagtcctcccctgccagggggccagactctgcagcgccctctccaggctgggccggctctggccctgacaccgcaggcataaccttggccacatctcagcagtggaaaggtcttggacaggatgttggtacttgaaagccatcacaggacaatcttaaaggagctggcaaagtctggtgagcgagagatgacgtgctggaactcggagagattgatggtcccatccctgtcaatgtccgactcttccaggatattgtcgatgagctgcttcatctcagaagcactgagccgagtgtcctcgccctctcccgtgaggcagttcacaagccggctcaggtcttctctgtccagggttccatcatcatcaaagtcaaagatgcggaaggcataatgtgacttgatgtctggggttgctgtgtcactgaagacactcaggaggtccaggaagtcctcaaagctcaagctgtctctggtangcgacgtggagaagacatgcagattcgctccttgaaggggttggccttga

SEQ ID NO: 2108 - DNA, 528 bp, Rattus norvegicus
  Genbank Accession No. AI179441
aaccttcaacagaatttttaatcgttcaaaaactcttacagggattgactgggtgttttttggttaagttggttggttggttttccatttggtttttccaaacaaggtttccctgtgtatcctggctgtcttggaactcactctgtagaccaagctaacctgctgggataaaaggtgtgctccggtactggcctggttttgtttttgtttttgctacttccctgtaaggagatacaatttttcgaaaaagtagtcgactccccaagttttatgcctttcttcaagagcatccacctcctcaaggcattgcatgttgcattttgtaccaaataactttttaagttcagcatctggaacataaaatggcgggcctgtgtgttttgttggatcataagaaaggacaaccacgaggtaatgatacccttttctcaacagggacagtattatatctgcataacggtcacgatcgcctggattgacagccaccaatgctcctctatcccaaatcctgtcaaacttgccgatgtt

SEQ ID NO: 2109 - DNA, 567 bp, Rattus norvegicus
  Genbank Accession No. AI179464
aaagaattaacttttatttttgcttagttttattaaaaaaataaatatgtcataaagcttttgtttcctttagggagaaaaaaaggaacaagttccataaaatcaaacaagcaatggtaacatgtctaacttgaaaacgattggggatcactggtttacaagttataactgaatgaatgattgctacagttgcccatttcctcctgccaatggcagcaaacaacaggatcaactggagcaaaataaataactgtgtggaagccctgataagtgcttaaacagaccgattcactgagacatctgtacagctatatcttgctttaaataacaaagaagttcctgtaaagtttgggtaaatgagataaccacaaacatacaaggagagcttggtatctgaaggacttctgtggtttattttatcaacaaccacttttcactttactcaggcttttgctttgcttagaagtacttactactgctctgaattgaggcaacagaacattcacccaacagtgcttttgctgggccagtggcacaatttccaagtctgtgtttctattaaagtaa

SEQ ID NO: 2110 - DNA, 607 bp, Rattus norvegicus
  Genbank Accession No. AI179481
taaatttttgctaaaacacagaagtaagaactgtttttgagggttttttttcttttttaaccccttgggcagtgatggtggggacttggggatcagtgtgggacccagtgatgtttgcacaaccacaggaaagtgctgattgatctgatgggggctcagcgtacttccggatgcttggcgtgaagtccgtgattagaattcaccaggggaagtcacagagagttctagcaaagacaaaaggcgtggtcatcacaagaagccgtggatgtccgcttctaatcctctctcgtctcctcccagggaagccccccgaatcctgaaagtttccgagaattccctgaagtaaagaggctgctcttggggaaaaactgtggcacccacccttgcccaccagcagcttctacttagtcccatcgtattatgtactagaaacatagctcagaagaaaaaggctccaacgtagtgtcttcagcttgcaatcagaagagtagactttcctttatcgcgtgcttcctgcgttgtaatcaagttaataatgtggaatggatttctccttcagaaaggactgactgggacagcgactgaccccgccccagaagactgctac

SEQ ID NO: 2111 - DNA, 490 bp, Rattus norvegicus
  Genbank Accession No. AI179560
cagtgacgtttacattttatttacgtcagtagcactaaaatacattcctccttgagggtcacatttccacaacacacattaataccaatccacactccataagtgcccacacctcctcccaccaaaaccaagcaaacacagcaaacacttcatggttacttcttcaaaacccaggtaaccctgtcccagctcctagctacagcagtgcccataactcacagaacttcccctttccatgctgctggacccatctcaagctcaccaacaccctttacaaaatcctcactgccaaggggacaaagttcaagcaacagaccctcatggccaaaagaaaggaacacagccccaaagaggcacgtgcagcccagaagtgagatggcatctgaactacctggtgctcagtgcaagccacaggttaggtgacagcgtggcatgggttgggaccggatgaagcttgtgaaggggccattatttgcattttaaagaactg

SEQ ID NO: 2112 - DNA, 463 bp, Rattus norvegicus
  Genbank Accession No. AI179569
  misc_feature (1)..(463): n = a or c or g or t
ttcttttagagaacatagctttttgttttgttttaaatttattattgctcttttcaatcttgattcagaaaatatctcaaagagcttaacaatgctaatgtgtcctgagctgagatggttcgctgaaaggtttttccagttgaggtttcattagagacattgctctgtggagtccaataatgctctgacatcttcttttgtaaccattgtacagcccaactccagtggtgggaattctctttgaagtattctttagcagcaggacacttttgagcaagagtgacaagaaatttgacacactggtagcaacgactgctgtccacatgattactgtggtgcatcaatgctagtaatccattttctgtctcaaatacaaatttgactcgctctacttgtatgggatcttccatgaccagtatctcatgcagtagctggaatgtattctttaactcatggngtggag

SEQ ID NO: 2113 - DNA, 564 bp, Rattus norvegicus
  Genbank Accession No. AI179570
ttgaaaaaaggttattttaaatggatacaaagttgaagtgtgaaatgttttcaaaatacatttctacaagttacttcttagtgaaagagcaagtatttgttagcaaaagcagtaaaactgaaggggattagaattgtggctgcaagacctcacatgtacactgccatccttagatgtcagctggtcctaagtggcacccttaactcacaaatgggactcacactgaatgcttgggaattccttcctttttgttggtttttgtttttaaatctttctccaacaaaactaatatcaaaataagccaaacaaaggaccgcacgggtccactttaaagtcactgacacttttcctcgtagggacttcacacagtgaacttccctgactgctcacagtgatgcgacgtgaagaggcaaagtgagcaaatgcatatcctttgtaattgataaccattcttaagcttcactttattcgtcctattgatttttggcctgaattaaatgtaaatccctgcctcatcatcaatcaggcacttcctcctgcagcatatggaaacacacagctagc

SEQ ID NO: 2114 - DNA, 472 bp, Rattus norvegicus
  Genbank Accession No. AI179601
ctcagaacggcatatcaacgtatttattcacagccttgttacaagtgtacgtccatctgtggagttttgacacactttaagtcacccatgcctcttaagatccaatttccaaatcatcgaggacatccttaagccactctgtgctcccgcgtgtcgttctggaagttatccgtcagcttcagacacctaccttgtgacttggatgtccgcgccatttccgcccagttgtgcgcctgggcatgcggcggagatctacgtcgcaaacggagctcggcttccacaccgacccacttcacgcggggtccggcgggccgtgctcctcacgcggccaccgagttagggccatcccccgatttcccgggaaggggacgtaggccaaagtctaccgcggacacgctagatagcaggccacagccacctcccaagccccagctaccaggaaacccatactacgcgccgcgtgcctcgtgcc

SEQ ID NO: 2115 - DNA, 613 bp, Rattus norvegicus
  Genbank Accession No. AI179610
attagataatgccatttattatttcacacagaagttagagaccaaggttacaattattaaataccacccacccctcaaaagacagccctacttggttagaataaaaaaacaatcgatacaacaaaaaataccattacactggtagaactggggaaataacaaaaacaagacagaaacacaagacagaaaatctctgcacactgatatcaaagtggccatgacgctgggggaaagcagtcatggtcagtcaacatggacgccgactaccaagggcactgggctcagaacagccgcctctaccgaccacagttctggggctctgttgcaggatttggggctgctggtttccaagttcaggcccctggctgtgcttttggtgagggaaatgtgccaggcatctccttccattccagagagacaaaggaagacacaggaagggggcgaggaaccccaaaagctttcttagaggcccaagaaaagagagccaggcaagattctcccctgcagagagaaggctacatgagacagagttcacagcctctgggggccaacactgcatttacatggcataaattcccactgccacggtcgccaacaggaaactgagtgttga

SEQ ID NO: 2116 - DNA, 410 bp, Rattus norvegicus
  Genbank Accession No. AI179612
acaaatcaaaaggctttatttcgtattaaaataaataaataacaaaaaactactcaggcttagccccgccttcctcccaagtccaggctgggaggagggatttcactgggaaggggagagggagtggccacatcttgctctctaaggccatcttgtcctggcttcccattatgttcatcaatatctgaaagtccccaagttttaggaggggaactttgggcttccacatcaaggcagagcctctgggctgcgttactccattcaggagttccatttccttcagtctctcggggaggtaggtgattttcagagaccgggggaggcgtcaacagagcatcagcctcgatctgggttgctcctgctactgtttctgccaaccaggcctctgagacctcgggccccctcaggcg

SEQ ID NO: 2117 - DNA, 574 bp, Rattus norvegicus
  Genbank Accession No. AI179634
acttggactcatggttctggaggcaggaagagctacgattcggagggtgagtgggaagcagcaagtggaagggagaccagcagaccttgccttaaagcaacctattctcagggttgcaagcccggcccagcaagagcagagaggctcctgagtctgagcatcttcttcagcccctgtgcccagctcacacctccccccacctcctcccacagtgcaacaggtgatggagagccacatcctcaaactgttccagggtaccctggggcctgcggacccggagtgaagacagcctgttgggaacccaggcactcagggacaaaccagtcagcccacaactggcttggaaggcagctcctggacagtggtgggaagagccctccccaacaggaaccaataaatctgtgcagaacttgaagggcttctgggtgcctcccagtggggcttcctggaggaagtaaccgccgatacttctcaccctgccttctcacccagcacccgcaggtggtagatgactacacggtcaaaaaagtcggtggtatcctcaaaagtcaacttcagccggtccacctccatg

SEQ ID NO: 2118 - DNA, 581 bp, Rattus norvegicus
  Genbank Accession No. AI179636
aaaggaatgtaagatttttttttaattatctcaatcagaaaagttataggcttattaatttttgaaataaaatattagtgacaattgttcccagataaatactaattgggataacatgaaaagatgaggtttttaaacagaagagaaatttcatgctatacaggtaagctgagacatgtagagcttgccaggctattttaccgaggagtacaacacatacacttctgagcataacccactctgattctgaaggtttctgcatttagcttaaaagatgtttcttcccaagaaactgaacttttctttcaaatgcagttgaccgaataggagaattgggttcataaaagggattcatggcgaacttgatgtatagatcgtagacgtcagtgaagaagttcttgattccatcttcttgcctcacatcgtgaagcatgatgagcctcatgtggccagcagtgacgaaggccgagacaaaccactcattgaacttgtccacagtttttaagtacatattgttggagagccacatgttttcgtcaacgaggtccaaagcagcatgagctatgaactggttcagatga

SEQ ID NO: 2119 - DNA, 418 bp, Rattus norvegicus
  Genbank Accession No. AI179795
tgtgttttttttttttttttttatttttttagtttatttttctacttaacttttaataaatgagaagaaacacagtagtcttgtctcatatagaacatttataatacagaacaatccataaagcctcatggtgaggtaggaacagctttggaaaaaacacacagtcatagaacgcacagaagttagggaaaaggctgccacactcgggttcgagatgagccgtaacaactgcgccgttggcccagaggacggacggacaggcagcagcagacaagaccaacacgagagcgtctcagagaatcagacacactaataataccccattgtgctgtttcaaggcagacccatatcatggccatttgtgtcttttatataaccacgtattaattctgttacattctcttcagcacctcgtgcc

SEQ ID NO: 2120 - DNA, 390 bp, Rattus norvegicus
  Genbank Accession No. AI179854
gatagtgaaaatatatttatttttttaatacaatagctgccagcaatatactggtgttgatgttccagagagaagaaaatgcaagcattttgtaaagagctttcattcctacccaaggaatcccatgaaatgctccaaggctgtccagcattaccgcctgggagtccaacttttatggcttgggactcaactttttttccttgataaaataatttgtttcccccactttgatcattacaacaatgaacttttcaaaagtctgggagttttgctaacaaatgcaacacagaggttctggaagtataactgcctagattctagagccggtccgcctgtgcacaaaccagtcagaacctctcaacagtataaactgctcatgagcctcgtgcc

SEQ ID NO: 2121 - DNA, 458 bp, Rattus norvegicus
  Genbank Accession No. AI179870
acttatttgaaaaatatttattggccttgggatgcagggctttcgttttataaagggttcaaaagtgcaaaaaagcccacagttcaacagtgcaagccactggcacaacccaacccggagggagagtcagtgcccagtaccaaaaaccgattcatttttaattaaaaatttcaaagtttatataagtttagctgtaaatctattatcaaaaagttttaagcatgtaagttgcctctaaatgacagggttttaaactgcaaatctgccccgagtggttaacttataaactggggcccttttaaattttacatatttaaattatccaagaagcagctgatttcaagtcctgttcaaccttccttttctgcttctgctctggctgaaaactgagaaggaacctgagctttaggtagctggaaaattcctcccgggtgtggctttatgtgaacatttaaagg

SEQ ID NO: 2122 - DNA, 516 bp, Rattus norvegicus
  Genbank Accession No. AI179906
atgtttgtattggtattattgcctctcgggtttacaattcagaaggaaaacaaagttatttatgtatcttctcatcaatgaaaccctcaaaactgatctaaaattccatatatgcttatataaataaatatatatgatgggtcacatttataaaagatgctcaatactgatccttttaagaccgaggtctcattatatggcccagactggcatcaaaattggtaatcttctgccccttcctctaagaatactgacttttgataaatgacctggtactcctagtatttctctgcaactgactcaactatgctataaaaaccttaataaccaactgaatctctttcttacaagcaggacatgaagccccagacttcttcagtctcctggcacagtggaaacatgtagtcagatggctcgtcttcccatgaataatgttcccatcccgaggccttttttcacataagctacagggcttcaagacattctggaaatcttccatactttctgtttctgtcc

SEQ ID NO: 2123 - DNA, 586 bp, Rattus norvegicus
  Genbank Accession No. AI179950
cgtagtagtttattggactccgacaaatggccacaaggcccacagcacccgtttgctcggatggaggctcaaagctgctctgaccgctgccctcaagatgctttcttctgcttcttcttttcattttcttctttctccttctcgatttcagcaacatacttctcaatttcttcaggacttaaaatcttgaggggctgatcccgcctcatgacagcaagttcaatgtttttgccacctgactggaccacttccagcagcgccttgatcaccagtttgatggtcaaatcgtctgtttcaatggcatcatctgtgtagttcttctccagaaattcacgcaccgacttggcaccccggcctatggcattggccttccaagcatggtatgtgcctgaggggtcagtctgatagagtctgggggtgccatcgaagtcgaaacccacaattagggcagagataccaaatggcctgcgcccattgctctgtgtgtaacgctgcttcagactggcaatgtagcgggtgatgtactccacagtcactgggtcctccacggtcagccggtggctctggcactctaccctggctctgt

SEQ ID NO: 2124 - DNA, 426 bp, Rattus norvegicus
  Genbank Accession No. AI179982
aaaggtttatatagattttattatattttttgtagaaatgagagacagaatagccagagccttttggaacttccaagatgttcaaaatggctacatctctggggcagagaggagaggggcaggctgtcaagagccagggctactgctcttgggagcagagagaagagcaggagtaggaaaaccttatgggtcatacaggaaaacagtagttgtaggagggaaagggaatcctctgagctggagcagcctggataattgtttatggtccctcgaggtccaacccacaaagacgccgccatggctgtccaccttgctctcaagccgagatcacagtaacctttagggcggcagcgaagcccgaggagaagctctgagaaggtgagcgcttggcggtatctccccgctagcctggaccgccctcgtgcc

SEQ ID NO: 2125 - DNA, 546 bp, Rattus norvegicus
  Genbank Accession No. AI179984
aaggaaaagctcttttattgcagaggctacattgaagctatcggccaccttcctggaatgtgtaatcagtcctccctccctctggggttttctgtagcgcactgggacattaagtgctgctggggtccaggattctgcctatgaagaggagggcccccgtgtccgtgtccctcagaacaaagatgaacggtcggttaaggtgatagtcgagcgggaaggtgaggcggacaggctggaggtctgggttagagctggtccctgccccctcctcattccactcaaaagctgccctgtgttccacttgggtgagcttcacaggtttgccggtaatcttgctgaagtcaggggactcaaacaaggactgtagcttcatgtcctgcaaagagttggtaacgtcgccttcatagctcagcttcagcttggggacagtcagcacagcttggatagtcttcagttctcggccaatgtcatgaacgaactcagaggtgaggctctcctctatcatggtcaagttctgggtcaccgtcaggggcaggaagaagatcc

SEQ ID NO: 2126 - DNA, 446 bp, Rattus norvegicus
  Genbank Accession No. AI179986
agtaaaggcatttaatttactatgcacctcagaaagctccaggtaaaatattccgaggaatatacacaaagaattcagaatataaaactctccatgtaattagtagtcatattaatattggaactacagtagaaaaaaatagctgtctcctagactcttccaggagcccaactgtgtagcgtcgagaaggtggagttgttctgagtgaccgggaagtccagatcattcttccagttctcctagcagttcaacaaagtcagtgatgtaccacttggcattgtccttaacctgctgcctgatcacgttgcctccaaagccaatgaaggcatcagcgggagggcaggcttccatgtctgtggctccgtctccaatcatgattattttcttaaagtgaaatttttcctttaaaaatccaataacctttcctttcccacctgactcggttg

SEQ ID NO: 2127 - DNA, 586 bp, Rattus norvegicus
  Genbank Accession No. AI179987
aactgtaaccagctttattaaagatacttttcataaacaatcatggtatttcaggcaggacatgggcagacagtcaacaatatacaagaactttcaaattcccttcttgtatagactaccaaaatcagaaatccactataaaacccaatgaagtcttcattcaatgctttgaaaggggaagtagcttagagtgagggttgacatttcacattaaggaagttgtttaacaactttccacaagccgaccctgactgtcaggaactgaacatggcagaatcaatctgaagatccacaatcttttataaaaggaaccagtgatcttccgagaacacgcgaagtcactgcaaagtccacgtcgcccaatagactagaaaaccaattttgggggtgaggctcccaacaggtctctggttttaagggaattaagtctatgttgatggtacagggggagggaacaggatatagaaatgaatttagagtttcctcagaccacaaggcctttttttggccttggtggccacctacgcaagaccaggatgtctctcctggaagccaagaggaaccttttgaaattttcaaggaaaga

SEQ ID NO: 2128 - DNA, 680 bp, Rattus norvegicus
  Genbank Accession No. AI180004
caagttgcaactcaattctgtactttcttaaacatgaccaagaaaagaattacaagtaataatgccatgtcaagaagaaactattaacagtgggctcggggaagctacacagtatcactgcactgcatgtgtgtgcagagttcagcacgtgccagcatggaaaactgtcttgcactgaggttttccaagaggtacaacgagcctgccaagaaacatctggtctgtactaacagcttgctgtcttcagtacaggccttcataatgtcagtcacgctgctcttgcaaaatcccttagtgtaaaagagttttcagtgctgataggtagggctatgatcgatgatgtgggattgaatccatatgcacattgagtttcatttcattgtcaagaatttgaacaagttgttgcatggatggaagatgtccagattccagcttagaccataccggtacatcatttaaagttatctcaaatgcacctgttgacatacactggttctcaatcatgttgctcaagaagaagaccatcatacatgcataaaccttattttcttggccccactgccagatgctaggagcttgcatgccgaaaaaagcaaaaggatctttgccaacaattattaagcctattaatactagtttgaagactgacaggaaagatgctatgtgtctataaattggtt

SEQ ID NO: 2129 - DNA, 632 bp, Rattus norvegicus
  Genbank Accession No. AI180013
gatctttctcaaacttgttcaatttattccggctgcctgaaacctgagaataacgatgcacacacagatttgggcccaaatttatgtggagatggaaatagccattgacattaagaggggaaactgaagcaggccacaaaagaagggatccacgaggaggacatccagcccagggctccctcgggaggctcagagacagttcaggaggtcacacagccccacaggctgcaatgggtatggggcctgggttggcatcaggaagtggccggaaaggcatttacaccttgaggttcagcctccgggggcaagttcccaccaggcaataggtcgccagagtcatcaccactgagagaaagccatggggctggcagcccacttcgcatcctgttccatagcagcacaccccctgcgatggccactaccaccagcattaaaccaagaatgattccgaccacaggcacagaagatctggcgggcgaatctaggtccacagtgagaggctgggccagcccctaatgctccacttgacattggtaatggtgttcatctccacgtttgacctctagcaatgaccatgcatggaaagatccatcaccattgggaccagtgctgcaattcccagagcctgaggc

SEQ ID NO: 2130 - DNA, 540 bp, Rattus norvegicus
  Genbank Accession No. AI180015
ggtttaataaggaattgtttatttttgagaaaaagatcccaaacatcaggctgttcacaaaaataacccatggtataactttagaaaacaaatattaagactataacactattttcctgtaagatgcatttgacatgccaaccccattcacaaaaatacatggttccattgggtagtaacagtcccactcgtgtgagggaaaacacacgcctctaatgcaaagctgctctcagggttacaagtaaaggagatgcctctgcagttagggaagcgactactgcaatcgtgaacgggaataactgtactccctgcataacgagagattattttggagacagttgataaaaaccatacaactttttattgttaagtcaaagaggtatcaaaattaaagcaaaacttacagggtaagacttaacaaaactactaaggagcatcacaggaagtgaaaatggaactaggcgcagggcaattatgaattaatgaacacaggaaggataaggagggagaacagtgagaatgtgcagaagattctagggg

SEQ ID NO: 2131 - DNA, 528 bp, Rattus norvegicus
  Genbank Accession No. AI180040
acattttaagattataaaaattggtttattgtaaaagaaattcaagaataaccagttaaattcttatctgcatgctacccactacagccaggaagcattaaacactgttggacacaacaagaagactacgttgaggctgtgattcaaattcagtgagagaaaaggtgctcgggtctcccacagtcagcacggagggtttgataaagtcagaggcactgtcaggcaccagggctgctggacattgaggtataaccaggcacaccatgctgagggagaaggaaggtgacacatttcactttgtgagggaggttaagcagctggaaagttaggaaaaactttactgggagcaagatgagagcgaagtctttaaggaagagaaattaagttcataaaagcttttctaacagtaacagggctctgctaccttttaccagcccatgcccacctgcccttcccctccccacactgaggctactctgcccacagaagatgtggtcctttgttctggagtttcctggagaaatatgg

SEQ ID NO: 2132 - DNA, 536 bp, Rattus norvegicus
  Genbank Accession No. AI180068
attgcacatggtcctttattttctgcagtggaaggcttccttcccacttgcagacctagaagcctcaggttggcagagtgacctcatctagacgtgatcaggatgttaggtagcattcctgggtagtgactttagacagatggcgctgacattatggctcagagcagaatggaaaggggcaatgaatcacaggacagctccaggcgcgttccagttactgctggatcaggacggagggctgctgaaaggtcccaagactcaaatgtcttcgtggcaggaggagagctcctggctagactcctgcacctgaacatgactggttgtcggggagatgctttcctgagagggcttccctcccatcagttctttacatctccgagacggagctgggcaaaggaagtagccagctgcagtgcttcctgaaggcagcccacgttcttgcctgtggcctgggcagacatgtccttcccaccacctttaccatccatcaggcctgaaacctgctggacccactcgctggcttttaccccccggtt

SEQ ID NO: 2133 - DNA, 526 bp, Rattus norvegicus
  Genbank Accession No. AI180114
gtaaaaattgttttatataaagtgtagtttttgctatttagcaatataaaacgattacaatataattagttattaaagagctaaattcaacagttgcaaaccatgacagcagtgaacagtcccttgtacaagagttcatttggaaagaagtcaagtaaattttgtaacagatgacataaacccttgagccagcagtgcactaggatgcactacagccctgcccccggtgctctgcctcctccgggatggatgcggaacttactgctcactctttggtggttcctgtttcccattaagctcttgatcaacttgtttgatgcactctggtatgccgacgtactccatgggaacaagctccgccagttcagccaaattaaagacgtatctaatcttctgactgaattttgaactgataaatggtcttgtaacagccagaagtgttcggataaaccaagaggggtgcacaatgattagagactttaggtttttccttaatcgtctgtcgatttgctggtagcatctcctg

SEQ ID NO: 2134 - DNA, 545 bp, Rattus norvegicus
  Genbank Accession No. AI180170
ggttccacttaaattgcatgttttatttctcccaaccccagccatagcatagaagccccatatatccatcccagactggtttctagtaggctgaggttatagggagcctcagtagagcaccgtctcccaagagccgggcacaagcgttgcccccacactgatgaagccaacagtgcactggccccgtgtttccgcactcagtctgagtttacaacacaacctcacccttgaaacggacagtctgggagtgggggtgtgagggagtgaaactgaaattgcctattagctcacccttttcaacattaaacagagaccaagagagaaacggttccaacatttcaccacatatatttcttcttgtgcagtctaagccgagaacgccatgtaaatgggtcactgcggaggcagcgaacgcagcaatttagttactctccgatcagagggagaaaccaaccagtatgatctcacgtctactgacttctgaaggtttacagcagttaaagtattttgcttctatgtatgaaggttaaaaaaaacattttttt

SEQ ID NO: 2135 - DNA, 368 bp, Rattus norvegicus
  Genbank Accession No. AI180239
gacttagcagaggctctttattaggtgggacagttgaatgaagccagtgggggaggggatctgtgatagccgctgtaggaactggcaaggcctggagtccacctgacatggcaggaggcactggacctgcaggtagcacgcagcctctgggccggctgggaactgccacagccaggacagataggggctccagcatcactagagcagagccgggagaggccctcagaacccaaattctctgcaaacctgggtagacacccattagacactgagggttaaagagatctgactgagaagagagggacagtccctgtagtgtttcacagcactgctataaaacccaaggatgccacaggctgcctcgtgcc

SEQ ID NO: 2136 - DNA, 545 bp, Rattus norvegicus
  Genbank Accession No. AI180253
acttcagtctacaatcagactgaacattttattttaaaatttatatatatgatcaattctcccacacagactgtgttttgatattccaatcgatcctggaggagcatcaagggtctagggatcaggagccgcagccactggtccgactctcttcttagtgggagctccttggccattttcttcatgccatgcttgttgaatttggattttcatccatgttatgatggataagagtgaggatataagccatatgaagagcaaaaaaggtatgcgtggtatctctgttgcccgaagatatccactctccctgagaaggatcaagctgtggtttattggttcagctcgtgcggaagcatgaaaaatatcctcagcaccctgagtagcaggcagaccttcttctacgtcaggagtaaaagaagattcctcatctgaagtagcagaatcaaatatttcttcttcacttgtactctccttgtaaagaggtaaatcaactacataatccaatccaatgtgactagctggtcctgagtcatgaccctcgtgcc

SEQ ID NO: 2137 - DNA, 523 bp, Rattus norvegicus
  Genbank Accession No. AI180281
aaagggcatatgccactttattacaggttacttaaaaatcaagtcagaggaagctacatagggggtttgtactttaagcattaacattagacacaaaaactaaactggccattaaaagggggcacagtgaatgataagatctttcagttggcttcacctaagttctccatcacccaggagccgtaggccccggtagcctgccacctttcactcactgaggacagtccccctctaaacataatggctttatttgttgaaaataactatcagttgtactaatcccttttaataaagaaaacacagaaggttatcaggcaggaatgatggactgcaggtgcaatgctggcggcaagagcaagtggagtgcagcatgactccacagctccctggcaaaggccaggccgagggaaagcagcggaagcccagccacagctgcttggatctgtgctcaggggtcagcatgtgcacactcagactctcttctcatgcactttcctactgcctaaaaaggcctcacagtccc

SEQ ID NO: 2138 - DNA, 608 bp, Rattus norvegicus
  Genbank Accession No. AI180283
aaaaacccaaaacttctttcagtttattcaaaataaaaatacacatagaattatgaaaatataggtttactatttccaccacgtcagcctgtgctgctgttgaaaggctgtggtgttcttgagtttttacagctcatctcgatccctcaataaagtatacctatattcgctgggcgccagcttctggaaggagctctcaggagaactgctcgctacatcctggtcttgctctcctggggctgtatcagttgggtcaggtccatgatggaattctctgtgtagttttccagaatgtaggtcaaatacaaactgcttgagttttccaggaattaatacatccttaaagtctccaaagacatacatatgcctaaagctgtcaatggctatgacagggcaatctgctggagtcttctggatatggagaagaggatgtctaaatttgtcacaatctgcatgtaagaaatttattgtacctttttcacttatcaactgccgggctacttcattctggaatatttctaaactttctgtatcctccttcatgtggaagagaatgagaaaaggcagtccttcttctgtcaattcctctccattttcaaatgttattt

SEQ ID NO: 2139 - DNA, 337 bp, Rattus norvegicus
  Genbank Accession No. AI180296
atcaaaaaggttaattatcattcaaaaaaaattgagtggataactttctctgaaaaaatatactgactctggggctgcagttattacaagggacaagactgtctgtaagttaaattaccttacgttctcatcgaacaatgacagaaagtcccgtttccagtctgatgataaaggtacacgtggcccaaaggggctgagaataaatccaaaacaaggaaagcaaaaggcaaaaaagcaagggcctgccaccggctccaggaggaaaatctcaaaaataccccaatggcaacagggacatttggctggaagccacagctcttcagtcatctttgtcttt

SEQ ID NO: 2140 - DNA, 450 bp, Rattus norvegicus
  Genbank Accession No. AI180300
gaattttggactgaatttaatgtcaaaaattcagaaatgtaaacaaaattattcagtaacaaagccagcattctgaatccaatacaaaaattagtcactgatacatagctcaaacataaacagggtactttattaaaaaataaattgtaacacaataacttagtaacgacaaatcaagtaacataagatacagacaaaactaatgaagaggcgttgctgaagcttgcactagtgatctcctttaaataggaaaagctgctggtctagtggttctggccccacctacacaatacaggatacagaattggtgcaaaaataaaatgaaacaaaacaacctatgtgtaaagtcacctgcaaatagttgaatgagatctctctaggaccagggctcaagcagagatggttaaagtgctctaagtgttgagaactacagatctgaagtaatcaaca

SEQ ID NO: 2141 - DNA, 480 bp, Rattus norvegicus
  Genbank Accession No. AI180367
gccaaatttgttttaatatgatatatacatatacacacattcacagtcacaaaccagcatgacaagtccccttccttagccaggagagctctaccacacgcaggggtcctggagatgctcaagggcctaagtatgacagttttcacatgtgacatccattagggacactttaatcagaggtggcaaggtgcaccacgggtgtacatggcccggggcctcatgcaggcccagagctctgctgtacccgcttcatcagctcttcatcctgcatagacaactctgtcaacttttttcccatcctctcatggatgtccaagtacttggatacgcatcggtccagacacacagactcgcctttggacagctctgcctccttgtagtggggaggcacgcacttccggtggcaggcactggtcattctgttgtacatgtcggccatcatctccacctccagctccgctgccagttgctgggctctga

SEQ ID NO: 2142 - DNA, 440 bp, Rattus norvegicus
  Genbank Accession No. AI180372
gtaagaggtaagtaaaagatttcaatttgattcttctagagggggaaagtagttgaaagtaggtcttcattttgcagtcatcatctgtacgaattcttcatagttgacctgtccgtctccatcaatatctgcttctctgatcatttcgtctacttcttcatctgttagcttttccccgaggtttgtcatgacgtggcgcagttctgccgcactgatgtagccattgccatccttgtcaaagactcggaatgcctcacggatttcttcttcgctatctgtgtctttcatttttctagccatcatagtcaagaactctgggaagtcaatggtgccattcccgtcggcatccacctcgttgatcatatcctgcagttcagcctctgttgggttctgacccaatgaccgcatgacagtccccagctcctttgttgtgatggtgc

SEQ ID NO: 2143 - DNA, 637 bp, Rattus norvegicus
  Genbank Accession No. AI180400
gagtgcaaaaagtttattgacaggaagcaataagccagacatttggttatctctgctataataatgtatcatttttgaacagtgtattaaaaatacataatgaattatatttaaaccagtactagaaaagtaaattaagaatctacttaaggcacttcagataaaagctaaatttaaaatttccacaaaagtaacactattttaaatgagaaaatctgctttccacagattttagccagagcatgcctttctccacactgaagaatggtgctcttaaacaaaaagaaaagacacaaaacactgagcatgggagacaccagcagctagaagttacacagtaggagtactgcccagttcaattctgcaagtcttcacactaagtttcctaagaatcacagcataaattcattgggcagagacaagtacaatagcagataaggaattaagaatcacttaatttacaaggaacaatcaactgtatcctcctcatagttatcaaatttgtagcaacaacaacaaaccacccaaaacatttttttctgggtcaattatgtccatctctttccacaaacctctattatataagacatgggaagcctcgtgccgaattcttggcctcgagggccaaattccctat

SEQ ID NO: 2144 - DNA, 667 bp, Rattus norvegicus
  Genbank Accession No. AI180410
catgctgaaagagaatctttttattttttgaaagagacacattgtacctacacatgcatttgaaatgtatacaattaaaagcaactgctcaacaatgaactgtcttagagcatagcccaagcagacataataaatgtacaattagcaatctttcccagttatgagacatttcaatattctgagatgatatagagtgaactttgtatcatcttctagacagttggaaaggttaaacactgccaaaaatttgtgatttttgctacttgattttaagaatgaaagatatccccagctgggaaattcttccttcatctctgctgtaggagagaccttggtgagtatccacctaaggtcatccagaagttgtctgttgttctcttccagatccttagctttagagaggatagtttcagggacaccttccatggcactcagttcaattactaaatggaggagagggctgatccatgaacccacaaaattgatcaacgtttgcaaatacacttcaatttcaatatttattcctttattttggggtcttgcaagagttgaatggcagtaagttccagttttgacaacagtctcatcccacctcatcagttgtgaattaagatctgcaaactgtctagatgagaattggttctggtagaattctacatataagtgg

SEQ ID NO: 2145 - DNA, 490 bp, Rattus norvegicus
  Genbank Accession No. AI180413
gactgaggcaactcggtagtttattctgctatttcagttgattcctcagacaagcagagatacaaatgagacattcaattttgattctgaaaatgtcttcagcacggtgtcacatctgatgcatccgttttccagaaagccagagaactgtgctccttgaagcatttggggatctcgatggtgccgtctatgcactgagcctcctcggtgtagctgcacttcttctccttatttttacaatagaagtgaaccttgtcaccatgcatcatcccattcttaaactggtcctggatcttcaccctctgcccttggtacaacacggtggccttcttaacagagagtttgcaagatgctttacagctcggcagggccgaccaatttcctgtcttggtacactccacttcttccgggccatccagtttgtatgtttcatggcaaccaaatacggctttatctttataagaaagcaccggctttgcagcctcgtgcc

SEQ ID NO: 2146 - DNA, 698 bp, Rattus norvegicus
  Genbank Accession No. AI180424
ccattcataaaacttttattccacttacatgaactttaatacatgtgttcttaacaattatgcttggattgttcatgaaaatttcataagacattaaaacaaagctagccgtcatctcaagttatttccctgttaactatttttacagcacatgcatgttaggcaagtatcaaaaagagaaaaaaaatcacaaaagcaaaaacaaaacaaaacaaaaaacttaaaaaaaaaagttaaatacatgggattttgtttaccgctgtgcttgatccgcatggagccgggaacaccaagcaactcgtttgtactgcatctttacttttacatttgttcttagattgcctaaaacatttaaatacaaataaaatgtgtagcaaaaataatgaaagcaaacagcaggtaactttacaaataatggaatgtgaaccgtttctgcccttatcagagtaaattgggtcacaactttgtctacagacaacttctggagctgtggtcaagggtgtgcacgcagacacacggtcttagcgtgcatccacagggtgttcgtgtcccagcctcacaagtgctccaagccttacagtacccacacagactacactcatgactggacccattatcctgtttattccccgccagctcacaccaatatgtaagcagttttctttgcttagacatggaagcagtttgaacactggccc

SEQ ID NO: 2147 - DNA, 422 bp, Rattus norvegicus
  Genbank Accession No. AI180441
gggaaataaaatttattggggctctgattatgtacactaaatgtgcctgacctgctgaccaggctgacatggtttgtacaataaatacatcctccgggcctgctttccagtggttggaaatgcccaggggtctgggggtagggttgtcagtccagcttccgggctcccagcttcatgggccccttggtggcctttttcttcgcccgcttggcttccatttctcttctcctttcctttcgcttttttcgggccaactttgccttcacctgcctgctttcagccttcaagccttcccagttgtcctcaccccaggagtctgggtctggcctgggctgggtgctgggacgaacagacagggcagcaaaggggtcacccttgtcactgggctctgcaccaccccagttatactcgctggctagccg

SEQ ID NO: 2148 - DNA, 905 bp, Rattus norvegicus
  Genbank Accession No. AI227612
  misc_feature (1)..(905): n = a or c or g or t
cgggaatcgtaccccttgnnnnnatttgaactcttttaaccctcactaaagggaataagcttgcggccgcttccatttttttttttttttttttttttttagatgtaaaatactttatttgtaaatggtgatcttctaaatctgtgtccacaaattccaaaacccataacactctgtatacttcaaaaaattcaatttttgccaacattagatactattttacagaacagaaaacaacaaaactcggcaggacaaatactggtaggatgtcagagtattgtacaagagaagaaaaatattcaagaaacaaatttcatacagctatttatcaagagaaaaatatatacaattgatttattctgtaagataaaaatacatcatgccatatacattacaagctgagagctgagccactgatgtgtacccgaagctcacagtccactcgaattgtgcacacaaactccattttatacttagcctgtgaagtgtcagtaccagaattttaagtacaaaataaaaagctaacctggttcaaatgctgattaagtttctacaagcaaacacaaaacagtgtgttttttattaaagaaatgtaaacaaacaagttcatacaaacacattttaaaattacatcttcgaaaaaccccattgccagattcctgcagcttgaacgtaatcacatttaactctctccatctttctttttttaattttcaaattttttgttaaataaaagcctacgattggttagccctgctcatgacttttgttacatgattctgtgagtggaaacaattttatcaaactcttttgtgaaaaaaatcacctccttggttggttaaacgtatccagttccaattttacccaaaactcctgaaatggttcccattaagggcttgttttta

SEQ ID NO: 2149 - DNA, 573 bp, Rattus norvegicus
  Genbank Accession No. AI227666
aagtatatataatattacagggtaatatttacacagttattattttaaataaaaaagtatcttggcaaagattgcaggtattcaaagcttcaaacagtgataaattgatttaatacataaaaaaaaaacctttaagggtaacacagctgtaaaacaactttggtctttaaatcactgcaaaaaaaaggatacagacaaaaagcatacctttaattgctatgcaaaaaggcccccaggagagttccttgcgcatagcaacactggagttctcttacaatttagaatggctaatggatatttatatgatgtgggaactaattctcaacaatggctttctgtaaataatgctctgtttaataaaaataaaaagcgtttctctcttccatccacacaagatcccgacagtgaaaaacactgaagagcccaccaatcccaccgatgctgtcttacagagatgcttggtaaaaaggccttttctttcccctcaaacactagatttatgaaaaattcagcactaaacattcgtaatgaagggcagccaaagttcaaggcagggcgatttcctggctactg

SEQ ID NO: 2150 - DNA, 619 bp, Rattus norvegicus
  Genbank Accession No. AI227667
ccatttaatttaacatttattttcatttataacgagatgtcacattttctacattaaaatataatcatgctgaccgcccccccatcccctcagagaaaaacaactggaaggtggaatgctcggagtggggaagttatggctgcacctgagaacacacagcacagagacccaaacagcagacacggcagaggcacacagaatacagctaagagctcaagccaggaaggggcaggaatgaaagaaacattgctacacgtgccacaagatcacccagaaaagggagagctgagtcagaaagcttgaggactgagcagagtttaaagcatccacaaacctaaggcaagtcatctccatgccccacctcaggatctggagggcaatgcagagacctaagccaccataaacacaagatgagggtgggatgtaggttttcttaactgtgccccagcattttccaagtctcagttctcctatgactgcagcccagtgggggtcatcagcacaaggcacgccacccctgcaggagaatgccgctgcacagtggtgcctgactctttaggcctcaaagagaaagatggccacacaggaatcccaactcgcagcactggcagaacagaac

SEQ ID NO: 2151 - DNA, 553 bp, Rattus norvegicus
  Genbank Accession No. AI227689
gcatagtttaaacacagtgaggctcttccttcccccacagtgcctgtccccacacatcgccactagatccaaaagaagaaaaaaaaaaattggtcttccctccctccacttccacccatcgctgtctcggtgggtgagaaaggattgtggactcttcctcacccagacctggaggtaaatagtctccttcctcgggaaggcagattcccgcaagtcatcttgggacagagggagggagcaaagctcatgtccaatcagaggagcaggtgggagggagaaaaccaaaagataccacgcccccaggccccaccctcaccttagttttgtataaaaaaacacctgctaggaagaattctttggagctcaaagtggctcagcttaagggagaaggcacaattgcactgcatcgacgcacagaagtctgcatttgtggtgtggggggggacaatagaaaaatcgacagcaccattccatgggtgggtggtggaggaaggaaggaaacagcggtcccgctgggccttcggagaagggaggacagaagtctgtgtgtcga

SEQ ID NO: 2152 - DNA, 541 bp, Rattus norvegicus
  Genbank Accession No. AI227690
aaaaatagactatgtcagaccatgcacaatgagagttcatttaatttattaaatgtcccatgacaactttgcttaatataggttttggtttgggctaaggtggcatggaaggcaacatagtaacgacatccaccatccacgtctactctctaagcaccaagacccaggatgattagtctccagagcaaaaggtactgtgcagatgtggttaatctacagaccctgagaaggatatcatcccaggttacccaggtgggtccaaccaactcacaaaaggccccgaaactccccagcagtggagaaccagacagttagtccatgacaagattcaacttgatgctgctggtcttgaaggggatagaagaagagctaagaaaaattggtggcctctagaagctgagaagggctcttagttggcagctgtaagaaaacaggaatttctaccttaccatcgtagggaagtgaattctgccaatagcttgaaggaacaggaggtgagccccaacttccagaaaggaacttagcctgggtcttaatctaa

SEQ ID NO: 2153 - DNA, 575 bp, Rattus norvegicus
  Genbank Accession No. AI227705
agaccacttattaaattagaaggctgaaagtaaaaatatatcatataatcaaagaaaaatctggacatggacccccatccccaaaataaccacagacagggttctgagaactattcccaccaacctctagacagtgtgtcggatgatgccagtgtctgtaaagagtggcctgggagggcgagggcagagcccatcgcaccacacttctgtcaattgggcaggcgttactcacaggtgagatgaaagccactggccatgtcagaccacaaatgtgcagcaggttacaacttcagccaaccaacatgtgcagagaagagaacagcgcaggccatccctagacccatacctacctaccctggagttggcctgagggcaggggccccagtgaacaccttgagggcagggcctccaatgaacaccttgtgaaattttgctaccaacatcaatcttcaaacttggcaagagcagcaatgatacccagaaagagcctggtccccacgcagaagcttgtctgtctctgctgtggcctctgcctttgagctccttccaagggtgacttctcaccttgagaagat

SEQ ID NO: 2154 - DNA, 562 bp, Rattus norvegicus
  Genbank Accession No. AI227884
gcaacaatatcttttattaggcacagaattttaaatgatctcttcaatctctccatacacaggcaaaactatgtgtgccattgaaattactggagcttgccaactacctagagaaggatacttatccccaacctgcttaaccaggaggccagttcatctgccgacctccaaggacgtggaggtgaatatgatagacagactgccccccgtctgcaccttcattcaccaccatccgatacccgcgcttcaggcccagatccgcagcacatttcttgccaacaatcattaaatgtcctagaagactttcatcatcatcatctgccacagaaatctgggatatgtgcttcttgggtatcaccagaaagtgtgttggtgcttgaggggaaatgtcatgaaaagcaagacaccgatcgtcctcgaaaatgatcttggccgggatttctttgcggatgatcttgccgaagatcgtgtcgccaccgggctgggccacttgagccttggcaatctcgtcagccatcgcggccggtcgctgtccttcccgcgccgcggccacggtggggcc

SEQ ID NO: 2155 - DNA, 663 bp, Rattus norvegicus
  Genbank Accession No. AI227894
agcacagtaacaaatgcagacataagaagtctaaatcaaccaatcgactgagcagttcctactccgcacttacacttaacagcttaaggtatttcactacagctttccacaaagcctgatctaactcttgaagtaatttgcatataaaataaaatacattaactagtggtttcctacatggtgtcttgtagtcagctgtccattttacatatacgaggtaacaaactcatctttgcaaacttgttaaataccattgtttccttctaagaaggaaaaacaaattccaacttttttaaaaaagaaaataggactttacataaatggccgtgtgtgacctatacaaattgaaactggttttgaaagtacagtagactacaatcaatggaacacaagtgtctacacatgcattctttcctgttgtactaagtcagctaatcttgcaaagtgacagctctaaaagtcgctattaccactgtgtctactgtagcaagataccttaagttacaacaaaatcctgggaagtaagactgaataatatctgttatagaaataccctactctttaccaactcccacccccaccctttcaaaatcataagcagctctcttctgtgacagacaatcatgtaagaactgtgaaaacccagtttatgtagcgtatctc

SEQ ID NO: 2156 - DNA, 693 bp, Rattus norvegicus
  Genbank Accession No. AI227941
acattctgaagttctttatttatgtcaatgaaaagaatttcattatcctataaagtcacagacacttccacttcaaagtattacaatcaaccagttttcctataatcataaagtaaaagccttgtcaccttcttggcatgattaacaaaacagaaaagagaaggcagagctcacaattgttctgagcttccatgtatgtacattcctggacctgatacaatttaattcaattcacttactagctgatgactgtgtgaagacacccacatcctaatccctagatcctgggaaagagatacatggcctaaaggtgttaaggctgcaggtggaataaggatgctaattaggaaccttaaatcccatgagagcttaggccaggcagaagaagggagtcagaagggacctaaggacccacacttgttgcctgagaagatggaaataagggacaaaacaatcaaataaaccaaaacaaaccaaacataaaaacccacacgagcagactctagcatcatgggacggcagaagtcatcccttatacgggccccagaatacatcgcagccttagcaacacgagctttgctgtcagcacagtaagccctagaactctacagaattgagatgaaacagtctgttgtcttgagacatggcgtctatggcgttttgttagtgcagctacaggacactaatccagcg

SEQ ID NO: 2157 - DNA, 634 bp, Rattus norvegicus
  Genbank Accession No. AI227962
aaaagcattcatccatgtatcttgtatttatatactctgaggcagtgatacagtcgtcggacaatctaattggtttcacacttcacagctgtaaatacagagactgcaaaagaaaaaagagctaaacaggatccaggtaggggttgcacgttaccttggtgtacgccggtgctggcagcagtgcctgactcccgtatgtgcctgtctttataaaggaaccctagtgctcggatggcatggtgggggcttccttccttctgccaccaccattgccagtagttatatataaacaggtacacagttcaagtgtctcatttccatttgagaagtgaatgctgcctaatggtggccaactagaattatcattgcccttcatagtcattaaatctcacaatgcttcaataaaatagtgtgtaagaactcaccacaatcctcatgtgtaatgacacaagtaacttgtttggcagagacagatagagaagagttaagcatgaaccaaaatctgatggaaggtataatgaccatatcatggggaacttggccaactgtagtctacagttttctcagaccagcatggactgtacctaaaggctgtttcacctttaaaaacaaaagtagggccaggcacttgcaa

SEQ ID NO: 2158 - DNA, 420 bp, Rattus norvegicus
  Genbank Accession No. AI228030
aaatgaacacatgtatttcacagtactgctttatacagaatgctaagagcacttttttcttcatattttacagaagggcttaaaacatatggactttctttaatataccaaagtacatccaattctaattcctaaataaatgttacaattcattgaacatttaaaggcttaatggcaaagtccgggggaggaaaggattaagtaagtttattttacaaactggctgaaaaataacttcaagaaagtcaataaaattcagtacggtctcatcctccctgacgaaggtggtgcccgatttggaggcgtgatggctatgtccaaataatcccctatttggaacttctgtgactgcagggtcatggagtcatcagtgcccttcctgccaaacatggtgctgccaatctctttaactcgatatcc

SEQ ID NO: 2159 - DNA, 469 bp, Rattus norvegicus
  Genbank Accession No. AI228042
agagacataatttaatgtcttccagaatacaattcgagctctgcaggtttcctattccacggggacagatcccatgccaacccacagagcaggcgcgtctgcctcctatccatttatgcggtagttttcatggatttctggccggatgtcacacacaaaggccaagaggttatccaggacttcatctctgttctgctcaaagtagttctggaggatggtcatcttctcctgggtctccttttccacctcactgctacaactgccatgggacagggtccccatttctccccgcgttttgagatatttgaaggtcttggggagggagtcagctgaccgggagaagcaagacctcttcagcagaccttgaggtttcctatttctccttgggcccaaccagtcacagagaaatgaagtccgtggcttggaggaaggagagggaaagcaggagcagcagcagccaggaagtgtt

SEQ ID NO: 2160 - DNA, 206 bp, Rattus norvegicus
  Genbank Accession No. AI228112
ccattctttgtcacttttattcagtagtagtttttttttttccttattttcagtgccagacatggcaaggagtgattacagccaactgtttttaaaacatttgttcggaacataggcccccattaccactgaccccaaactgactcattttgagtgctttcgttgttcctttttaatacgccaccacggatacaaggtggaaaggg

SEQ ID NO: 2161 - DNA, 588 bp, Rattus norvegicus
  Genbank Accession No. AI228236
caattactttaataaggtgttctgaggaaccaggaaattaacagagaggggcgaataagtaatgcttcttaagccctgctcagtatttcgtcagtcatcttctggtaactggatcttgctgggatcaaaatagttggattccatgatggggaggccgttgagttctcggtatttcacaagtctctcagcttcccggcgggcccactcttgcatcctgtaatcaggcaggtaagccacaaaggtggtaccaaaaaccaggacgatggaaaaaccaaagaagaagacagctcgcatattccagacgtccaccacagggtcactgtcataaccgtgaaagtctgggttcttcgcgtagaggttttcgtcctcgggttctgggtcctcctgccataccatggtcggttctctttgccgctttctctccacaccggacggggcgattacagccctggaagattcccagcgaacacgggcagccgggacctctcgtatcgccgccgctactgacaggcggcgagcatacaagcttaacagccgggccgccatgaccgcttgtactgaggagtccagggggtgggggcggggtgg

SEQ ID NO: 2162 - DNA, 461 bp, Rattus norvegicus
  Genbank Accession No. AI228291
acagagctttaaaaatatatatttattgagtgtctagcacaataaaagccacggtaccaggcaggagcaagctggagataggaggtgaccagggcacacagctcctgccctccatgagtgagcatccccagtgagggataaaaaggaagtatccaatactgagtcaaatgcatacgatgttattggttgagcgacagcactaggaccaactgactaaaccagaactgaaggaccgggaccgggctcagggggtaaccagcagactcccacattactccgagaactagcctaggatctaccaagaaaggactgggagcagggttccgtggtggcacttagcttatacaaggccctgggttccgtccacaacaccacaaggaaaacaaacaagcaagctacttgttggatttgaattcactgttaatgttgtcttttcacacaaatgaattatagatagattg

SEQ ID NO: 2163 - DNA, 505 bp, Rattus norvegicus
  Genbank Accession No. AI228299
cctttcaccaacctcacagagggcttctatttgtttatttaaaaacaaattttaaaaagtaaaatgaaaccaggtgagattaagatacattaaccaaactgcaacgtagaaaaagggacttgctggaaacatgacggagaccactggagatttcacagacacacagaagagctcacattgtcaacagaattaagctgctacgaattctccccagaacatcaaggtttcattttgctcagcctgagatctcgctcaatttcaaactgcctgtggtccacgcgctccagaaaagctttccgttcgatgtacccctctttccctcggttatggatggccagctcttcaccaatcccttcttcctccttgaagctctcccagtccaatttggatttctcaagggtgctcattttctgtttcttggctccaattttccctaaaaggctgctcatcccacttgttctttttatccctgacccagcagggggtggtcttgtcacttcagccg

SEQ ID NO: 2164 - DNA, 462 bp, Rattus norvegicus
  Genbank Accession No. AI228301
ccagatggacccgttttatttccaaacaagactgcaagcataaataaacttccccagtaccatactgggttttcattctataaaatgtatttaattcctaaaactcttcataaaatctgcctttccccttgcagcggaaaattggcaaaagtcaaaggttgaaaggtcatgcacaaaacattccattcggcatcattctgtaagtctgtgagtctgtgagtccttgcaaatggacaccaagaggattcctgcttcactgtactctgcagtacctcaagattttccttcagtattccacagtgtgacctttccataacacagggaagcgaggccaagctgtcgtagactgaaaagatctgctgttagcctgctgtggagcgtaacatatctctaagaataaagccctaaagagaaaggaaactcaagtttgccatcaaatgcagtgggtggctcctttgcccc

SEQ ID NO: 2165 - DNA, 432 bp, Rattus norvegicus
  Genbank Accession No. AI228335
atcagttctgctgtttatagatttcacgggaaggccgaatacattttaagggaatgaggaaaccgttcagtgtctagtaacatgaaacagtatcacattattccataggaaacgtgtatatttatgtagaacaggtcagtcctgagaaacggcgtcagctcagttcgtgtcccatccatcctcctctgagatcgctcttgctgcgtccataccagacatcccaggttggttagcagggcatacatctgaagctctcaccagacctccgcacctcatctacggctacatacagcagcctaaagaagcacggctttcaggtgtggtgtaaagactctgaggtaatagggaacgagttaatttgttcttggctgtagttggctcccaaagagtgcctgtgtttttcaaatgatgtcaactagaaaaagacaatgt

SEQ ID NO: 2166 - DNA, 182 bp, Rattus norvegicus
  Genbank Accession No. AI228347
attgccttctatgcttcatggaaaatgtaacatatgtttttttcaccacaactttgggaagcacattgagcccagctgactatgtcgcatttttactctcagtccacttcgcaggaccaagtcatcaacttttccacgataattaaatactttttgcagtccttggaccccgggcttaacgt

SEQ ID NO: 2167 - DNA, 611 bp, Rattus norvegicus
  Genbank Accession No. AI228596
caaaaataaacaatttaactttattaagtcatgacttcagcccttacatggatttgttttttaaaaaaatatcagttcagactattattgaaagtgactatgcacaataaataggaatggcctgcgtgtgctgcagacatgggacacaaaaggttggatgcaatcagcaaagagtgcaaagcacctgggaggaagtttcaaatgtctagaaaagtagctcagagctctggaccactcaccaaataaaacaaaaagcaaaaacaaacaaaacaaaaaccccactcagtacatctggcaaacaacttcccaacaacactgaactatctcctgcgacccataagaacaatttaaaatacccaaagtgctaagacctcattagcagtactttaaatctgagttttaatgttaaatatgattactcgaataccctaaactgtatgacatgcctaataacaataagttacaaatattcaacctaataacttagacatgatatggttaatataacagacattgtatctcagctaacctttcatgtaaggtgagaattaaaagacttgttcatctgtgcactcaaatgaggaatgtggtatcctagcaacagtgatgac

SEQ ID NO: 2168 - DNA, 592 bp, Rattus norvegicus
  Genbank Accession No. AI228624
agggacccaaaatacagagataatttattggtcacgcatattgtcccttgcatgtttatctgtatagcatgtgtgctgatcccagcagagacatgaaagagggcattgtttttaattggcaccatgtgggggcaccaagacatgaaccttctgtcctctagaagaacagctaacggaaatctttatagctgatccatcttgacaggtcctaaagataaaccttatttaatctgcaaagtgaaaaagttttgcaaggtcatgcccagagctaaaattttgacgctttcctttgcaaagctgaatggtgaaggtgtcaagaagaccagttctcagagagaagactttaatgaatatattttacaaacacactggagaatcaggcaatgcttcctgcattggatgcaatcctgggccacaagtctgcacactcctttgcaactggacctgtgatagcagaacctttcatctcgcctttattgtttactatgacccctgcattatcttcaaaataaaggaacaccccgtcttttcttcgatatgactttcgtagtcgaatcaccactgcaggatgtacctttttccttagttatgg

SEQ ID NO: 2169 - DNA, 617 bp, Rattus norvegicus
  Genbank Accession No. AI228628
cacagtacacagtagttatttatttaaatacttgaaaaggtcaatgatggaaaaaataggtttattgtgagagtttatattcattagatttattttaccattaaaaaaatgttgcctctaggttatcctggccagatatagaacagttcatgacacatgcagctacggcaatatactacacagacacagccatgataggacggttttcactctgggtgagtcagcggtggtcagggtggcttctttaatagaactaaaaacattgataatatacaaattgttttccccatttgactgaaagggctataaaatccacactctgacaaagaagcaatgtggtgacacgggtaacctccgctacctgtttctgcctcaggtcctcagccacatactcagctccacaactttctaggtttcatgatggctttaatgccggcctaccacagtgacggaaacagagtggttttggaaagctgaccttgactcctgtgtgatcttaaaagtggagagaaatggctatagaagccaaaggctcattctgagtccccttgaaataacgtgtgatacctgagtaaacacaacccctgggactgaacctaacaggtgggccacacaac

SEQ ID NO: 2170 - DNA, 586 bp, Rattus norvegicus
  Genbank Accession No. AI228630
cccacagacagtttattgggagagccacagccagtgaaaaggtggaagaagtcctgttttatcctcttttgttgaagctgctggccaccagcaaagacaggatccaatggcaagtagggccctgcggagcttctgagacccacacatcagaccagtctcttcacttcaaaggccaagtatgagagcagacacagttcctaccccagagggtgctgaggaaacacgtccctgcccaccctgtcctccctcaaagatctcagaaagaaaggccagtatactgggccctggttggtcaatctaactcttggtgtgaagacctgggcaaaaggctaatgggtctatttagacctcgtgtctacactatgagccatatctaacatcagaacatgattaaaacactcaagactcttgttggcagaagctgcaccccagataatggatgtccggccacattctggctagagatagaaatccaagcagactgggtatgaatgcatgaggaaaccacttggcccagtttggggacgggtagtccaggctcagcctgggcccaaactttgggtttctgtctctcactacccagtgt

SEQ ID NO: 2171 - DNA, 634 bp, Rattus norvegicus
  Genbank Accession No. AI228642
acttttccaaacactgtttacttcactaaaatctggagagaggcaatgaaaaggtacgccaacccctgggatgccaaactaggagtgtacattgacaacagcaacatacagggccaaggtgctgagggccagcaatcctgtcaccactgcccgggccagcagcgctgtccaactacccaaggagcagagatggacaaaggtctccatgacaaaggccttgtagacactaaggaacattaggagaagaacagcaggccggaaggtgtggtacaggtcatagcgtgttatcatccagacctgagctgatgcaacaatgtagtggaccagactgatgttggagtcaatgctcatctggatatatttccagtcaaattcaatgcctcgggctcccacccagagagggatgcagcgggacataatgagttcagcagtggcccagcccagggcagcaaccatgatcttgtactcccccttgcctgcattccgggacatgacaaggtttaggcctatcaggtctgccacatccacactggccttcatgaattccccaatgaagtcatagatgcccccttcccaggtggggaagaaagtggccaaaaacaacatcttacatagctgcacaaagaggtaggtg

SEQ ID NO: 2172 - DNA, 591 bp, Rattus norvegicus
  Genbank Accession No. AI228649
cctatcacaattcatatttatcaccctgggctgggctgactgaggacaagaggaggatgggtaggtgacaggctggaggataaaatcacaggggaagagagggtggacggacgacgacgacgggaaggaagagaactaggttgtcttccccagatcaattttcttctggatggcccgagccgagtggtagatgagtgagtcaatgagtccagccactgtaaacatgcctccaatgatggcacacacacccgtcaggaagtgcgtgaaggacctgtgtttctctgtcagcttcaccatcattggtgagagctcatacagcacaaagacccccggcaggccctgatcacccagtaggccattggcaaccttctcgtgcctggtcacagagaactggtttgtcctcagcacctccccgtccactttcatgtacactgtaggcaccaccttcacaaagtactggaacatcatggaggcttgcggtgcagtgacgttggtgtggtccagggggttcacaatgccgggatagtcctccccgaatgacaagtgcttgatgtaatgggtcatgttgatattgtcaaggcccctcgtgcc

SEQ ID NO: 2173 - DNA, 465 bp, Rattus norvegicus
  Genbank Accession No. AI228674
ctcatttagtttttattcataatcataaacttaactttgcaatcctgctagacttgaaggggaatgaggaaaatatggaacccaaagaacttcagtgagagcagagattacagggtattgcgagcagatggggtgggggtgctctcctgagctacagaaggaatggtttgatgggtaaaatgcccgcaagtcaaagaaattagagttgtccacagtcggagatggtgatcttcttgctggtcttggcagtgcagataaaaaactgggaaccatttgtgtttggtccagcatttgccatggacaagatgccaggacctgtatgcttcaggatgaagttctcatcctagaaatttctctccgtagatggacttgccaccaatgccattatggcgtgtgaagtcaccaccctgacgcatgaatcctggactagttatgtgaaaggagtaacccctatagccaaatcct

SEQ ID NO: 2174 - DNA, 495 bp, Rattus norvegicus
  Genbank Accession No. AI228738
cccaaaacaaagtaacttgaggtttatggcatacagtttaggtcaacacacatacagaagggggaagaggacatggaggtgtccgaagcaaagctgagtgacggaacacattcagttagtaggtgtctatacaaagagtggtgggacatcaggaaaagctcccatggattcatgtgcacccatctggaggtaccagattcctccatggcagatccatgtgcagagctaagggaggaggccacttctgtcattccagttttagaagctccacatcaaaaacaagagtagcatgtggtgggatgatgcctgggtgcccggtggctccataggcatagtctggggagattatcagtttggctctctggcccacactcatctgggctaccccttcttcccagcctcggatcacctcctgcttgcctagtgtaaacttaaaaggcttgtttctgtcccgagaggagtcaaatttttcccatctttaagcatccacgtgta

SEQ ID NO: 2175 - DNA, 565 bp, Rattus norvegicus
  Genbank Accession No. AI228963
gattttggaataatttaatatataacctcaagacataactctattctaagaccattattttaaaggaacggatccttacgagaccaagataacccacagagcatgaggttggttcagcctttccttttcttcttctttcaacaaatgtgcaccacgatgtttcaatggcaaggccgatgccgtgaacatgaaagctgcgatttgcaagtaccaaccacaccagaacctgggaggccaaccagacagtgggttgggtgccattctaattaaatgatcaggtgacatcacaacacgctggggtgtagcctcgcaactgtccattaagtttcttttttcttgatgatcagaggtcccacgttgtctccagtctcctcattgtgctttatgtgagccccatcgcagaacgggaactttttagacctccagcaccggcaatacacggccttatcccccagatcctccatgtcgaaggcgtgcacaaccttcgggttgtctttctggatctgaaggttcaccatagctttggtgcgactctctttagcgtagaacttcttgtaagccaggt

SEQ ID NO: 2176 - DNA, 488 bp, Rattus norvegicus
  Genbank Accession No. AI229029
atgtgacagacagcagtgactttattaagtagacccccctccaaatataaacacaacccagtttttaaaaaaaaaaaaacataaaacatcaggcctggagccataataaaacagacacaaaagcaacataaatacaaaggtggctaaaacggggaggacagagccaagtggactcacgtggggtgggggatggccataaatactgaaggactttaacccgggagccctagggtgccctgaagagctggtaggaaggtaagctgggggcagtgtcagtagctagatggctctgggggacagatgctgcttgtcttggccctggctgccacttggccccacaccccagctgcaagcaacttcacttgggcccctgggcttccgactcctcgtcgtcatcttcatacatctccccctcctcctcggcagtggcgtcctggtactgctggtactcagacaccaggtcgttcatgttgctctcggcctcggtg

SEQ ID NO: 2177 - DNA, 574 bp, Rattus norvegicus
  Genbank Accession No. AI229050
  misc_feature (1)..(574): n = a or c or g or t
gatgtccttgtaacccatttgttagtggaattgctctgttgtattctgttgaaattcagtgagtagatttgtgttagaatttagaatctcagaaagtttcctatgggccattgtacattatttttgattgtggctcagaatatatgtagcaggtagaaaatttgggatgttttcttaaacttggagcttttcatagttctatctgaaatctctcattactacttagtaattctagtctttaataagtgaatggcttgtgcacctaatattctcaaacctcagctttgctggaaaggcctatagtttcttaaaaactctctagtccttgtaagattccctgattttataatgctttgatcatcatattctttacttactcagagcccaaggaatgagctgctacttctttacagtgtggctgtgataaatgtgaagagagttttggcctgtttaataatttttcaactacttaatggtacagataaatatgtgctacatgttanaaatacctgttcattgttacaggaaattaaaaagggatcttttatattataggattaaaactaattttctg

SEQ ID NO: 2178 - DNA, 461 bp, Rattus norvegicus
  Genbank Accession No. AI229179
aaataattaaaaagagtttattgatattagtgttatgaatgggccagggaagaaaaagaaaaatgacaagcagaatctttatacatttatttataatgaaattatggtctaattatttacaacatacaggaaaccagagtttgtacaaagccaacctgcaaagtattcaaaaatgtgcaaaaatgacagtcagtatctcagacactcctggctcagccaccgattccttcacttccacacatcaatatttgatacaaaaaagttcttttggcaaaagtcacaatgccaagaaaaaaaggacaagttgcaattccagtcagagtcaccgtcctattggtagcatcacatttctcttctcgctgcgaccagttctgagacaaatgagtatttcatttgtgtgatgagctctgaccagctttccatcacgttttctttgaaacgtgaaaacagggaggttggaa

SEQ ID NO: 2179 - DNA, 407 bp, Rattus norvegicus
  Genbank Accession No. AI229244
gaaggaaaatcacggtttcatttattttcatgaacgggttatgagcccacaatgagaaagcttaagagtcatcaccaagcgggggtgagcacgggacaagaaactgtccagggggtctgcaaagccatcatcatcagatggtgggaagcgtcacgtttattgaacatttatgttcagtaaaagattcgacaaattcaacaagctgattctgggcccctctttacaatcaaataacaatgccaatgacggagtttccaaagaaaaagcgagatgagcaaattccaaataaaagccaacactgggattgagatttttcttttaatatgcgacaaaatagctggatggtatattttccaaagtactttccagccacatttcccaaccttacaaaagtttgttcccatttt

SEQ ID NO: 2180 - DNA, 500 bp, Rattus norvegicus
  Genbank Accession No. AI229287
agtgttatctatattaaaatttattggggtgctattaggggaaaaggtttctggggggttggataatggaaaaagcttgaacacttggtcacatgcatttcccctcaccaccaatcgttatgctgagcaaaatatgtggcattttggtatctgcaaattttgtaagagcagaatatttctaggacaataatcccagagtaaggtgacacttatcaatgctaaatacacacagtacagtatctaagacactgaaggccttagaaactgacaccaagttaggaattaagtcaacagtttcccaatcatgattcagagtacaattttaacatctctattaggaattacatattggaggccataggttggcatttaaacttaaaatgagaataatttcataaatctcgttctttacactgtactaacaggtgccttacccatgtgctattatatcaagtaaacactactgtgtataaaggggggaaaagatcaatgatcaaaga

SEQ ID NO: 2181 - DNA, 493 bp, Rattus norvegicus
  Genbank Accession No. AI229318
tatcagcaacactagtcctgccattatgaagcactgcagaggacacgcattgtacgcaaacagtgaacatgccaaccacgaatgcagatgtgaatattacacagcgtcaagtcagtgagaaacagaatgtaacatgactatcgtgtatggattgaaatagacgaagaatacagtaattttacccgttacactttgtaaaatcagacatgaatttataagcagtgcctttaataaagacagtaatttcatttcaaataaatatatttcctttctattcctttatcatgtagtttattatgttcctaactggtaaaacgcaccagattattgaactcagtaataatccaatccatgatactccatttgtcttacatttaactcatttgatgtacactgcaagttcacagagcagttcctatgaaactgttagaacctacccgagcctagtgtgacaggccttttggacaagaccaaggggggtacgtttgagcat

SEQ ID NO: 2182 - DNA, 484 bp, Rattus norvegicus
  Genbank Accession No. AI229440
gcccataaatgactaaaaaaagccagtgtgcaggaggctgtctgctgtctgctgaaggcagcgccaggcaccgggtctgtctccgagaaaagaggctctgctcagaaccccccaggctgggaaccagatgggagggaggtatgggatggagaaacaagccaggtaccccaaggtctaccaaactctgttgggctgacaacttagggtgctcaaggcatcatggaggggaggggcagtgtgtggggttttggaaggtggttgtggtgagtgcgtgagcagcaggcatgggagtggccagcatccagccatcagaaggtgaagcatcgctccttgggatggcccacacgctccaggtttggcaaacaggcaaactggatcatcggtgggggtccacacatcagtatcagtgtctcctccccaggaggtggaagatggtccctgatcatctcctcattcacgaagccttggctatagtcccaggcat

SEQ ID NO: 2183 - DNA, 469 bp, Rattus norvegicus
  Genbank Accession No. AI229441
gccagcccctggagtttccacctcctgcctctggccctccagaggggtgaggccctggccccagggcagcaaagggtgagggctttcctgcccttcctcttcccccattccatccccgacttttatctccacagtgggggcccccccgagaggaaccaaacctgggtatgggagcaggacccaaggccctgtagcccagggagggaggcttggcatgtgtgcccagccccaaagctccgggcctgtagtgtgggcatgggcagggctgctccctgcctgggcccatctggggttggggaggttagttccagatcttgaggaaggagtcccaggagcctgtagctgtcccaaatgatgagctttccgtcctgggaggcgctgaccagcagccttgagtctgtcccccagtgcatggcatagatttttgccaggtgtccacggagggtcctccgtgttctcatctgaattc

SEQ ID NO: 2184 - DNA, 502 bp, Rattus norvegicus
  Genbank Accession No. AI229529
gctctgcacacggctcttggcgcacgcgccgcgcgcactcgggtgattttttttttttcttgcactttgggaatctctagcgatcgatcgatgggacggctcagtggtcagagcccggtcgaacagtcacgcggatctgtgactgataaaggatggctggcccccatcgtggccggggagcaaggcggctcagtggttagagcgccggccgccccccctgattgctgacttaaaaagatggcatccgggccctgaagcgaggggtggggctggggagggggtgcggcagctcaatggtcagagctcaatcgaaaaatcgcgccgatttatgatcgattaaaggtggcatcgcggctgcgaaggccgctcagtggttggcgcaaccggcgacgactacggatcaaggacggcgtccgcggcctgaagcgaggagggggactggggaggcagctgaatggttagcgctcaatcaaacaatcgtgccgatttgtaatcgattgaa

SEQ ID NO: 2185 - DNA, 531 bp, Rattus norvegicus
  Genbank Accession No. AI229595
aaaggtttttttttcctttttttgggtttcaaattgaatattttattaacatggtagttgtctttttaacatgtgcacacacacttgcacactcagaatgatctgcctggggagaaaaagactaactatgcctaaggggaaaatgaaaaataaaaaacttcctgtaggtttccttattgtaggcaatcatgtccacatcacttacaaagctattgccaaatgtgtccaaggaagcaaagtttgtggggcaaactcttggggaagtcaaactggcatagccaagctctcaatatgagaaagctgacatgatgtggacttttgctgggaattttctttgcaaaatatggggagaggtttgtcaatgggcagaaagtaagagaaggcggtgtgaagtatgcttttgcagtcaattttcctcacagtattgtgcagggtcatcaaggaaatgcttagtctttctctggaaccagtttcagaacttttccaattgcaatggtcttaccttcatctcttaaagtaaaacgtcccatc

SEQ ID NO: 2186 - DNA, 487 bp, Rattus norvegicus
  Genbank Accession No. AI229620
agaaatcagactagccagccatggaaggagccagtgcgttggctagtctttattagagagacgttttcctttacattctgaaatgttaaaccaggggtgggctcagtggaccatttggtagggcaccaacttgtaatgtgttccacagttggggcatcgctggctctcgccttggtgcagccagaaccagatgacagtgcagttgtcctcttcacagatgcagcccactattctcttgttgctaacggatgggactagattggggtcttccttggtgcccgaagctgcctttggaggtagcatattgtatggatccagtcccctctgtgctgctatcatgatctccctctccagcccggtagcctgctcctcatcagtagggacaccaccttcagaagccatggagcgggtagcggccacgccacggggtccgtgggccctcatggcctgagccgccaaagcgcctactccgcgaagtaaccttgaa

SEQ ID NO: 2187 - DNA, 568 bp, Rattus norvegicus
  Genbank Accession No. AI229637
cctagatcatggcttgtttattaaaatattggtgaaaaaataggagtctctagggctgctgacaggaggggacatcatagcactcaaggtgtctggactctcctcctggccactctccttttcctgatcccactctgtaacaggctggggctcctgctcaccagagacagccttgctcttttctttggcagggcagactgggaggaccttcttttgacctcctttgtgctgagagccttctgatgctttttgctttcaggctctacgggggacacaggagtggatccattcacctgtgacagcttctcttttttcttctgcacttttggggtcttggcagggggggtgctgggactcagggtggggttattgggagccggactcttggccacagttactccattcacctgggatggggtgttagccttcactctcttccttcttttcttgcctgtgctggggggctggtctttaccagtggcagcaggcatggcaccctctgtcactgcatcctgctgtgatgcagccttcttttctgatgtggtaccctcagaattaagtttctttc

SEQ ID NO: 2188 - DNA, 550 bp, Rattus norvegicus
  Genbank Accession No. AI229680
gaatgtccactggagtttatttacagacaaccttaggtaaggcattttcctctaggatctacatcttgcgaagttacttggcttcaggcttcttgtctccagcttcaagcttgagatgctcagggggctgacgataggcagggaaagcctcccaggggctgttcaggtcaaacttgcggaactcttgtgccaactccactggctcagccactacccgcttcacctcatcgtcataacgtagctcaacatagccagtgaggggaaagtctttccggaaaggatgtccctcgaagccataatctgtcaggatccttctcaagtcagggtggttgaagaagaaaactccaaacatgtcccagacctccctctcataccaattggccgcgatgtgcacagacactatggagtcaatggctgtcagctcatctgcataggtcttcacacgaatcctagagttaaaccgcagggacagcaagttgtagacaatctcaaaacggttctgccgagttgggacatccactgctgtcaagtcagccaaagatttgaactg

SEQ ID NO: 2189 - DNA, 565 bp, Rattus norvegicus
  Genbank Accession No. AI229684
ggttccttttttttttttttttcttattcaacaaatttattgagaactgctgggacctaagccccataggaaacagagaagccaaacacaaaacagtctccattctcaacaagttcagtttggaaacagaatacagagcaacacaggcagtaattgccttaaaacaggaaaaaacaaaacaaaacaaaaacaaacagaaaggatgtagtgttcaaaatcctggaatcagaaccaggcagggtaggagagcacaagcctccatgaggagaagagctggggtgaccatcgaggagggttcttgccacgcacagccacatccccctcagtcgccagctcactgcaggctggcccactgcagggaagtataaaccaccttcccatcaggctgaggggagcagagaagcagagtctttctgacactggttcccaggcggcctgcagagaccaggtcctgaagtgggatggggtcctcagcagaccagcactgagcaatgtagtgagcatggaaacgcagcggatcaccaggatagaccaggaagtcaccaccaaactttccagctgcgca

SEQ ID NO: 2190 - DNA, 498 bp, Rattus norvegicus
  Genbank Accession No. AI229689
ggagttgctctgattggtattttatttctcctttacaagttccacataatagacaaaggctttttgataacattgttatctttgctgaaaacgatcatataatcattttaaacaacacaaatgtgtacatacatgactgaggtttctgcgcctataaacatctctgtgggtttaacaaggaaaaaagcaatatactgataattcaactgtaactcttagaaaaacaccggtttccttaccaagcacgagtgtcctgtacagggacctatcatccaagatggcaatgagttcagcctagggcagccaggagcagctccccacaccggctcagaagacccttcccacccagcacttcttccaagggctcagtctggtctgcaattgtgatcttttgcaatttagtgataaacagactgtcgacgctgctggaaatctcttccacttgacttgaatgctgggggagatgttcattaacttcagatgaaggatcctgggttg

SEQ ID NO: 2191 - DNA, 581 bp, Rattus norvegicus
  Genbank Accession No. AI229708
agttgtcatcaacagcccagtaaggccgaatatttattagacccacttcacagatgagaaaacggaggcaagcaaaaccaaagtcagccctagcaagtcacacaagctggagatggcagagctagtgggaagcctaggtaaatttcagttatgtcctgttggcctctgaacctaaagatgtgtgacccaaggggcccaacaagccacagtaatccattctggtggcatcttcttcagctttaggaccggcgagcatgaggcactggaatatctccttcagcatacagtttgagggaaaaatccagggctggagcagcctgggtcagcattcccaacgagatgacatcaatatttgtcccacagaactgggggaggttgtccagtgtgacacccccactggcttccacagacacgttggggaatttggctttaagtgtagctgctgtggggtgcagctcctcaggcttgaagttgtccagcatgaccaggtcagccccagcctctgctgcctgcaaagcctccttcaggctgctacattccacctttaccttcaggggaaagccagctgcctgccgggcctt

SEQ ID NO: 2192 - DNA, 425 bp, Rattus norvegicus
  Genbank Accession No. AI229737
gaaaagttgaaattactttattaatcttagaagtcagtaattccaaatggcgcctgtaccatggcagccgcctacttgcctccccactctggggaaccggtgctgttggctccccaccccccacactcttgggaaagtgaagatcaagtctggtggatgatgttgggatctgaagcttgtacaaaataaaataaacttaatatttcaatctggaaaagaagcgaaagccagatgcaaatagccaaagagcctcttttataccatctgtgagcagcaggagggggacagagggacctagcaaggcgggagcggggggtgtgagaccatggaaaggcacactctgaaaggtgctctgacagggacacaacatgtcaggtgagagtctccactgtcaaatctcatgcaaacccagagggtctgtctcc

SEQ ID NO: 2193 - DNA, 456 bp, Rattus norvegicus
  Genbank Accession No. AI229831
ttgcggccgcaattgtttttttttttttttttttttttttttaaaaactatgactttaatgttgtgtattttttcatgctcaggcacaacctggcccagaaacagaatggcaaaaccagccttctccaacagagcatcctctggctgctcagtgctcaggcacaagatcagagcagctgagaagtcactgatagtcacaaagttgtgtgaggtatgtggacagagtacagatgctgaaaggtgaacggcacagggctcatgcaggaggtcacaacctggatgcagagtgcttgagcacaggctctggtgaggccagggtgaagctagggtgaggcagggaaactcctcacctggctctttccatatcctggacgccaaaaacataagcttgatggaggcttcaacttttttggaaggaggttcagtggcctgtccaggctcaattactgctccccg

SEQ ID NO: 2194 - DNA, 471 bp, Rattus norvegicus
  Genbank Accession No. AI229905
aaaatttgaagtgctgactttattgttgaaagacacattaaacttgatttcagaatcagacttgaccatttgatttctgtacaaatgactgaatatataaagtaccaaatataagcagtagtgtagcaagaaaataactggcagaataattattcagccagtaccaatagttaaaacttccaaagatctttttctatgcacaacaagggcggaaacgttgccagaggttcgtctccgtggctactgctatacttctttcttcctcaggatgagaggacccacgttatcgcctgtcaactcattgtgcttattgtgggacccgtcacaggcagggaacgtcttggagcgccaacacctacaataagctgctttcgtaagattcaggtcttcaatgtttatttcgttcaccactttgggattttctttctgtatcttaaggttaatcaagctatccttctgttgcttcttctt

SEQ ID NO: 2195 - DNA, 454 bp, Rattus norvegicus
  Genbank Accession No. AI229919
aaaaacccttatgtggtagccacagctggagcctgggtcctctgaacagagactctggtgtgggttttcacaagatggtcagtgaattcctgataaggagacttggtgaacacagtctctttccagaggtcaggggtcaggtagctgtaggtcttggagatggcatcaaaggtggccttgaacctggtccgctggccagcccgagtctgcttctgcactggcatgattttcagaacttcatcctttagagatgcacccaggaaaaagtcaataatctcagactccttaatgggcagggagaacaggtagatctcctccaaggacttgatcttcatgtccttaaccaggcggcccagcttggtgacggggatccactccttgtcttcagctttacctccacgagccccgcggcctcgaccgcggccacgggctcggccacgaccgcggcccctaa

SEQ ID NO: 2196 - DNA, 528 bp, Rattus norvegicus
  Genbank Accession No. AI230073
aattcttaacacttttaatcacttccataatcgctgtactgagaaagaatgctcagaaagaacattgagttattttacagttagactccttactgttttcttctttacaggaacaagcatctgaacaagtcttcaaccaaactgtctctaaacaggaagtctgttatataaattatgctttatttttataatattactaaaacactgtattggtgaaaataaatagacattgacaaagacatcccttgttctgtttctgccgtcacattccacaagcacgtctgcctttgcagttccttctaggtaaagagccaaatgcacagagggcagaaggcggaatgataccacagccagggggttccaatagacttctgaagggtttgtcacaaaagcagagagacaccattagcacagatattcagaaacatggcggagcaattacaactgtctgcctgggcttctggtgcgataggtaaggtacatgcagcacagtaacatgaggccatgtgatttccaagtcagacccca

SEQ ID NO: 2197 - DNA, 480 bp, Rattus norvegicus
  Genbank Accession No. AI230121
tttttttttttttttttatttgggatctttttttatttttatacacatgacaagattttacaccaatagtcagttaaatagtacaaatttacattcaggaggaatgttaaaaaaaaaaattcaactaaaaaaaccacttcttcctgtgacccataatcccaacattttacagtgcaggggagagggaggcttgggggagcatccaaaacaagtctctcaaaagaaataactttaaaatgtcacattccctctccacacaggattcatagtgagagtataattacaattcatccttctctgtaggttccttttctgtttcctgttcttcttcttcttctgcccctgcgtctgtctcttcttcatcctgctcggagtcatctgtggtgtcttctgtggtgtcttcaggctcctcctctggctcttcttcttcctgtgacccataatcccaacattttacagtgcaggggagagggaggcttg

SEQ ID NO: 2198 - DNA, 440 bp, Rattus norvegicus
  Genbank Accession No. AI230130
ctaggaaaaatcttttattacaaaagtttttacaagtaggcatggaactgactcccagcctgtaggctctggtgcctgcctttctaaaggcccagacagaaagttcccagggccctgaagatcagaacaaaagtcccactccgaatggacctcaccctgagtcacaggctgagacctgacatcctaggaagagagaggaggattaattgagaactcagggctgcccacgtaggctttctgtgaatgtagatagggaacgttggtttccaggctgcttcagggtcagagatgccctctggaagggagggatagtagggagttgggagaggctcccagttcacccctagagggcgcctggagacttggcagaacgcacctggcgcaggagcaggaccagcgccgccaagatcaggactgtgaagagcagcaggagagcgacc

SEQ ID NO: 2199 - DNA, 435 bp, Rattus norvegicus
  Genbank Accession No. AI230131
taagtgaccaaatctaataaaatgaaaaacaaaacaaaacaaaacaaacaaaacaggtttactaaacaggttcaaaagacaacacaggagataagcagtaaaaccaaagcgtgagtggcactgtccatgtcaacctccaatctcctccagatcacattttggtttttgctttctgtttaaggtttttaaaaagtgaagcccaggagtccggcaggccaccctgtgctcagcagcatgcttctcagcacgtatttgaccgtgtaggcaaaggccgcaaacccaactataacaaacaagttcgccaaagcgcccgccaggaagtcatgatgcctgttggcctgtgggagcccagcaaggtttgggccagcagcaagtgcatgcccattgaggagctggatcccattctggccacggtgcatctccccatcaggaacc

SEQ ID NO: 2200 - DNA, 626 bp, Rattus norvegicus
  Genbank Accession No. AI230228
caatgttttttttttagatgactcaggactttaatgttcttcatatcgtcaatcgaaaacactaacacatgaacaaccagaaaagacctcagcaaagatctggaatgtacagattgccctggttaaactacaaaaacagccatgcgatcacagtttgggggtgggggtgtaactgagttttgtttaacggcctaaccgaaaagcaaagaaacaaccatttcttctacttgtggcaagaaaagtaaatcatggaactcctagatccttctcatgaagcagctttaaaaggcagtaggtggagggtgccagtgtccacaacagacgacggtcatgcacaaagtcacgggctgaacgaactctgaaaagcctctacagaactgtttcattagaaattcaaaagcatagatataaaccgtatggtgtttaaaaaagttcccaccccataaacacggcctatcatgcctgtctttttatgggaattgcagtacacagatccagaatgctcatcagtcactgctgactttaaccaacagctgcagaacctggccgactcacagctgtccatccagcacataggacctctcaacctccttgggatacgctcctaacgataaagaaccagttgg

SEQ ID NO: 2201 - DNA, 466 bp, Rattus norvegicus
  Genbank Accession No. AI230247
cccagctttttaagttgcatttatttttgataatctgtactgtagccaatcaattctattctccattcttgcttaattgtattagccataaaggagttcaggttcataggactcagtttctctattaaaccgtcattgattatggaaatactgtcttaagcactatgcagattaacaccatacttttcttccattacatctttcaagacagtcactcacaactcagaagactgatacagcattagatgaaaaaaacaagattcacagatatatgtagtgaaactcaaactaggagtcttagagataaaaaagataagtagatatttaaaatgtagtctgttaaagatttaatcggtttaaagtataagattagaaagacaaagtttctattgttttgaaagttttaagtaaagaaaaaaaaaactggaaaaaatgtctttgttgttctttctccgttcttaattac

SEQ ID NO: 2202 - DNA, 430 bp, Rattus norvegicus
  Genbank Accession No. AI230260
catagccttttcttcctttatttcatatccccaccacagtaacaattcctttaatttaaactaaaaaccatagacttcctgaaagggtggcagcggagggacggtggtgtcacaggcagaggaggtgggagggcactcagcgaatcgtcttgactgggctcttgaagttgctggcggcttggagctgcagctggtaggccattggatggatcttgaaaccgtagagcctgggcacaaactggttggccggccgcttgggccggtactcgggatgcaccatgaagagcatgtgagggaaaccagtgccgaagtatgcgccatccgtgtggtggtgcctataggacttgggtgtgtacacgtccatgcacttggggcagtagagcttcaccatggcctctcctgggatgtccgaaaggccgatgggaaacat

SEQ ID NO: 2203 - DNA, 418 bp, Rattus norvegicus
  Genbank Accession No. AI230284
atgcaaaaatttatttgaccaaaatgtagaaaaagtgataccattacgtatgatacaatcgcaagaatctaaagaacagagtagattttatcagttgcacagtttgctaaaagttcatctccctggtagtgtgatgcttaataaataggagtgaagggagtgtgtacatggaacagtattaaagctcgatcggaaggcacatgggcagcagtgatcaccccagcattctcacctgggaagctgaagtaaataaatctgttctccacggcggagtgtggaacagactcagtaagatcgggccaatctacttgtgctttatgacttcccatagacgggttttaatttttgctctgggtggaaaatttctacatttttcttgcaacaacccctagccgctccaacatcagaaccttgtgcc

SEQ ID NO: 2204 - DNA, 576 bp, Rattus norvegicus
  Genbank Accession No. AI230360
tgcttttgaaacttgaagttaaggaaacagtgtggtgcaagtactgctgttctagcccccaaggagttttctgtacaaaattttgagaatcaataaagatggaagggagaatttggaatgtttgaaccacagccctcagaactttagtaacagcacaacaaattaaaacaactcatgccacagtacgttgtcttcatgtgtcttgcaatgaactgtttcagtagccaatccttttagtatatgaaaggacagggatcttttttattgttgttgttgttgttgttgttgttgttgttgtttttgttgtttaagtttactggggaaagtgcatctggccaaatgataggatagtcaagcctattgcaacaaaattagaaagtttgttgtataaataagcatgtaaaagtgcacttaaaatgaatctttattattcccgagattttaaatagacaatccaaagtctccccttctcttgccatcatcttgtttaatcaactatttttcaaggcactcgatcagtgttgcagcataatagaaagtccaactactgtgccttgtggtatttatttacacagt

SEQ ID NO: 2205 - DNA, 518 bp, Rattus norvegicus
  Genbank Accession No. AI230370
agattttgattcttttctttatttaacaagatatctatatctttgacatttaagatttactagaataagggataaccaacttcaagcatcacagttactaaccataaagaactttaagcatggaatcttcaggaagaaaaaataaatcttaaaagggtggggggcggctgctgggttttgtgatatatcccaagtccttaaaatcccacgtagaagctgaagaaactaaatgtcaaccaggggcagggtttacctcatggccgtgttcagctgcaacctctgataaatcgtttacagaacactcaagtgttgatatcgacatcacgggcttgtgttttctccacttgaattacacacatctaaggcatagttgtggctgcataatctctgactgatccaagcatggaaacagctgctctgtgtgttcaggtaatacatacacccggacaccagtcacccgccgccaaaggtggccacatactggcccaacttcgcgaaacaaaagccgccagcattag

SEQ ID NO: 2206 - DNA, 663 bp, Rattus norvegicus
  Genbank Accession No. AI230431
cttgtccaaaagaataacacagactttattagaaaattatgaagtattaactgtcaactgaaagattacagttagggggtacgcagactcattaactgcatggatcacagcatagccacagcttgctactcagagttctaaagaaactgttcatgttaagaagtagctcttctaaattagaaatacgcagagaacaacaactagcagaaaggcaggagacatacaggctgcaggaagatgcgacagttctgaaatcagaccacttgctcgtgaacatctgtaagcatcacatcggctctctctctgaatttatatacatcaaaaatatactccaagctggtcgcggatggaaaataaagcatacaatttaaaagcaaaatggtgagcatttacaacaaaatgtgaattacctgtacacacgttttaagaggcacaatctgttctatacagtaactgtcatactgaattcatattatacacagtgctatctgataagtggtttgagtgaaaacacagtaccgaaacattgatacaaaataaattacatattacttagtaattttaaagttacagacttcaaaaaaattttttagccaaatgttcaactaaaaacaaattttatgaaaaattatgtcagattttacaaatggcccctttcaggct

SEQ ID NO: 2207 - DNA, 546 bp, Rattus norvegicus
  Genbank Accession No. AI230439
  misc_feature (1)..(546): n = a or c or g or t
ggagtttcaaaagtctgttcagtcccaggtgaacgtacacttgcaaacaagccacaacactgtcctacaggccccgggaacccggggttctcagaagcccgtttcttctgggctcaaaccccaggtggttcaaagcaaggatgaccccaggctggcaaagtcctgattttcaggctcaggctgcaggtgacccttggtgtagctgggttataggggcagccaaggactcaggctggggacccacaagcttgagggctcactccccgttgtgcctggcttttccagtcatccgacggcggcgctgggtcttgctggtacgagtggcacttggaggtttcttggtggagtcctgcgcccgccgagggtgtttcctcttgaccttcttccgactgtgtgcatgcagtgtagctgtgagggaggagatgcgctgagagagcacgggatccttggacttcttgggcaaggcttttgtaggcttttccatggatgacacctnctgctcctgggacccatcctggtccccttgctcaggcaggggtagaccta

SEQ ID NO: 2208 - DNA, 417 bp, Rattus norvegicus
  Genbank Accession No. AI230514
caatgtttttttttttttttttttttttctgttttgtttttcttttatttatctacattcagcggaattcaaatgtactgcctgaatgatccagacataccaaaaaaaaaaaaaaaaacaaagacaaaaaaacaaaaaaacaaaccccactgttttttaaaataaaattttcacttataaaactgaaacactaagcattaaaataatgaaagctcatttaactcacttcacaaaaagcattaacagatgacgtatcccttctgcaactatttaaagacacccgatggaactcacaccgggcataaacagacagagggattccgcacggcaagaactcggaacactactcagacaaggtgtaatggtaactaacaaaccactgaagacactgagtccaaaacacagttaaatagggtc

SEQ ID NO: 2209 - DNA, 451 bp, Rattus norvegicus
  Genbank Accession No. AI230525
agatttatttattttatttatatgagtacactgtagctgtcttcagacataccagaagagggcatcagatctcattacagatggttgtgagccaccatgtggatgctgggatttgaactcaggacctcaggaagagcagtcggtgctcttaaccattgagccatctttctagcccctacattgagatcttacatcatcttttttactctcatccacccttcctaaaagaggggagaggcacgatagcatatgtctataatcctaacatactctgggacactgaggcaggatggtgacaagcttgaggccagcttaggctgtcagattttcatctcaaagacaaatatttggggccaagtcaaacgttaaagttgatttgtacagcttcacgctgggtcaagggatggttaagaataacaaaagtccgtcttcatcctttgaccctcgtgcc

SEQ ID NO: 2210 - DNA, 655 bp, Rattus norvegicus
  Genbank Accession No. AI230596
taaatgatactctattcaaaatgaattctgaaggaaaagttgctcaagtctgtttcagagcataccctttgaaatctttttagactactcttctagaattcatcataaccccaaaatagataaaagctattatctggaagttgccctgacaagctattgcacatctctggtaaatcctgctgaatgtaaggaatattcagagctttcatacctcatcatgatgttatttaagcagccaacttacatgacctgatttactttgaaaaatttgtttcattcaaactagaaagttccagagacaaaggacattgctcagccaagagtgtgaggcgttcttgccctagtctttacttgtgtctgtgctctgggatggatgccgtctgatgtctgttactgatggagcagacactacaaaactattcaactcccatctgtcctgttgttttctagtgctgctttgtgctgagagaacatgttagtttactgaacttgacctgtacaagactgattctttgtaattttagggataaattaggtggttaatttaaagatgaactttcaatgttgcctttacatcacattacaatatcacttctttgagaagggtaatagaagcactgattcatagtaaaaattttgtttttagcctcgtgcc

SEQ ID NO: 2211 - DNA, 521 bp, Rattus norvegicus
  Genbank Accession No. AI230625
  misc_feature (1)..(521): n = a or c or g or t
aagttgataataatttattaggctatgtatcacttacaatgtataataaattatataaaaaataccacagcatccttctaaacaatctctcatattcatatcctaatgctcgctacggtgtctgtaggacatttaattagattatattttagcattagccagaaagtttaaaaaaacattagaaaatcgttcacagtccttcagatttatgaagggccccattctttcaactttgggcaaaccattttggaatgtgtacaaatccataaacgaccaccatgctgggcaaggcatccagttctttgactttaacaccagggggcgcactgtcttaggcattgtatgaaatgcaagcagtcaattactgatctgtaaaaatcttgcccccataaacagcacggaggtttagccacattttaagacattcgggttaaaaaacaaaaaagcaaaacttcagtaaaccatttacgggtcatattccttctctttcctccctctccttacccacttngatatttttc

SEQ ID NO: 2212 - DNA, 492 bp, Rattus norvegicus
  Genbank Accession No. AI230632
caacaggatctcaacattttaatttaaaattaactaataaatcacaattctatattgctttaaagattatttttgtttaaaaatgacacatctcaacattaaccatttctctttgctattccaggttagtttatccaggtcagaaagaataaaccacagtgcagctcccttaacctcggagtcaggtttgaatgacagagtccgtcgccagcaatggacacgcagataaccatccaagaaagtgaaaatacaaaccccagactgctctgttgcctaaaagcccttgtggagtcacagcacaggaggggcaggggcacgtgtcccctgcgctgtctttgacgtaggatggagcacctccttgagcagtccaagacaagcagtcccactgtgtggctggctttctactgtgtggcagcactgtcaccacaatccacccagacagctgtttacaaacagtgcacacagccagagcatgaggcagcacagcgtccc

SEQ ID NO: 2213 - DNA, 556 bp, Rattus norvegicus
  Genbank Accession No. AI230668
ggttttgtagataaagacttaaatttttgtgcaaattagtggtggtaaagcacacatccattggactatgcaaattgatttctagtagcagcactgagcaactgggcatttgctagcacacaccctttcctctcacctgtactagaacttgggttgaggaatgaaggagcagccttctgtttactagaaaaatgtttgggttcacatgtggtgctgctgccctgggtacaacccacctatacccagggccagccagtatcaccagacctctgctgggcccagccaccaagcccagtttttaatatgtagaacacatgggctcaagttgaaaccttgtgttttatagaacggatgtgtaggtgaagaaattggattttggttatgtttacagcacttgggattgtgttttcttgtacattttgtattttaaaatcgtttataggagtgcagtgctccttatacaaatacaaagggaagatgagccagcagttcaggctcctcctcagttacagtgctgaaataataaacagtgacagatcaaaaaaaacctcgtgcc

SEQ ID NO: 2214 - DNA, 630 bp, Rattus norvegicus
  Genbank Accession No. AI230702
caaaagttgggtattgtttactttaagcaacagtccaggactaagaagtacagggatgcgactttcttcatggtcaagcaccagcgtcatgcacatggcagagttcttccagcgtcatgcacatggcagacttctttcattaggagtccctgtgggccctacagccccactcggggacggcctcccttgtggcttcaccttgcaattccaggcagcttgcttgtatacctgaagccatcctctgcactggtggctctgcccacggccggccagtcacagtggccattggcttcctctgctttgcaggcagtgggatgtgaggtatggccactttgatcattccatatggcacaggaccatgcactgtgcaaaggacaccgatgtatggtggggcaacagcaaggagagcagagcgctgccctggggacagctgggagcaggggctgcagggcagggcctgtggctgctgtctgccccacagtaagccaagtacagcgtcaaaatccctggtacacaagtctctacacatcaggaaccagatcatctgttcttaagaacaggctactactccggtctactactaaaacacactcatgccgcggcccacagacctaggagtcagacagaccc

SEQ ID NO: 2215 - DNA, 585 bp, Rattus norvegicus
  Genbank Accession No. AI230716
atgcaaaaatttatttgaccaaaatgtagaaaaagtgataccattacgtatgatacaatcgcaagaatctaaagaacagagtagattttatcaattgcacagtttgctaaaagttcatctccctggtagtgtgatgcttaataaataggagtgaggggcagggttcagataagctataagcaggtgactctccgtcagcactgtaaactcgaggtggccccacactgctggggaatgtggaatgtttcagggagatgttaactgaaaaagcaaaactacaatgccaaaaaatatgtgcagcctctagagcgctccacgtccagttcagtcaggagttctcggactgtattagtgtcattcccaaaggaattcaagtctcagcaaactcaagctcccatttcttgatccctgaacaatggatatgaagttaagccaattgctttctctatcactactttgcggctggagagaccctttgttgcctaacccttggcatcaatgttctgatggctggcaacctgcatattatttgagacagagtctcgctgtgtatcgctggtacctggctttgctagcagtcttgat

SEQ ID NO: 2216 - DNA, 729 bp, Rattus norvegicus
  Genbank Accession No. AI230724
agttagaaacattttatttaaatgtgtcaaataaaaacctacatttccagaccataagatgttaatacattcaacaaaaacaatatttactgctgtgaattttacagagtaataatccagatccattttgattagatggttgatgaaccttcctaggttacactttacagacataacaaatcccttataataatgtaaacaaaataacttttccctaacgggtgaacttgagaacttcagtccattctttctggacttgcacttctgtgtggacttcctgatggggaacgacttcttttaggagatggagatctggattttgatcggctgcttcttggtcgtgaaatagacctggatcttgatctcgaccttgagcgggatcttaataaaaaggaaaggggacacaattacaagaatgcctttataactaagcaccttcccagagagtagataggataggaaagagtagaaacaattactgcacaagtcttgcctctcacatggatccaatctaagaaccactatttcagatgcctacctccaccatacacagtatggtcactacgcctacaaagacacaacagtcccactttctaacactaatcaccacaatcaccaagtggttccatccaactgctgagctgactttattcttgttatcataagtgctccgtttgtcaaaccaaattaggctgaccatatcttttgaaaatcttgggaccctttaat

SEQ ID NO: 2217 - DNA, 693 bp, Rattus norvegicus
  Genbank Accession No. AI230737
aattttgagactgggtctctctatgttgtccaggctagtcttgaacttctggattcaagtcatctacttgtgtcagcctcttagctcctaccaccacacttgactttgcttgtaactttgaaaagtccattcaaaattaagctcttaagagactgaatggaaaggcaattttgtctgaaggatatttcctatgtaagggagaatagcatttgcagaatataattctggtgctgctagggaaaaatcagtacgaagttatagttcccagttgcttttaaccaactacaaccttctctcaatataaagtattcaagaataaagagtatggtatctacttatcagaaaggcatgtttcctattgggcaaagttagtgaaaaagtgactttactcatttttgcatttacctcggctgtataagcatttcctagcgcatggatgcttcttccagaaatcaagaaccaggtgaatacaggactaagaccttcctggatgttcttcccacatctagtatgttgaccccaacactgaacttgcaaatcttaagttgaccctgaatactcaggcttcccctatttcctttcagctgataacagattcttttgaaagctctcagcagatctgtatagttgcttacctgatataaatgcatatcaatgcctttaaagtatgaatctatgccaaagatcatcttt

SEQ ID NO: 2218 - DNA, 643 bp, Rattus norvegicus
  Genbank Accession No. AI230748
ttttttttgaatttaaatgcactttatttttagacaacccacatgacatgttttttttttctttttaaaaaaaaaaaaaaaaacaatgcctccactccaaataaatcacggtcaaaataaaagctcaagatgatatcagtcccatttgtcctaagtcctggtgttgtatggatggtaagcagcagccaattatggtgacaggcgatagatccaatttgttaacatttttccatctctaagccatccttaaagaaaatcatgaatggagtcacaccatcttcacggtagtccaggagagcaaccatgccatctggattcatgttttcaccaataaaaaactggtagttattgaaattagcaaggatgtgcttaatttgctctgcagctccagtcataaaaggctttaccctttctggtttctgttcttcaagtttgcccttgagtgatttcatgtagtctttgatatactttttgtaggcctcttttgtgaagctggtttcttgtaagtgatggttcatgacaatgtcaacaccggtgactactgtgctttcggtaccttcgccctccggaccttcagcggaagcatttccaccaatgagtgaatcatcgatggcaccctctgttctactgaccatcttgccct

SEQ ID NO: 2219 - DNA, 639 bp, Rattus norvegicus
  Genbank Accession No. AI230753
ggtatgaatctcatttatttaaaacagtatttctcaccattctcaaattgaagactgcaaaaaatagaagcagcgcgttatccttggccttgggagcaggtcgctgccttccccctctgcagccctaagccagtccatcccaccgcaggcagagcacgcactttacaaaacagtcctgaagcttaatcaaataaaactattgtacacgacatttacattagaaaagagctgacgtaggaaaactgggtgtgtggttccctttaggtgaagaccgctccacagttggggcaccttcgcttcctcagcgcgaagcagcagaggaacccgaaaggaaacaggacgatggccaagaagatgcccaggcaggtgaagcagtattccaggacaccaaccctgcagaccgggcagcctccgaccacgacgatggagttggcaggataccgggtgaccgctcgactgtggatgttatagacccgggggtggctggtggggatccctgtgacgaggtaagggtagggcggcggcgggggcgcggtggggatggccccgtagccgtgcgggccgcacgcgtagtcgccctggcctgcctccaggttgtaggcgggcgggcgctcctgcaacaagggcttgtggtccatc

SEQ ID NO: 2220 - DNA, 641 bp, Rattus norvegicus
  Genbank Accession No. AI230758
ctctgaagcaggtaaaatttattaaggcattatctaagggacagtggattctcagctctcactttctcatctgaaacgactgcaacactccagttctccatcctgtcacagttgctggattcttggaccaggtatcagggtctgtcagaaaagctcttgctattctgggccatgaatgcaggaaagaaactggagtggaatgtcactatgcctgatttacttcaagacaaggtcttacgtagtctaggctatcattgaatttgctatgtggcagtcaggctttgaactgaccctcctgcttctacaccacagggctggcccaggatgacaggcttgtgctatcactattcatcatcctcattttttcaggaaaacaattttttccagaacattctagattctagaaaaaatatttttgctttaaaaagactgatgggaaaaggttaaacacgtctcattcagactcagagtaggggaagacctgctgtgcaacaggactgttgggaaaagcagtcaagtcagataggtgttggccctggtccttctccctacttctcttcaggggctttctcagtgattccaggagcaaagtcctcaggtcgtcgaggccaggaaaccttccctaacaagtccctcgtgcc

SEQ ID NO: 2221 - DNA, 488 bp, Rattus norvegicus
  Genbank Accession No. AI230825
acacactggctgctttattgacaggctcatgagggacagctgtattccaaataagcccctacaccttttctacaaaggcaaacaagaaaaatggtgtgccccagcaaatcccagtcaagggacctgagtagaccacaagcactaggaggctgggaaggagagaaagtccagttcctcaagggcaaggtgctggtgaggtggctgaggtgattggaggtcctacagctattcccggcttgggatgtcagggaccgtcaccggagaagacagtgggctggagaagggagcactcgaaggctttcagtcacttgaggcatagggttctgtgaggaatcctggactgcatggtgagacacagcaatcactcttctccacccctgcagtcacatctgcagccacgtgtgcagatactcattcacaccactccacacacacagagggagggctggcccggcgctggacctacaccctggagcccaggaatgtct

SEQ ID NO: 2222 - DNA, 438 bp, Rattus norvegicus
  Genbank Accession No. AI230884
acatttacaaacattaaatttattataactagaatgaatgtaatggttctcagatttggccaccttatagctccgattaaggaggggattttttttttaaacagaaaaatgcattataacttggtcagattacctgcacattaagaaacaacatctaaggaggaaaacaagaaaagcaacccttcagtttcacataattaaagaacaggagaaagcacacaagcaacatcatagctaaatttaccaaaccaaagccagggcgattttctcttctgattatgtgtcataaaaaggtccgctgtcttatatacacatgtatataatgttacattccagcactgtaaaaagtcccctttgccccctccccccaaacttttcagtctagtcgccgaacttggaaggaggcgctcgctcctgctgccggtgcatttcgttttc

SEQ ID NO: 2223 - DNA, 469 bp, Rattus norvegicus
  Genbank Accession No. AI230914
gaaaatgttactcttttattatttcaaggaggtaatacatagcccagtacaccaaagcaatggggaatcagaggcagcaaatggccagtggtttggggaagaacctcatgctgcatctccaagctcccgtctgcctgctcgcacaggctgggacagcggcatgagcttgctatgactgtagcagtggataggtgagcaaactcagccggtgcagaggcagttccagaattcagcacacggacagcacttgccttcctgctggtcactgtcccagcagcagctagcttgcctagcacttgactgtgtttcagagagcctggagtgggcagggcaggagtaaatcctgagtgatcgattacggtgaagccttagtagtgttaacaccctggatgagaaaagagcactgtcttggagggtgggtggggagaaaggactagaaggagcctgggctgcagcactgccgtgagga

SEQ ID NO: 2224 - DNA, 547 bp, Rattus norvegicus
  Genbank Accession No. AI230919
agatttggatctttttttttttcttataagaacaagtttctctaaaatccttcagccaccagtgaaatgattaggcagaataaaaacttctgtagagggagtgctgtcatcaaaaataaatacagttgcatgggttgctcaaagacaaaccaaactgaacaggaaggcggggctgggacatcatcttaagtgccctccatcatcttaagtgccctccatgttggttcactcagtgggctgaggatagggagggcaagaagcaggtctggtcaccatcttagagcaggtggtcagcttgtccactggatgaatcttgttgtagtcagaggggtcagcaaaggtgaggggcagcaagccctgcttctttagattggtttcatggatccttgcgaagctcttggtgatgatggtgaactgagacttgcacttgagtccgtgcgccagggcttgcttggccacagctgctgatcgtcccatgtcctcggagcttgaattggtgcaactgccaatcaaacctactctgatgtccagaggccaaaacgatttc

SEQ ID NO: 2225 - DNA, 435 bp, Rattus norvegicus
  Genbank Accession No. AI230945
cactagaacaaaggaatgtttattacagcattgctaagctagcttcctccataaataaacctgtacagagtaggacataggactgtgatatatacagaggggcagaggacacagcattcgagccaggatctgtccccatctccaggctcagtgttctaccattttcaagtatattagcaaggccgctcacatctgataggcatttccaaggagtagaatggattcttgagggcaaagtctgagtaaatttcataaatttttcggagaagagaatctattccagcttgcctaggatctgccaggaccacaaacttgatccctgtcagtgtttggaagcagtgcagtttgaacgtgtctgtttccagcatctcaatgcctgaactgccctgttccggagatagctgggaaccaatggcaaagagcgagcctcgtgcc

SEQ ID NO: 2226 - DNA, 596 bp, Rattus norvegicus
  Genbank Accession No. AI230981
  misc_feature (1)..(596): n = a or c or g or t
tggcacggcctaagagcgacaggtgcgttcgcacgctgactggaagaccacgtgggcaggagcggggtaaggcaccactctgggacagtaaggtagctcgcagtaacaagagtcagcaccacgagtgggtgctcagcaaatacttgaataaatgaaaaccataattagcacaattctgttcactgccagcaattcttcaaccccaataaaatatctattaaaacccagtttgtacctgaatgcagattcctgctttttagttcataccctttcttcagtgtttacatttccttgaaaaattaaattaaaaccatactttatgtgtactcagccacagacataattgaattactgacagccatgaacagattttaagtgaacagaggtcagataaagcaaacttgctcaggatagcacataatactgaatatgaacctacaaatgaaaataggtaaggaaaagtaacagttttgttttttaatatttgctaattttttaatgccttagttcttgagaaaggccaaaatctcatgttgacatgaacacattttaaaaaatggtctcttaagtgtaatanttaataaaactaggtattg

SEQ ID NO: 2227 - DNA, 596 bp, Rattus norvegicus
  Genbank Accession No. AI230982
gacggaatgaaatgttctattatggagtggtcatttcaaggaggagggacttgcatggtccaggggaggagcatctgcttagcaagacacttccatggtctggtgtctgtccaggacatcaggggactcacaggattcttgagttccatctgactgattgctggtcacagacctgctgaagggactttctccagagccaatgctacttgaggtggagtgggttcgtgatcgggcgagccgggtcatgctggcagatggtatgtagcccattcccttgcaaaaggtacttgaaggcctcggtgagcttcccaggctgaactacttggggcagtcctccacagtctgccatctttagcaaagttgtatttatagggtcgaggcgagaattacattcaaccacagcttccacagcatgtgaattgtcccccaccaccagtaaagtagaacactttaatgttttcaatctgttatcattttggcccagaataggtctttcgatctccaggtctctgcgtccattataggaacccaggaagagctggagattttcttgattgatatcttgagcaatgtgcagtctgcatgtttgaatgagg

SEQ ID NO: 2228 - DNA, 525 bp, Rattus norvegicus
  Genbank Accession No. AI231083
cgggacaatgagtgccctttatggaagcggatttattggtgttttgagagagaacatgggaaaagctgcgacacgtcgatgtgatgctgagtcccgttttaagtggcttctgggaacagtcacagactccaggagagcagagcgacggaatacagacgcagaggttacctaggatccccctcagggagtacgcttggcagagccgtgactccctttgtgtctttgcagatgtcaagcgaacagaccaccaacctgtgtatggaacaaatgtacgcatggtggcctgtgtgcagggaagggattttggtcagaccatgacaaaaaaggctatgaggaattaaactcaacaattctttgtgtctcagaacattttactggcaacactgactgtatcaaacagacattcctgggaatggtggattctcttcctatccccagagaagcatatcaggaaacagacacagaacagaggggggtactgtcttaccacgggatcagcacatcctcatgggggtaaatgcctgc

SEQ ID NO: 2229 - DNA, 328 bp, Rattus norvegicus
  Genbank Accession No. AI231094
ttaagaagatttattgacagactagtcttgcagtccagaaccgggctgacggaggctcaggaagttgtcatggtacaacccggtgtgggatccactctctacatgggacccctgttccacaaggtggctgctggggggtgggggtggggagatccactccagtgtgaacccctataccctgatggtgatggggctctgaggctggcacagggcccatctctgagaggccatgcatacctgctccagtgcatgctgagctctctaatgtctggtaccaaggacttgaccttgagggggagagaaatgaattcagataactacttgtgcc

SEQ ID NO: 2230 - DNA, 523 bp, Rattus norvegicus
  Genbank Accession No. AI231140
atggtggaaaaaaagtatatatttagaattaaccatctggactcactttagatgatcccaatcttgttggcaacatctagagcatcataatcaggagccaagcgaacatatgccttcttctctccgtcaggccgtatcagagtattgactttggccacatctatatcatagagtttttttcacggcctgtttgatctggtgcttgttggccttaacatccacaatgaacacaagcgtgttgttgtcctctattttcttcatagctgactcggtggtcagtgggaatttgatgatagcatagtggtcaagcttgtttctcctgggtgcactctttcgaggatattttggctgcctccggagccgcagggtcttgggccgtcgaaagcgaagaaggaagctcctgcccctcccaaagccgaagccaaagcgaaggccttgaaagctaagaaggcagtgctgaaaggtgtccacagtcacaaaaagaagaagatccgaacgtcacccactttccggccctcgtgcc

SEQ ID NO: 2231 - DNA, 477 bp, Rattus norvegicus
  Genbank Accession No. AI231180
ctagttccaggaatagttgttatggggttgatctgaagggggcatttgggaaaatagcatgtttggcctacctgggtgctttgggctgggactgcaccctctccactcagcctttgcagttgcctctccttttcaaatgcttttaatgcttttcaaacagtgagagcttgttgcaatggctggaggctgtactggtggctgaaagcaccccttgcctgcccgcaactccttccccctccaggaaatgcttgaaaggggccatgcccgccttgaggcccccatcttgtgtggtagaatgttatatccagggtggccctgctcctctttcccccaaagtctccctcaagcccaggagaaggggttcttgcaggtccctaggagctgatgacgtgcccggaccaggtctcatgcttcgtccctggtgccaggtgggtgatgaccacctctacagcttgcagtttctcattcttgggcggg

SEQ ID NO: 2232 - DNA, 551 bp, Rattus norvegicus
  Genbank Accession No. AI231201
ggagtttctaaacatgaaagtatcaatggttctactttataaccaatatttggaattgaatggacagctttattgccagacttcatttattaaaaacaatccatttatcggttccatgacatcatgactattgctttgtctgggaatgagtccctacagcaattaagtataaaaaatatcttccatcataattggagagtgacctgcattggagcgtgattctgagtaaagaattgattaaaaatacacaaagagttgggttttgtttttaaaaacactcccttacacactacaaagaaagaattagtattttggctttttaaattcctacatgatactgagaatgacagtccccagaggtccccctcacatcactggatgcacctcctcttctggagggcagattccaggggtgactctgaagacttgggcctccacatgtttacactggtctgagaacaaagacagcgtcgtccagaacatagtagtcattgtacatgtcaccttcacacaggtatggcaatctagtgaaagcttcgatgacaaagcca

SEQ ID NO: 2233 - DNA, 582 bp, Rattus norvegicus
  Genbank Accession No. AI231213
ggattgttacaaatcctcctttaatagttgatttcagagatgagcatatggaaaccctcccccaccctgcaaggcacagcctcacccacccttagcccaggggacaggggacagctgccaagaaataccagtccagatcctccttctcttgtccagacaactcagggtcttatgccagacctgagggacccatgcccctaagctgtcaggtccctcaccaaggaaaagctcactgggggctacctgggccagtcccccaggcagcctctccgttcagttccctgctgaactgagcttggggggagtattccaagtgtgtacaagaactgcctaccctgtctcccacagaaacattgaaaacccataaagaaagtgtcacagtggggaaaccactaacctttcctgtggcctttccctgggcagccatgggtgctagcccaccctccctggtttttaatattatattgttataatatgacttcagggtggggacccagctatcctgtgtacagtaatactgggagccatttcaagctgttaaaaatattccaggcagtaggaggaagagctacaggacagtaa

SEQ ID NO: 2234 - DNA, 638 bp, Rattus norvegicus
  Genbank Accession No. AI231219
gtcaagtgtttatttatacctacaaaagaaaacaagatggtatcaaaaggacaatttacaaactaagaatagtagtaacatagctctgagcatcctatgccctaacatcacgcctacaattcaagtctcaatgacaggaatgtgttgagagaccagcaagggcattagcagagcactgatcccaagcaaaagccaccaacctttttagatgagaagtctgcacaatggattgttagggagcagcagcccacagctttatacctaagcccttccccctaagtgagtaaaccacagaaggcaatcaacccagcttcagggtttgcctgcacctgtgctgacaacggactgacaaggaggcagaagtcacttgcgctaagtaggaaaactgctagttttctgctgtacccaggccaaaagagcttatgaaatatgaaatgtgctatttatctggattctgcctctgctggagaggggacagaagcaacctagctactgcttcatccccggaggcagtaatagaaggggtgggtattttgaagagctacagtagcacagaacagcccatggtataatgcttaataaaaaataaatctgaatttggttgtagaaagtatcttttacaggctggtcagtgtcag

SEQ ID NO: 2235 - DNA, 344 bp, Rattus norvegicus
  Genbank Accession No. AI231287
gggcttcaaatcagcctttattcagacctccaccccagcatgggctagcccatagaaagtctactagagaaaactgaggcctagtccctgagagcagcagaaaagaggcagagccatgcatggagtatccccaagactcacagcacagaccactcaatgctggctgctaaataaggtgatggcacctcgtgccaaggagacctatatctgaggcctaggaggaggtgggctggggaaaggcaggagccaccatgctgggaacaaaggcacaaggcaggtggtgaaagattctggctgcactgtctcaagagactgacttgtaatgtctcagaccccctcgtgcc

SEQ ID NO: 2236 - DNA, 659 bp, Rattus norvegicus
  Genbank Accession No. AI231292
tgttttttttttttttttttttttttttcattttttaaattttttaattgagcaagagcaaggtatgacaggtactgcaaggagaagagaaccaggggacagctgttctgacgtgcagaacctgcctgcagcagcttctttactgtctcctggtgggaacaccccggagatgccctccagagctggagcacccttctcagggataaaacactacagggtaggggaacaagtaagggaccattggcatggtcctatgagactcagctcttaggcatttttgcagctggattttgtcagggtgtgtgtgcctttccagggcacgctgtagatctggaaggagcagagtgccttcctcatcagatggggctggtcgtggaaaggacagttagtcaaatttgtctgggacttggtacatgtagttcggcccatctccacatccaaataatagtttattccagccacaagctgcttacgagctctcaccacctgtatggcgcggctgtggtacgcatcgttgctgcccttgttgtactcgcttacggcgaagtccaacgctcgctgcacgccctcctcgctggcatctgcctcctgcggagctcccaacaatcgcgggggtggcctgtaagttccggcccaggccacggccaggacggccagca

SEQ ID NO: 2237 - DNA, 477 bp, Rattus norvegicus
  Genbank Accession No. AI231305
cgtggcagaatgaattatttatttaaagcagctacatttaaagtctgagaatcggattacattatatctgtcttcattcttcattattatttattttcacaataggatagatagacttttccctcagaaggacggtgtatgcaccgggtaagcgatataccgttgggcttacatcttcagacatggggtgctgccagctcacttcgctctccccgaagcatctcagagagaaggacgaactcagcggcacaatcttctcattctcatttggaaggatggagggtaataagagctggcagacgatgaggctcggccctgtgaggagacagctgaggaccagaaaggcctgggaggtccccatcgctcctgagaacttctcctcctacgtcagtttgctaagaaaatccgatagcccggaggaaaaagtgagccccaagcctccagtcctcgcccacagttcctctgtttgtttcactc

SEQ ID NO: 2238 - DNA, 586 bp, Rattus norvegicus
  Genbank Accession No. AI231309
gaaatgaaaactcaatgaccaactttaattttaaaactagaaaagaggaaaaaatgtcatcaataatgaacttgggtagagtacaacaaggagtatgagttattttcaaaggcaacatatcctattttgtacatatttgcatataaaagttgtccttcctcagggtcagggagacaggactgttgcaacgggcctcctttgaagtgctgttctctcttcattgatgatgttcagggcccaaagaattcaagggcagctcctccccgcttctcctcagacttggatctcactccagtttaggcttctctttttcttcttctaaacttctcggggcatcccagatgtagctgttgagtgcttctccgagcaagtacagggaattcattaggagggttgtcgacccaaagaagatgatcctggctcctgagccaatgtgttccaggaaagggtacacccacatgccggtgacatgatgtatccagcacacccacaatatatagcccacggagaaagtgcatatggcggcgagcccactgcttctgctggggtactggtggtgggacgttctcatctcgattagtataaa

SEQ ID NO: 2239 - DNA, 582 bp, Rattus norvegicus
  Genbank Accession No. AI231355
aactaaaagagctgacgactttattttcacatttcacaatgtaagtgaaaaccgcacttttttgtaccacttctccctccagaagcgttctctctgttaggaagggaagttcctcatcatgcacctaggaaacactcagggtcagcaccaagatctcctggcgaaacaacaagaaatacaaaaggataaagagcgcttctgctcttatctgtctggccgggtcatgccaggccgtgtgggcaccatcatagggcgggcgggaggtctcatcattggaggcccgggcatcatgggcatatggcctcccatgggtggtctcatcccaggagctggagggatctttccttgttgaaatgcagccgttgttttgtcaatcaggctctgggcctgttcttccatccatttctggtaatagtctttcacattctctttgtgtttccgaccactgcagtgtgtcttcctcacagacggagaatcgtgggtaagatacgtatcacagtagtcacaataaaacttgggcatgttgctccacaggccgttggctatcccggtccccgccgccaggaactgacccttgtgccc

SEQ ID NO: 2240 - DNA, 561 bp, Rattus norvegicus
  Genbank Accession No. AI231566
  misc_feature (1)..(561): n = a or c or g or t
caaggataaaataagtctttatttatattcttatagtaaagggggagccttaacttgcagggagattcttgggcagtatgtacaacatacttttatttccacggaatggaatcaacaccgactgagactacaaagtatacactaaaaatcagcaaatgctggcaacagagtaggaaaaagacaaagaaatgaagcctaaagacgaaaaacccttcactgggatctgctgaccacagtcagagccagggccggatcacacagtggcgacaattccaggacaggaggaaggaaggagggctgggctgtgggtttagtaccaggtaagtcgctcttggtgtttacatataaaaaagttggctctgtttcttagaaatacacacagaagtgaagatttgatcattactttatgaatctgtcgctttacaatatcgacatcatcaaaaataggggcatttcattcagattcaaatttcagtagcaggaaataaatatcaaaacatcatcactggcccttaatacaaaacctntaccccacctacaacttcctcccagcccacccac

SEQ ID NO: 2241 - DNA, 659 bp, Rattus norvegicus
  Genbank Accession No. AI231776
aagacttttcagagtttaatgagaaacttaaaaaaaaaataatacaaataagaaattcactttttttaatgtacaaaaaaaaaatgtatgagaaccaaaagttaatgaacactgtcacatgtttataccactatctagttcatattaattttactcttcaaacaggaaggtggtggcaatttagggaacaagagaaaaccaaaacttgttctacagttattcttctacatgtgtaagctgtgctcacagagacggcttcttttacttctgtgtacaggagaagttcagttgtatataaaattaaacctgctcagcagctgaggaagactagaaatgatgggtccgtatcccggagcattgtcgtacagttcaaacaacggtgcagctaccagcttgtaattcttagggaccgcaaacaaggctttctcttgaagctgaaccagaaacaacttcttatgttccttgggctttgttatatgtgcaggaatatacgggtactgaggaggttcaaaatttggtctccaccagttcccaatgcagtcatcgatgacccagtcttgcaggactccatcttgacgacccagtatctctgtcattaagcgttttagtccttcaacttcatcttctcctgggttaagttcaccgccaggtaatttgaa

SEQ ID NO: 2242 - DNA, 725 bp, Rattus norvegicus
  Genbank Accession No. AI231779
gtctagtggcatcgggtttatttatgggaatgcagagcttaaggtttttcaagaggcacttgggaggcacagacgtaaaggcagccacagctaaaggtggactcttgtttcaacccccagggccacagaagacagcttcatcagatggagatgtcaaagtttactttctaaggcaatcttaaagtctggcattcagggttgggggcacagggcccatccacttctctcctagcaggtaagctagcaactccatgcggtcagacccaaatagcatgtaggttttaccatccacgtgggcaacagtggtgggcagcccaaaggccccatatttgcaggctgccccagtggtctccctgagcttgctcttcaccagttcggtggagatcttattcagaaggtgttgggcttgcgctgtggccattccggccttctctgctgcagacaaaatgttctgggactccgtgatatcttcatctcgggaccaaatgcgcatccacagctctctggacaccttctccagcatctctggttgctccatgctcaccgcggtgaggaagcgcatggcatttacagttcctttcttaacatgttcaccaaagaaatccttggggacgctcatgggaacctggaagagctgcttcaggagaggaatctctttgagtatgtactggcctttgtggggaaccataactggtggttggtttccactgtctttcatgatccca

SEQ ID NO: 2243 - DNA, 658 bp, Rattus norvegicus
  Genbank Accession No. AI231785
gcaaccaagtattggctttaatgaaaactaccaaagaacaagagctaaccgcaaagcagcagccagtcagagctaagtttctgcgcagaccttccctcaggccgtctctggaccatggagagttagtcactgctgttgaagcgttgggcagaggctaccatggagactcatcggatcgataagcagggtgcttgggactcaggaggcacttagatacagaagaggtaatactcccggccagccagaagattctgggaagccatccttcacagtggattgacaggttatctgacatcctcaagcatccctgcctcatcttgcctggacctgccgacgtaatccaacagcaaacagccatggacactaatctaatctctccagtctcccctttccctcccgaagcctccacaaaggctatctcagggggccatggctctggctctcaagagtagtagggctgcaggtatgtttttggaggctgaaaggcataaaacagcattcttgaagttctgttcgtcttatggcaccgactcaatttcaggtctgatttctcttccttcccctccctccgcccatggcctctcaccctgcacagacacagggcaccaagcagcctagcctttgatctctactgggatctcccagcagaagaggttat

SEQ ID NO: 2244 - DNA, 678 bp, Rattus norvegicus
  Genbank Accession No. AI231789
gagcagtgtaaactttaggctttattatatcgagttgaaacccatgaaaacagttattttcttatgcacaacatctgaaaatgtaaaatatagaaccaagtttcctcttatggacagtgtaacagaacagagtacatgaaaagaaaatgtccagtagaatcccaagcccatgtcacattcagcaaggctgtcttcctgcctggtccccaagggcctgagagctgcagggacagtggggcacagctcggctcctccagccccgagtcccacagctcaaaggatgggagcgggaggtggggcaaggccagtcccgtggctggaaggcagcattggcaggcacagctctcactgggtcagtccagttatcagaaggatgtggggtcttcgcacattaggaaggcgggtgatcctccccccgaatgctccgatacttggccatgtcttctggaaacactttagaaagttcctgaatcagtaggcttttaaatttcttcattgtgtcgatcttccccttgacttgttcgtttttagcaagagccctctccaggcattctttggtgtagagctggggatttcgaccttgatcaatgtattcaaaaacttccagaggcaccgtgatatcatgtagctgctgtctgcatttatctatgtcctgtaagcccgtaacaatgaagttca

SEQ ID NO: 2245 - DNA, 410 bp, Rattus norvegicus
  Genbank Accession No. AI231797
gaggacaaaaacaacctgtttatttccatgtaatttatatacaagttataaacacttccttctgctgctcaaaacttttccggaaaggtctccatttcttctttaatcctgttttctacgagtaacgtgaagttactgtctgtattggagaggttgtagctgacaaacacctgtttgctggtcttcctggctaaacgctgagcaaggccggtggaagtcgtatcagaagtgtctccaaaaagggaggtgcacacagggatggagtcaggaagagcgagtccgttagccgcatgacatgaaagtggacgagctgctcccacagcctcgcactgaagttgtgaagcgacacgtccgcggcggcttgcggctcctccatcccgccagccaccgggccacagcctcctcgtgcc

SEQ ID NO: 2246 - DNA, 712 bp, Rattus norvegicus
  Genbank Accession No. AI231801
gaacacatgcccggagaaatgtttattgtactagaatgactcaaaacatttggctcttcaactccagtgaggatttcaaacatttacctattaagaaaccgtaaacactctcaagacaaaatttgaatataaacttttttctagaaaatatatgcacataggtatttcttagaccatgtgtagcccactcttctcttggtaatcttcataaaagcgcctcagtgactccgggattctgggtgtcacaatgctcaaggcttgagtgaaatgcctcttcataatgcagtcagctttaatgttttcttccagagctaggagagcggcctccttgcagactgctatgatctctgctcctgagtaggtgtcagtttggaggaccagttcatccaggtcaacctcgttactgattggcattgagtggaactgcaagttcagtatttcccttcttgttgctgcatccggtaagggcacataaatgatcctgtcaattcttccaggcctcatcagagccttgtctattctatctgggcgattagtagctgccaaaaatgtcacattttttagctgttcaattccatccatttccgttaacagctgagccaaaacacgatctgcaacattcccggcacctgaagaactgcccctttcaacagccaaggcatcaagttcatcaaaaaagataatggaaggtgccactgctcttgctttacgg

SEQ ID NO: 2247 - DNA, 607 bp, Rattus norvegicus
  Genbank Accession No. AI231807
ggccgcacaactttttttttttttttttttttttttttgctggttcaaaaagctttatttttacttggtccaagacttgggagaggctccagggcggttacaaagctgcctagtggctttagaggttcattcgggtggaggtgctgaggcggtcggtgcagagcagaggagggagccccttggaaggcacagaggcctagtcgtgcttcagagtgaggcgctcaaagagatactcgcccagagatgcctgggccacgccagtctgcgctggttgtggccctgccaccctacggaggttggtcaggtggttgcccatcttcttgatgagcttcacctccttatccaggaagtggctttccaagaagtcacagaggtgagggtctgtgcgggcagagcccagggcgtgcagatccaagagggcctggttcaggttcttctccagggccaaggcagcttccatggcctccagggttttaccccactcatcttgagatggcttctgcacatcctggaagagtgcacggcccccgcgttcgttctgcaacttgaggagacgctcggcgccctcgcgcttctcctcggccaattcgcggaagaagtggcctac

SEQ ID NO: 2248 - DNA, 663 bp, Rattus norvegicus
  Genbank Accession No. AI231821
ggccgcacaacttttttttttttttttttttttttttaacagcactgtgcagtttattaaccattcaagtacagtagcatctggtgagattgggacagaattgggatcgcaaagtgaacagatactcagcatctaatgggttggaagaagccactacatactcttcacgaacgtcttccacagtcaatacagcactagccattaacccagcacaccgagtgtgcccgagaggaaaagatgcaacgagaaaaatagctacgttagaaagaccaacactttaaaaaagagcaaaacactttcagtttctccccttgagcccctaaaacatctcacggtctggatctacctatacggtcctacatcagcttctagaatatttgtcaggagggaaaaagtaaatgacactggccagtacagtctttggatatttaggaaggggtcggggagaaagtcagttctcggaacaacttagtcagcctcggtctcgtccgcggggtctttggattctttgttcttccgcacctcttcaacgtgcttgtccttctctcgcaaacgctccagcttggcagccatttgcgcctcccggttctctttgttagcctccattttgtgggtcagtttctcctctgccattttgctgaagttgatgttctcctcaatggc

SEQ ID NO: 2249 - DNA, 589 bp, Rattus norvegicus
  Genbank Accession No. AI231822
ggccgcacaacttttttttttttttttgtttttttttttcgggaccaatacatttattcgaggagatgtgtctatcttaccacgaggggaggactaaatggcggcctatgtgacctgtgcgtaactgcacgggtgagtgaaccttcatgcccagtgtcaccggcacagacaagaggatgaggggggacattctgaggagtcacacaggaggaggcgccgcccttgtgtcaggaaagtagtgttgagaacaagggcagaacgcagcagcgccagcccccggcccaggcccaggcttgacggtgccctatttacaaagcaggaggggtgcttccggctgactggcaggatgagctgggctgaaggtgcagggatgccttggagtgacctttgcctctgcagccttcctctgcccgtgtacaagatggagactcaaggacctctgggcaggaaggggatgccaccaacactgttctcccaggctcccccaggtgacccacctccaccagcccacatgtggacagacacatgaaaaatatggacacgaagccaggctgtgctggagtcaccctcaggcgtctgagatgatggg

SEQ ID NO: 2250 - DNA, 637 bp, Rattus norvegicus
  Genbank Accession No. AI231846
gtcacaaaacatcattttattaattgattaattttttttttacaaaaataaacaatttcatgaacaagaagtacaaaagcttctggatatgcacactccaggagggggagagcctggtttcggctgcttggtggctttcactgaaagcaaatgaggcagaaaggccccgaccctacccccaccccaggtcctggctcaaatgcaatctgctcctccactctagtcttggctcatatggatgtgtgcactgctgcccatgacctggggctggctgaggagcaacccgtagggagaggccagagagccttcccacggctggctccctcacatcttggagcattcccccggcgatccatttggagctgagctgagagaacactctgtgactgactgtccccgtgcagctcctgcccactgtggcttatgcagcagcagcagcagcagtgtctggctacattctcaaactgtgaatgcagtaatggggctgcccatgggactatcccagttaagaccagcctgagccctgctcacagctccagagaggcaatcagatcccaaccagtgacgcttaggctgggagcaacagtcttagaccgaaagctggcaaactcacattttaacacttttgcatattgca

SEQ ID NO: 2251 - DNA, 578 bp, Rattus norvegicus
  Genbank Accession No. AI232006
gcggagtctcagtctttaatctcagcagtgctcacacacatgaaaccacacactctcggactttcagatcttgttgaaggctgcaatgtcgacactctgcacatgctcctcaaacttggtgatctcctcttcctcatcactgccgaacaggtcaatgtcattgtcctcgtcgtcctctgctggtgtggctcctttcttggctgggggctccacttgacgcataggagagacatgttgggtctgtggggctgtagctcggtgagtaggtgaactcttctccagagtgctcagccggacctccaacttggaaatggcctgctgcaaatcttgcaccacgcctcgaaagttctggttctctacttccagactggcaatccgcacaatgaggtcactgtggtctccaccaggtccactggaggctccagggcctgaacttccagccaaggatttctggatgttctctctggctcttgcaatgtctcggaggatcacgctggcgccattctcctgccgagagccaacggtcacaggcccattcatctgctcgtagaaatccctttctggatcggcatatttaa

SEQ ID NO: 2252 - DNA, 604 bp, Rattus norvegicus
  Genbank Accession No. AI232014
ccagaggagcttattgtgctgatttattatacaatgcagttaaaaaaaaatatctttgaggttggcctctccggttcaaagtgcagaactagaaacactgggtgttgacaggatggccgcccacttgtgcgagcgagcactggaagcagggtttggagaacatcaacccatttgctcctcaggggaagccaccttctgagctcccgaggcatgcactgttaactggcattcagttattcagcgtgacaaactttgtaatggcatcgtaggaccaagatagaagaattcctatttgccagacacacacaatgactagaaaaggagaaatacccaaactgagtgtcactccgctgaaggaaaggggaaaggcactgtgtccctctaggaacacatggctacggcatactccacatgctccagattcaccccattaaacacatgacaggaacttaacttctaccacgcacaggtcacgggtggcttgaaactccctctgccctctgttcccacccaagtacagacaggtattaagatagctcttggctttatttacaagttcatcctcatgtttccatggggggtgagaaactgtcaaccaacagtt

SEQ ID NO: 2253 - DNA, 650 bp, Rattus norvegicus
  Genbank Accession No. AI232021
gaaaacaagctttatttaaataaggatttaaatacattacataacattaaaactggaagggaaaagaaaaccaaaagaccagtttgttccttcacatggcactgggcagtggcttgtattgtgttgaagcctttatagctagccataagaccaacagcaccagcttggtatttgttcccttgtcgtaagtttaactgataccaggctggccttacccttcatgtttcaacatcccttggctaggagagatctgcctaaaaaagactactgccctggtggtgagctaatgtccatgacttctctggaaaggtagccctttctggattctgcctacctggtcagacaccaggggttctttttacagccagagagactcaactctaatgatatagctggggcagttacccatactctcagtcacctgggctgttcaaatggtgacactcttctagggctggggactgtgtcaagggagtcccaaggaacttctggtcagacatagcctccagtgatttgggggttcttggcttggctgaaatcctgttatttattgctttgttccagggtggactgtcagggcttactgcttaacctgtttaaaatgagggactttaagactacacagcatggctcttttcagtttattgcat

SEQ ID NO: 2254 - DNA, 560 bp, Rattus norvegicus
  Genbank Accession No. AI232047
aaaacaaaactccatttccatgcttctcaggttgtaccatcattgggcataaaaatcagtcaacatttgcaaggcagtgtcactcacagaatcacccagtgctattttacagtggtcattctctttacaacaatcaggcattgctttgtacaatgggcaaacgctataacaaacgccttccataaacagttagccctttagctattgggaaggtcaagagtcgcttgaagcagtcactggtcgcactaaacaaagtaccaggtggcagctatcaagcccctaaaaagtgtttttaaaaaacagatttacatcccatagtaagtcttagaaacctcaaagatagggcctatcatttcaaaacactacggatatctacggataaaaatctgcattcaactgtgcagcgttttcttctagatctggattaaaacctttattatttaccccaattagttcctctattaattctgctactctcggttttaaaaaggccatggttgccagttgatcttccacagaagaaaacactgcagcccgttccctgtgcttactttcctgtg

SEQ ID NO: 2255 - DNA, 496 bp, Rattus norvegicus
  Genbank Accession No. AI232066
cagaaactgtttaatgttagaattacaggcttttggcaagtatatggcaagcccatctgtccgttcccatgtccactgagaacacagcagagggggcatgccccaagctctggcctcagtccagacttcagcttgggtttgtccagcgagatgtctccagtccatgaaagcccatctggctacagcttgagttcactgggcattggctcccctcttaggccagccagcaagttgttagccgccagcaaggacatggtgttgcgagttttgtaggtggcactgcctgaggcctgggctggcgccccgtgtagagaaatctctggacaccaaatggtttcagtcgtcgagcaatggcctgacctatgcgccccagccccacaatgccaacagtgctctcggagagtccataaccgcacatccacaagccggtgttaaggagcaggacactacaatgaagtctgactcggcagccagctgagcaataggccctcgtgcc

SEQ ID NO: 2256 - DNA, 453 bp, Rattus norvegicus
  Genbank Accession No. AI232081
gagtacactgtagctgtcttcagacacaccaaaaggcatcagatctcattacagatggttgttgagccaccatgtggttgctgggatttgaactcaggaagagcagtcgatgctcaaccactgagccatctttccaggccccccccttcatggtttcttgaccaagtcttcattttacattccaaactgtgtgctggacccaaaacaacgaggattaaacatcacagctcccgaagttggacgttcactgcagctacctacatgcttgttattggtaaccgtagttctggcagcttgttccaaccactttccaggacaggacaagtttcaaaaacatttgctcaagcaccctcaaaagagacaggttttgttgcacctggaagagccggaggacacgccgggttccgcagcccacggcctacgctccccgccacgtagctcaacatgcttacg

SEQ ID NO: 2257 - DNA, 582 bp, Rattus norvegicus
  Genbank Accession No. AI232087
gggtagcataaattttctcaaactttaatcttcacaattattttcactctatacactttattgaaaaggtctagatttatttgacaaaatgattatgaccagaataaagatatcttctttttcatatatcagtaagtggctggaatagttaatttagtcatgtatcctggaaaatgagtttcaaaatcttcctctttttttttgaggtcagctactgtcaataatggacattaggcaatagatcataacacttcagtaacatgctgtgtcagaaccttgcataattcacacattcatttgctctctgctacattatgacttcatggattaaagtttattaaattccaaatatttcttgcaggagggaatgagtaaaacatcaggataatgctgtcttcatttttaaatatatattgttgttttaattgatacatagtaattgcacataattatggcacagtatgacgtttcaataatgtatagtgtacataataatcaaatgaaggtaattggcatgtcacaccagatgtaactatttcctttctttctgggacatggctattggacatagtcaattaattg

SEQ ID NO: 2258 - DNA, 567 bp, Rattus norvegicus
  Genbank Accession No. AI232098
attttgaacttgtacattttattcaaaggtatgaatgaagctaatcagacaagaaggtgtgagatgaatctgtgtgtgatagtgcatgactaaaatcccagcacttccaagctgaggcagaaagaccaccatgagttcaaggccagcatgaactatggagaatgattctgtctcaaaaataaaacaaaaatatccaaccaaagaatgaaaacgaagaaaaaggaacaagagttttgtgatgcatgccagtaccacactggacacatcactccactgggtctcctccctaaagctgtgtttttaatacatgaacctcaatcaaatgaacactgattaaagatggtgcagcagcgacttggagaaggaggagtcccactgacacaggcatccccaggaacagctggtctcataagaggagaatcattttccccatcttcccactgctgtgaatgatgtcttcatgggcctgggccgccttctccagtggatactcagaacctatcacaggtttcacccaacctttttctattcctgcttggaggatgcctgcgaattgctggaattcct

SEQ ID NO: 2259 - DNA, 539 bp, Rattus norvegicus
  Genbank Accession No. AI232103
gaaatggcttcagatcacacattgtcacagaaccagccccattggattgtcccaatccttggacgcagagcccgaggcaggcacagtggctttgattgaccacttgtggccctgagcacacaagtccctccacaggacaagtgcctttgcgcggctgctgagagatttgcggacttcagactgaagagcgaggacaaggctcttcttgggcttggctggggttgggttctgctctggatgggatctcaggggtcaccagagaagccactctgagtgacaagccccatgtcgtgtatggccctcaggaaaaaaaatgagcaccaggctgaatctggccacattcctggtctctgcccacggtgacaggaaacagggtcagatatggggtcactgtgaacttggaaacctgctctggcaggaagtgggggagttgggagagttgggtcccactcctcaagcatgaggagagccagttaccacatggatgagcaggtgcccgcctgtacaactggccacagtcactggacggtgaaagggga

SEQ ID NO: 2260 - DNA, 597 bp, Rattus norvegicus
  Genbank Accession No. AI232128
caaaatggaaaatgattttattggtcactacccataagtcaagtaaacacaaggataattagagagtggggaattcgggggccataaatccgcggcgccttctccaccggcgtcggaagctttatggcttgttgagttttattttgagagaaacgaatacatagttttggtggaagcgggactacccaccaagcgccgcgcgggcagacagacgcgcgcagcgaattcgcccgggactctggccacaattaaggatctctttgtcctagaaagaggggccttccccccgccgggaccttctctccatcgtgggatccgtgctctacccgactcggaaagtcacattcttcctcacccaaactacgacggagatagacacttggtgtgcgtgggggtcccgaagtttttaaacgagagattcattccactcgcagcttccaaacgtccacccggcgctgtacgcttggaaaccttttgttctaacttaaggggtgggaaggatggaacaaaagaaaaacaacccaccttactttgcaatcttccgcaaagagacttgggagtacttttcattccacaggggtttttaccccaccagcc

SEQ ID NO: 2261 - DNA, 329 bp, Rattus norvegicus
  Genbank Accession No. AI232159
agccaagtgagcactgttttattgaccacatttcacactccaggaaacatgtggaaactgaacacagagttttgctggaacatggtgtaagcagaatctgggcagtcacgggcatcaatcagcacttgatagtaagggtgagttttgcctttcacctccttagagccatggccagcagggttctttgctttttctggagctgcagaagccacattccggtcatacagtctggcctgccagggaaacaggacaacccctcggtagccaaaaacactatggagaaatagctgtcccgtctcatactttccattttgttttggcacctcaaa

SEQ ID NO: 2262 - DNA, 375 bp, Rattus norvegicus
  Genbank Accession No. AI232163
aaaatacaacaaaatgtttaatgagcaaattcgtattagcaaatatgaaactgccacagagaggaggagcaggactgagaccacgggttgagggtcaggaagactaagaagaaccaactacttaagaaaccagggtggagaacagggaggaccaaagccagaggacgggagctgtggtcctgcaaagggagaaggcagggcactgagggccagacaacaaaattcaaaatagtttggccataaaatataaacacgctatgttcctaccatggggtaagagaggaggaaaggggtgtaagggttaagaggctgtttgggaaggggctgtggggggtcctacccgccctgttgtgcacacagacaccatcccacccc

SEQ ID NO: 2263 - DNA, 506 bp, Rattus norvegicus
  Genbank Accession No. AI232174
caaactttttttttttttttttttttttttttgccatttggatttttttttattctctttttaaatactggacagtgaaaaataaatacgccttctcatccaccagacaaggttatttcccaactccctgggagaccttgtcaacccccttcatacacacccctggttctattccaaaaccttccccatgcctcccacccacaaataccctcactatccccgtcttccacagtgatgaggccccagaaatagggggtacaggatgggaggagggatagcaggggagcccccctgaactgtcaaatctgggtgggtcaaggagcacccccaccaacaggcggagaatgggggtgttcagaggttggggcattagaggataaaggcacatccagtctgatagggaaggggaggctcccctcaccctgggggtagggtggacaagagggagggggtatgaccctgtttcacacccctccattagctcctggaggttgggggggacccaa

SEQ ID NO: 2264 - DNA, 566 bp, Rattus norvegicus
  Genbank Accession No. AI232184
gcttcattagatcacaggataggtacataggttttgaaagtgacaaaacttacttatactgacaatataaattagcagaaaatacttggcatattataaagtagcatttttctatttctattggaaatttcagtaactagtggacatttttttcatgatattcatttacatatgttttaatgaattcatatgtacatattagtactcactgaaccctttctactcagtgtgaaatgactaaacttgtagaattatagattttttttaaggtcctggtaataacaattagagtgaagggaagaattttgccaaaaccaatgatgcatggacccattaaactttataagatttttttaatatagtatgatcctggactacactgatttaacacatatttcagagtctttgaaaaatgcctctctcctgggcagaaatcctgagtgtgttccaaagactatttgcaccaaaatcgtgtaggtaaacaggcaatggttctcaacataggattagtaaaataaaccttcagagttttttcaaaccaaactgacttaagtctgagctggggt

SEQ ID NO: 2265 - DNA, 454 bp, Rattus norvegicus
  Genbank Accession No. AI232230
aatggaggcacttaaaagttttatttgctgaaaatgttataacatttaactaaaaattaaacatgtttcatatctcctttcatgaaacagcagcagcaagagatggcaaatgttcgaaagtctcttcaatccatgttattctgatgagtctttgaagaaagaacttgaacctgttcaggtgcttgttgatatgaagtcttgaagatacttatatgaaggtgtcttgaaatttgcaggcacaaagaaactaaagtatatcatcatatcaaatgaagtaatgaccattgctatccatagaacaacatattcctctataaaattattaaagaattggtctaaaaataaaagacctggcccaataaaaacagagtcttgaagatatagttcactttttgtcatgtgagctatcaccaagtttttgtgcaactttagcaaagacacatccaaacattaa

SEQ ID NO: 2266 - DNA, 575 bp, Rattus norvegicus
  Genbank Accession No. AI232272
aaagttagggtcctttattggagcagatgggaaatgggaaacagatgtcttcagggtctgagagaaaacttagaacagaaaagcccatcctgggagaaagaacagctcgtgaagttgtcagggagtgcccaggggaatggtgaaggagaggtagtccccaagagcaccccagcggggccggtagatctggaagatggtgatccaggtggtgagaacaatcacccagaagaggaagcccacagctgagcgccaaacatagcctttgatttggctctgctctgtgtaggctggagcgaagaaggcctctttgaagaaccagaaaatgttgaccaaccaaagaaaaggcagaaatgcaaatccaccaagatagtacttccggcacaggttcaacttctcctcattggacacccgctctaagttcatagttgcgctggagcctggtggcactaatttggcttgcagagcaagacccaaatgacaggcacaagatcacgaacaatcacgccccttgtacgcatgcgctcccaggaaacactcgcttgactgtcggcgaaggcaagttggcccctcgtgcc

SEQ ID NO: 2267 - DNA, 438 bp, Rattus norvegicus
  Genbank Accession No. AI232274
atgtccaagccttcttgttcacctgtgattgagtttattggggagaaaagtaacagaaattggttgcataaaaaaaggagttggacgtacaaacaatgtgggctcaagccttagcagcccagccatgggtctgcacggttctttcgcatcaagaagttaatctttcgagccatttccatgttgtagatcctccggcatgtttcatagctctccctctggcggcggcggcaaggcttctcatagtatcgtcgtcactttatgacatcaataagcccgtcggcggtgaggattctgttcagggccctggaggcaccttccacgttcccctcctgaaccatcacagtcctggcaatgaacttcagatgtttagccatgaccttgaatttaaatcttcattcttcaggacctatagacagcggcctccgaattcggactccg

SEQ ID NO: 2268 - DNA, 554 bp, Rattus norvegicus
  Genbank Accession No. AI232288
gggcactggcattaacagtttattgtttccttacaaataccactttctaatgataaaagtttgcacagacgttggaattggtaactaagttttttttcagtttcatgaaaatagttgtctggtaacataaatggattctgcatcagttccacaaacaagacagggccctaaaacatctaaactgtttacagacagagtcctgctgggaagcaggcttgtgatttcaattcggtctttggcaggatctgtgctaagccaggaacttactagggacaggtgaacgctggcctggttactgctatgtgacaggaaagtacttcttcctccttggtgaaagagagaagacttttcaggtgcatttgtggaggcatcccaatgccagagggatccatcttcagaacaagtaaacaggtgatctgggttggatgggtggaagcgaacttcccacatttcagcctcgtgagccttcagtaatgacacaggcatggtaccttgtctgacatcccaaatactcaacattccatcctggccaccaatagctacaacatgctgct

SEQ ID NO: 2269 - DNA, 605 bp, Rattus norvegicus
  Genbank Accession No. AI232301
  misc_feature (1)..(605): n = a or c or g or t
ggatccaggtagattttttaaggtaagcaattattttatttccctggcctgacagcaattgacttcaaagtcccagaacctgatgccgacaaagcgaacatacagatagctcccaacggggaggacgctcttcatttgtagagatgaattgaaatgtcatgtgtgaatgcgattcctgcccctccccccaacagagtccctaaatgaaatgaatgagtaaagcccccatgaaactctggcgcccctcgttccatcttctctcgatagcagatgccgcggagggagacagctggccatcgctttgcattccagtgcgagtgagacctaagagactgcagcagggggaggacgagcggcaggtgtgtgacctagcttaccttgtaaccccgaccctccacacacagacacgctgtccctgtccatgagaaaggtgaaggaaatgctagaggactgatcctgaggctcctgaaagtccaaggttcttgtgggaagaagagcgggacatgttcaaccctgaactccactttaacgccatccaaactggtggnaatcacaaccacattgcgaacagccctattttccaagaggactncatctaaatgtcc

SEQ ID NO: 2270 - DNA, 561 bp, Rattus norvegicus
  Genbank Accession No. AI232307
ttgctcatgtatttattccgcagtcaagtaaatcataacgtcaagccgcagcatgattaaaggagaattactggtacagctgtctaaagtgcaacactgacaggtgttctttcccatgatgaaacaaagacacacttccctaaggtctgggagaggcaaacaaccctttgaaacaaactgcccaacaattagaggcagactgcaaataatttctactagcatttttctgcaaggtggagcaaccccccgggtggctaactcaagccctcatgtcacccacctgtgccctggctttggtctccttcctcaatcacacctacacccaaaaggcttctctgcttcacacttagacaccccccgagtcccggaggccctgagcactgctggccatgagtgagtttgtgaacaactttcacccagaatctcgtgggagaccaggagcacgatggctcagcgatggcttggtgtcatttccttaaacaatagttctaactgttaaacaagctgacatttgacaggccatttgcacgccataaacaaaccagtgtattcttatctttt

SEQ ID NO: 2271 - DNA, 533 bp, Rattus norvegicus
  Genbank Accession No. AI232320
ccttctttccttttaatcgccatattaaaagtttagatccaaaattttagaaattctcgggaaactttaagaaacgagcatgaactatgatagcccacagtctgataataagctgcaacaaacgggcggttgccaggctggggggaaggtctgtatccctgcaggtcagcggctcccctttctttctccctttccacaggggggctctggtccacagcaaaacctggggggctcactgcttcagggagggtcacccaggatccacagagggaggcccttcaccgcagagcagatcctatggggtcgctgggtctattcaccgttcactgctgtgggtggaattttaaggggaagccgtttgggtaacggctctgctcacattttttccccggggaatggttgaatggattggcctccttagacgggacgccgggcatattttctgcggggcatctaatccactcgttcaaggtaccaagggcctgggaagaggttgcttgtgtcaccagggggagagaagttcaccttgtggt

SEQ ID NO: 2272 - DNA, 558 bp, Rattus norvegicus
  Genbank Accession No. AI232326
cagtgtaaatatattggctttatttgtgtccattcggacgcctcacagacaacatccaggtaaaaagaccattaaataaaacgccttcagcgattgcaatgcaaaaataaatatcaatcctcggctgcagcggcagccgcgcagcgccccaagtcccctcggtcagctcaacaattataaaagtgttcagtgagagtgtcggcgtgagtgtgaaccggtatgcgctgggggtggggtatgcacagtggagcggtgtgcagaatcggagttgcgagccaaaggcctttgcagcggcgaccccgggcgagccgactcagcgcgggccgccttccgcgcacgctcaccgcagagttcgtactgggaaagagttaaaaaataaacatttacaagggcaaagaaagcggcttcccctccctggcgtccccggacgcgctccggggtcccggctgatccgcagccgggctacagtcccagagagtgaggggagctgatcccgggtagtcgtggccgcctggggcgcgggtcccctccggatgcttccgctgatgctcggcgctt

SEQ ID NO: 2273 - DNA, 592 bp, Rattus norvegicus
  Genbank Accession No. AI232336
ttataaacttctactgtttattacagctggagctcaaaaaaatgaaaacttatcagataaaaccaaagacaagtttaccagattaagacacggagttcgtactgtaattatatgctgatgttctatctttcagaagaccaagtcaactgtctgactcatacgcccagctctacacggtctgatggataaagtaatttaaagagtcccgctgaaaaggaatacttcgacaactgggtgaatatttttgtgactatcaaaatataatttaaaaataatttatttattttttgcttgtggaagacatcatgttcatgtttcctttcactgattgatttttttcctgcgatgacagatgagccggtacagcagttaataatacattttccagagacaccaatgggtccgtatagtactgtaaggcaggactgaagcctttctgctgtaaatactggagtcggccttggtcaatcagcaatttgcaaagatgtcctattttcttcttttcttcaacagtaagagtcccaggcaaactgtcagtgctgccatccgtgagtctgtctcctccatcatcgggctcttcctcctaatcctt

SEQ ID NO: 2274 - DNA, 572 bp, Rattus norvegicus
  Genbank Accession No. AI232341
agattcccacaacatggtcctctttattttcagtctccctacctttgcgccatggaagaaacaggctgagggcatgggcagaactgtgaactggcccagaagcttcttgctgacatgacagaaaagaggggtgtaaaggaacccccatcttctaatctagttgggggaacaaacatggagtagatctgtgggaggtgggtggagcaacagaggagggcttcctaaagcacaatgggccctgggaatcagtcctctgtcttcctaccagaccctgcccttgaaggcctcttataaactctcagactgtgagctatgccatcactgaggatgaaaaaccaggaggtggacatccatgacattggttcccgtcaaccctgtatgcagcaaatgtgttccaccctggaagctgcaaaagaacgtgtacgagtcattgttgtcgaggaaggtggcaaaatccaggttttcagcagaagcctggctaacaaggtcagacatgacccaggccccggccacctttgtaggcccgtcctgcccatcagtgcctccactcaagaacagcacatcaacaggcc

SEQ ID NO: 2275 - DNA, 579 bp, Rattus norvegicus
  Genbank Accession No. AI232346
caaattacaaatctgttccaaaatatacttacattaaataaaatacgcatttcagtaagatctacagtgaatgactatgcattctgggaagcttcacatctaggtagggtcagcattcgtggaagaagctaagagaatgtgcatccaatcacagtttatagcgggtttcttattgccaatctgccagtcacacggaacatgtcattacatcacttgtgcaggataccgattgttgggggaagggcagcaagcgctacatcctcagtggtgagttccttacaacttcggaggaattccaccagacagcctagacagtagtttcagtaaacatgttaagggaagtagacaactctctcgaggcccagacacactttcttgctgtattgtgttgttctccacctacagtgggtagtcaggagggtcttcttcaggacagcatggtcgcaggactgggacaatcccaaggggctgacagggagtatgaggatggggaagagggataccttgagctgtttcacatcagagacaactgtgacaaagtccttagacctgccatctctccttctatcatctggcata

SEQ ID NO: 2276 - DNA, 548 bp, Rattus norvegicus
  Genbank Accession No. AI232375
atttccagcaacatctgtcagatataaacacaaccttgccaaagagctagaaagcccttctatataacaatcaatttcaatatagaatctcaatctctctctctctctctctctctctctctctctctctctctctctctctctccacacacacacacacacacacacacacacacacaccatcaaagagacgagactattaacacacacatttcctcgatccatataaatcttacaagggtctgtgcagtagttccagccaaatgaagtgactaacagccaccagttccagccttttctccttagatcgctttaaatctttctcactccaagtctcttgggagttaaccgagctttcccaccttgttcggacacggggtcagtttacttgtatccaggagaatcccaggggcacattttgagacaaagagcaggctccagaggctagacacctgaggtcaccatcaaatgcctaagcccatcttcctccagtccccactttaggagcaactggcactccgcccggggaggaaagctgggaagctagg

SEQ ID NO: 2277 - DNA, 489 bp, Rattus norvegicus
  Genbank Accession No. AI232402
taatcacacgaggaagatttattgtgagcgagatgaaacgagagctcaggccagcatgctggggtcgagactcatacaccacacagggagtagaggagttcgaccccgacctgaattttcacagagcttataaaggaaaaaaccacaaaccagggggatcaagagggagggaggaggggaattccaaaaccataaactgcccatacatttaggtcatatgctagtcatgtgtaacactaggcaacacacccaggactttgtgacattgtgattaggggtagtgacattttacagggccattggaccattgtggccggaggctatgggtcattgtggctgatccaggaaactattcatgcaagaatgttccaggaaccattgtacagcaagggaggggtgaaaagttcatgttcttacagaccctacttcttctttttgggtagctaggcggcttattattaattcttaatccttcattccccacttctt

SEQ ID NO: 2278 - DNA, 359 bp, Rattus norvegicus
  Genbank Accession No. AI232419
acattgggaaacttttattaacttaaactggcattcttaattttgcccaagttcttaataagtgtctttttttaaatcaatctgcaggtgtttttaccaccacagaatcatgacgacttgcagttatcattgtcctgtaatgattaaaacaatggtcaaataatcagcaaggtacttctctaaaatacttaaaagatattctgaggagtgcagggcagggacataagctcacccagaaacacacaattcactctgcatggccaactagaccccaaaggtggctgagctgagctgagcactgctttgtcccatgctcctgttgtacatccacagcaggaggagatggcaaagcagctgcc

SEQ ID NO: 2279 - DNA, 484 bp, Rattus norvegicus
  Genbank Accession No. AI232431
ccaaacttttatttgtgcacattcaatttaaaaagataacgtttacaggttctttggtgcctatattcagcatacaaaaatgtaaaagactattcacaaatcaaacacattagctccaactggaaaaataatgacatcaataaaacaactgtaaggtagtgcacactgcgacagctctgcctgtggggacatgagatcactgcgaaaataaatagaacgtccttttgtaaaagcagcaatgtcatgtcttgtaaacttcctttttatattacagcaaaggttgaagtaaaatccaaagagactggagcttacactgtagccgtgagtacgagtctctgtcctcagtcactgttggtccagttttccttgtgtttcgagtccaatgtgcagcaggtttcaaatggtgctcagttagagactctaaccaacgaagtctgagttacaaaatctccttcctgctttcaaacacgaatgggtagatctg

SEQ ID NO: 2280 - DNA, 419 bp, Rattus norvegicus
  Genbank Accession No. AI232477
aaagtttgtatgctgctttattgtatgctacagccagtgtatataaaacagttaaaccttgtgaaacagagatccatgaaaatccagagaggtagatgttaaggactgacgagtagaagattatgtgtatggcacgtgttaaagagaagcttctgtacagacttcaaacttagtgacttcgaacttagttctcgtgaatattcactggttcatgaaaagtagtttgagaaacctcgagatatatgactacaaaaaggagcagactttctggggtctgaagggatttgtacttgaagacactccagtcagcagagggtcatgttgagcattctgcagacagaactgtttcaagtctgcagctgcctgggaaacctttacgcggttgaacccgggcttcagccggagttgctgaaccacct

SEQ ID NO: 2281 - DNA, 436 bp, Rattus norvegicus
  Genbank Accession No. AI232489
gacctgattttattaacagtcatccagctgtcttctatccagctctgatctcagggggcccctatgacagttcagccacagtgtgtcacacattccattcccaggaggctgggtagaaaggtctctggtaactagcagcaatccatttcttatgatgggttgcttgactgccatttggtctcatgctccagaagaatcttctctgtgaatagtcctctccagctggaccgggaggagggacgaagcctctctggtaaacactctgattttgtgaccattttctgaatgagtacgctgagctctgggtctgaacatgctgggacgattccagatgaccaccacgtcggcttttcttaggtcctttgttcacaggtttgttagtggtgtggacttgttctgtaagatgtgctgagtcttcaagaccacctgatctaaa

SEQ ID NO: 2282 - DNA, 513 bp, Rattus norvegicus
  Genbank Accession No. AI232524
tttttttttggttctgttttgttttatttttaaaatttttttaatttttatttatatgagtacactatagctgtcttcagacacactagaagaaggcatcagatccattatagatggttgtgagccaccatgtggttgctgggaattgaactcaggacctctggaagagcagccagtgctcttaaccactgagccacttaatctccagccctgcacagctggttttaaggcttcttttggtccagtattttctatgttctcccttttggcatagcactgtatattctgtgacattgtatgttgtaagtatccgacatggttttttattttgattttacagtgagcctcagaagagactttgaattttggacttttaagcagtcttgagcctgtgagagactatggaaaattttgaagttggactaaatgcattttgcattatgatatggctaccagcctatgaggccagggggcagaatgtggtggtttgaataggaatgcccccccaacata

SEQ ID NO: 2283 - DNA, 396 bp, Rattus norvegicus
  Genbank Accession No. AI232529
aaatttgtatgtttttaatatatagaccataagaagggagcttacagaggggagcaaaaaaagacaatggaatacatacaacatgaaagcagaggggtgactcagggaaggaggtcatcaagaaggaagtggagtgggcatggggagggggtcactaaaggaggaagatgaaggaaacacagtacaatgatgcatgtgtatgaaaacaccatcatgaaaccccttcatttgtatgctaatttatttttaaaaagttattaagaattgaaaattaccaaatgcgtcataaaacaatgtctgagaaaaacaaagggatatgcttacttgatggtgtacaagatctaataggggtgtacagggaggcgaaagggattactaacaatacttgtttgtccc

SEQ ID NO: 2284 - DNA, 510 bp, Rattus norvegicus
  Genbank Accession No. AI232552
ccattcgttcattttatttttcagtgcggggaactaaactcagggcttcgtacatgctatagtagtctcattgaccacattcccagtcctgctgttgccgtcgtcgtcgtggttgttggtgagacagggtttctctctgtgtagcactggatgtcccaaaactcactctgcagctcaacgtccagtaggaatacattccctaggtcaaggacacagggacagcaactcctacaggattccagaacaccagtgtaaagagaaaatcctctgagacactgaccctcacctgagcagggtaggcggcctgagccagccctccacccttcagctgggacagggccttgcggatcgtgttcagctcctggattgtggctcctcgggccgccagcagcttggtgagcgtctgtttctcctctagtgtgacaggtgggataggagcgggcagcagggctgagcccccacctgagatgagcacaagcagcaggtcgtcggcagtgagcctctttgcca

SEQ ID NO: 2285 - DNA, 370 bp, Rattus norvegicus
  Genbank Accession No. AI232611
actttactcattgtatctcatatagctgaatctgtggcaagcacatgttgatagtagggtaaccattgattaataaccattaatgccccgaacatgaatttcatgtcatccagcagaaaactgatttcacatagtcactggacattaaaatttgaccttgaatctgccatgtctgttacaggcaaacgcactacaatctgcaggaggctctgttgtgagtactgtccaggtgtttgccaaagaaggatagaatttgcttccatgcatctatctgggcttttgagtgagccctgacctcccctccccagaccacagctttgttcactattttgtgcagggaagctgggcacatggggaagtaaggtggctc

SEQ ID NO: 2286 - DNA, 605 bp, Rattus norvegicus
  Genbank Accession No. AI232643
  misc_feature (1)..(605): n = a or c or g or t
ggctttaaaaatagttttatttttcccttcacagacacacaggcctctgaccataattcatggcaccccaaattaaatatagacttaagagtatatttgtctgacatgattcaagaaagtggattttaaatgtgaatgggtgccaaccatggggactggaggagggtggtaccagcaaagaggggcgtacatcattcttacagcgactcttagacttggaatcaatatgtgctcatcatatacatatttagcccaaatcagtatgctcaggagtagaatttcttctgtctctataataaaaaggccaaagcacttccttaacattcgaaatgtttccctagtagacttggtatagtaagagaatgattgctaaacatcctcaatgtggttttcattatgaaaaaacatgtttcacataaaatcttcataatataatccagaggccaaatttgtgcatgtttaaaatttgagtccaggctagatatttggattttcccccccttccagtgtttttcatttttataaatacatacctagncttctactactttaaacatactcggaactcttttagaaaccatggctgcctttcagtagcatcagtg

SEQ ID NO: 2287 - DNA, 468 bp, Rattus norvegicus
  Genbank Accession No. AI232645
acataatctttcatggcaccatcaggagtaacagaaaacgttattcccagttcctaaaccacatcctgaaaaatatacatttgtatttatatatttatatcactgctccacccctaacctataactccaccacctattgtaggtcttttgcttaaagcaggaaactattctcttaggtaagaaaatatatgtggaagctaaatgaaatgttggttagagtaactgggaacagtttgtctgtggggcagagtggaagggctaagtccagccaaggcaggggcatcagttggggtccatcaaggggaggaggacagtatataaaaaggcagcgtcacgaaggtaggctctggtctccttggtccctcaggagatggccctggcctcaggaaggaaggcttcccagtattttgccagctgctgctgggaatgcaggagtgtctccaggtacttgatcacgtggtttttgaa

SEQ ID NO: 2288 - DNA, 649 bp, Rattus norvegicus
  Genbank Accession No. AI232703
cagggaacaatcatgtttaatgtttacagaacaaatttgttctttactgttcagttcattatgaactgggatctcatttaaaccctacgagcctattctggcctcaagtagcagcatccctgggttgcagatcacaccctgtgcacaccacaaggtctccctagtctgagcttaagctgtggtagcagccacggcacagaccttagccctctcccgaatagaggacatgactgccaactctctgtactctacagggtctgtgctctgggctccgtcctgggcggcctgtggctgcatctgtagagctttctgaaggcacaggctgtggggcagcagcaagggcttctggagaagcacagtgacatcctcagggcacgtgtacccaccccaccaccaccttcaaccagtgagtccgccagcacagtgacagctgaggtgtggcctcctgagtggttgctgtggtgagcagcgctggcccatcagaatacagcctcctttctgagcagggccaagcgctgggcaggatgtccctagagtttgctgttgctctggaactgggctaccaggctgaggatctgctcggaagctttgatgttcttggagcccaggtaggagatgctgttggggccggtctcctccaggtagtaac

SEQ ID NO: 2289 - DNA, 594 bp, Rattus norvegicus
  Genbank Accession No. AI232706
ggattttaatattttatttaaaatttgctttaaatttctgtaaaacattcttcaatccattattttaacattataaattcaacttgacgtagctgaaaaacagacagcaggtaacaggactgactgaaacttagcatctatcttactgcagggaagacaaagcctcatcacacgacaaacagctaactcagcaggcatgtgcacgcgtcactttcctgtccgtgacaagttttggaaaattacactttcaaagaaccagccttacaagtagatattctttccaaaaaataaaacccagtatccaagtcctgaaaactcacaaaactagatgaaaacatgtggtggtgtcagctgcgggcgacgctcaagccaggctctcaccacgatggatgactgactgactgactgactgactgactgactggggaggtgaactcactcccagcactccctcctgagctggaaattgtcttattgctgagttatacacaagtcattttctttggcaacatcactagctaacaccaagggacaagtgtaaaggtttgggctgtcagctctccaagcactgtggctgcccttctgtgggtccca

SEQ ID NO: 2290 - DNA, 478 bp, Rattus norvegicus
  Genbank Accession No. AI232783
gaataaaaagaccttggtattccatccttttgagttacagtggggaccagtgggagagggaacagttgggagtggggtgaactaggaagggctcaagatcactggaagtcgagtccgcttagttcttgtattggaagggctcgtcgccagtttcgttgaggagacacgtgcggacgatggcttccgtcaccgcataggggtcgcaattggcagaaggccgacggtcttcaaagtaacccttcttctcctggccgacaatccggggaatgcggatactggcgctgcggttggcaacgccagcggaaaagtcgttgatgttggaggtttcgtggaatccagtcagacggcgggcgttgtccaggccccccttggggtcgtaggcacggatgtggtactggtgcctcttgctcagtttatcaatggcctcctcaatgcacctcaaaccattctccttccgcatggccttggtcctcgtgcc

SEQ ID NO: 2291 - DNA, 595 bp, Rattus norvegicus
  Genbank Accession No. AI232784
ccaaaaaatcaatacattttatttgatttatttaccatggtttcagaagagacgagagactattaacgagtcgctcttgggaacgacccttacagggcttgttttcatgagtgtcacccaggagagatgctcacccggccagtttgcttttctctgtggctagggagggcctgtcttccagcagggatccatgcactcacagactccaaccgccatcgatgacgacaggggtgccagtcacataggctgactcatctgaggccaagtatacgcagagcagggcgacctcttctgcagatgcaaaccttccggtcttctgtctgtttaggaaagctttcagtgcctctttgggatcatctctggcttgtattctttcttgcagagatggggtgtcaaccgttcctgggcacacacagttgcatctgatgccctgctggatgaagtctgcagccacggacttggtgaggccgatcacagctgccttggttgcactgtacacacatctgttctccacccctttgatgctggaggccacggaagacatgttgataatgttgccagatttttgagcaagcattttgggcaggaatgccct

SEQ ID NO: 2292 - DNA, 484 bp, Rattus norvegicus
  Genbank Accession No. AI232841
cttggaccgaatagatttagagatttattgatcagattgttttagaaaaccaatagcgaacactgacaaggtaaataagtacagatggaacatttcagggtagatttacttgctcataggaaaccaggggaggtggaaaagctgtcctgatcacatggcatgcacaccagactgcaaaaggacatccacactgtgtaacaggactgtggcaagtagctttaaagtaaggcgagcactgtgtatggcctcgaatacctgcaggaagagcggagcctttaaaaaacttcccaaatgttttaaaaaaggttagcaacatggaaagaacaccaagaagatggtgctaccatcgaagcacaactcggaacgtctgtttttgacaccagacaaggggagagatttttttcttccaaatctcacaaactcagacaggtgataacatatggaggtcccagaaccccaccgtgcctgcttctggccctgccaa

SEQ ID NO: 2293 - DNA, 450 bp, Rattus norvegicus
  Genbank Accession No. AI232948
ctgtattggcaatttatttaaaaaaaaaacaacactccagccaccacattttcttctctgtccatcatttcccttttagaggaagttacaaaagcatcagggggctttgccattgttataacccaaaccacgtacaagatcaggactgactcccgaagctggcagagtaaagtcaacgtaagaacgattgggttacagcaatacaggatcacgacgttgatttacagtgcatcggtggtgagttcaccagaggggattctgagccaaagactaaagtaaaagcaccctgcccgcttgcaggccaggagacccagtgcaagcgccacagcaacaggacaccaccacgcagtgaggcttttctggccctgacgacggggagggcgctctgcccgcccggcgaggacccggggccctcacttggagtcttggtccttctcatctatcagggca

SEQ ID NO: 2294 - DNA, 530 bp, Rattus norvegicus
  Genbank Accession No. AI232957
gagacaacttttcaaataagtttatttgaagcaaaataaactactgccaagaaactttatgaaagttccatctcaaaagggtcaaaaaggggaattaactgctatgaattctttgcattcagggcgtcaaagacgcagcctgtgcagcgtgatgacgaattcttggatgagaaagcatgtagacagaagtattcctatggcagaatatttacagcactactttcaatgaagtgcttcttccataaacatttgaaatgagatgaacaccaaatcttccacttctttctaactgtctattgctattatgcttaggttcagcattggatatatgcacgctgattcctttaatgatcaagtcctctccacaaagagactgggcaaccttatcatctgcaaaggtaacaaaggcaaaagctctgaatggtttgggaatgaagacatctaccacttctccatactgacagaagaactgctgaagctcttcagcagtcatgtcctctgtacaacgtccaacaaacacctttctgctt

SEQ ID NO: 2295 - DNA, 521 bp, Rattus norvegicus
  Genbank Accession No. AI232970
ctggaaaaaacacactttattgggtagacaagtggcctgacagaaggcctcagattcacagttgactgagcaaacataggttaaggtgttggaatctgtctgcatcccgccccagcctcctgggaaacagctctgaattgagtcatgcgtgggagggttccgacccagttgggatcgatgacagggctcccccacttcacctttcccaatggctctgaccttcattgataagactgaattcttaaaggctaggagcggagaggggcctggcactccgatgtgttagtttaatagcaagctggccagagacaccgtgtgccagttgctgccacacgcgaaatggagacccctggtggagggagaaacctctcagctcccggagactatttatagctagggctccaggctgctgatctgtgacattctcctgctgccaccaaaccttggaaaggggccagtacaaggcatactcccatccccctgctgctttccctcaccccagggcaggctcttttcaatgg

SEQ ID NO: 2296 - DNA, 410 bp, Rattus norvegicus
  Genbank Accession No. AI232984
cttagaaaggacatttaattggggggagggtatacagattcagaggttcagtctattatcaaggtggaaggaatctcagtgtccaagcagacatggtgctggagagagttctacatcttgatcagaaggcagccagaagactcttctgccctgggtagagtttaagcatggggtctcaaagccaaccaccaccaccccctcccccacagggacacacatcctcaaaggccacatttactccaaaagggccatacctcataacaatgccacttgccatgggccaagtatattttaaccaccatacctttgaatatcacagtaaaggctttactgcattggttacattcatagggttactctttagtatgtatgtgttcttttatgtagttggagttggcttgattgtgaaa

SEQ ID NO: 2297 - DNA, 469 bp, Rattus norvegicus
  Genbank Accession No. AI232993
gtgaaatcacgaaaatacatttcttaaaaaagctttcaggtattacacacaaaagcaaacaagtttaccttaaaaatatcaattatcacaacaatagcctacttctaattataattacttcttcaagcaacatttgtctttgtttccaaatacagcagcaggtgacaaaacctagatcttccattgcttatggtataaacatatgtctcagaccacacttcaggcagcttaacttaaaatgcatagactgtaaaatatatcaaatttgacattattcagtaaatgaaaaaaatcataatttcaaaaaaaagtattacaaaactttttatagagcacatataaaaagtagtgtctacttcatgacgtcagtgtctgtcaaccagtggcagctgggccttttactttgtacacttgaatagttgtactgatgaacactataatcttgaaacaatgtttgtttttattggta

SEQ ID NO: 2298 - DNA, 484 bp, Rattus norvegicus
  Genbank Accession No. AI233031
  misc_feature (1)..(484): n = a or c or g or t
taaaaatcactacaaaaaccttacaaaagagtcttgggagctaaaggggcccttccctgcctcagcccctgagcttcctggcagaggaggacgagaggaagatggaggaaggctcctggcagtgctggcatctccaaaaaccagaggggtggcttgggtggcaggacacaggttggggacctgaatgtcttcagcaaggcacatcagagtcagggtaggtccgcctccacccatggagtagaacaccaaggccggtctaagctcaggagaccaacacttgtctttttcccacccgggcatctggggatatgtctaaagagggcctctctagcctctgcttacaaatgtggagggactctaagttagggactagcccaacctacctcttgccaaaactatccacgagtgccagcccacaaaaggtcacctcctgggccccttgggaagcaatgaagactccctgggcctgcctnctcccaggccc

SEQ ID NO: 2299 - DNA, 388 bp, Rattus norvegicus
  Genbank Accession No. AI233081
gaacagacaatggtttaattttatttgcataaagtggtcatgaaaggttaacccattcaaagacatttttgatattccaacatcctctgccatgagtctattacaaatagatccctgcctgccacagagcagaagttagactgtcagcccagcatggtaagtaattttaatatctttccaaaggcagcttatgaacaattccacacagctagttaccagttaatggtgcatagaaatacatctgtggtggtcatggacaaccagatctagatatagtaaggatgagagtggcatttttttttccctatcaaggtattttaagccttttaggggaatttctatagtgtagaatttaactttcatattaaggggtatcttaaatatatcc

SEQ ID NO: 2300 - DNA, 549 bp, Rattus norvegicus
  Genbank Accession No. AI233147
  misc_feature (1)..(549): n = a or c or g or t
ggcagtttccaagtaattttattcagaattttgtgtttgtttcctgaatcaataaatactatacaaaacaatgtaaaaatggctaccattttctctcccctgctcccctcacctggggacaagtccctggacaacctcattcagggggttctccctgtagatttggtccagcaaatgaggccagccatgttttagccccttgactcacttttggagatttggctggggtaggaaagcctttaggaatgaggtgattaggttagggaaatgcattattgtttgggggggaaggagacagcgccctgggcanaaccctaccccaaagaaaagggtgtctaaaatgttcacggttccttctttttgcctcaaaaagtgacatttattcaaagagagagagagagaaaaaaaaaacaaaacaaaaaaacaaaaacaagatgtccatcccttggctcccttccctcccccctccagctgttcctgagccctgcccccaggactgaaccctgggctagggccaggtagcaggacagcccctcaaatgaggtcaac

SEQ ID NO: 2301 - DNA, 565 bp, Rattus norvegicus
  Genbank Accession No. AI233183
ttttaatggtcaatagcttccggttggcttctgaatggtatagttaaacaatatacttaagacacccccacagcaagttcatacccctcaaaaagtagcattggctctatccatattccactgctcagtcagacttccacagcctgggagccactcctgggttatggaaatagacatcttagtgtaatgagctgaaacccctggcacacccatgatctgttatttttgcttaaaaaaataacaagtattaaaccaaacactttcccaggtgctgctgcttcacagagaaaacccagtgttgctgtagggaatctgagtcctgtgggccctgtggttctgcttctcgtcccactctcctgcagtcatacggcgtagagctcataaaccttctttacacagtacaccagggcagccagggctattgtgttgtgcagtctctttctgtgcaggtcgtccttccgaaccagcaccactggtgtggaggaggtgaacttgtgcagaggcaggcgggacaatttataggcatcatactccacctggtacttgcagcaagggtcaaactgcc

SEQ ID NO: 2302 - DNA, 537 bp, Rattus norvegicus
  Genbank Accession No. AI233190
aggatgcaaagtattttatttttaaactaaagtttgaacacaggatagtctagtttagatgagtttccaagccaaatgcacttgcatggcactcagtttctggctgaaatagtttctaatcccctacgtgggtgcctacgttctgatctgtggggtggtgagctgaccagcttccgctggtaacgtccctttttgccttggtaggggcttaacaaacattaggtattggtctagtcttacacagccagtgctgtcccgaacgtttcctgggaggcatagaccatgtacaggaagccgtcttcatctctctcgctctcgtacacttcaaagatgggtgtggacacacttaccatgctgtgcccattcaccaggaggaagaaggcttggttagcattgagctgcaggcgccttctaattatcttgatgagttcgctcatattcacgtgatcaggtacaaggaacttggtcttgtccaggacgggcagctgcttcttacccttgtatcgctctataatcactgggatcttggtgggatgc

SEQ ID NO: 2303 - DNA, 522 bp, Rattus norvegicus
  Genbank Accession No. AI233199
tggagtcagccacttatttattagattgacttagagatgccaccttatttcataaacatcaatgaacatttatttagcatgtgccacatgtcggaacttagctaacaatgtattttctgtcttgcccatatgataccctcactgtattaatcacgaggccagaagttcctcactgtctgcacccttgatcttggacttccagccctcagcaccagatgttcttctttctgaactgtccctctgtggggattccaggaataggcacatgggctctgcttacaaggtcaagttctagccagtaagcgcttgatgatgtgagcagtcttttcaagaggtgttgtcatccaacgaggtctagctgtgcaatattagaaacacaacagagtcaagcactaagagaactctgctaatgacatacaaagatgacaagagaggtctgagctcacggcctggaaactaccgggagaaattagaggctcaagagaggagatgaattaattaatgaaaacccagcctcgtgcc

SEQ ID NO: 2304 - DNA, 637 bp, Rattus norvegicus
  Genbank Accession No. AI233204
ttattcagaaaagtgattcaactgcaggagcatgatcttttcagaggaaatccaaaatctttttgtcagcaatcctgttgattccaacttttatcatcctgatgatattctcttgtctgaagctcttcatgcattcaggtacttggcatgatgcctgatgtggtcagtgatgaaggttgcaatgaagtagtagctatgatcataaccctcttgtagcctaaaaacaacagggattttcttttctgtgcaggcagcgatgaagttgtcagggagtaactggccattcgagaggaactcgtcatctttcccctgatcaattagtatgtcaatctgtggacccgagtaggacttcacgagacaggtcgcatcgtacgccttccatttactttgatctggtcccaaatatccattaaaagcttttttgccccaaggacagagcacagggttgcaaattggagcaaatgcagatacagatctgtattttccaggatttttcaaagcgcaaatcagagctccgtgacctcccatggagtgaccaaaaatagatatcctctgtgggtccactgggaaattggcatttatgagttgtggaagctcctctgttacgtaagagtacattctgtagttagtgttccaa

SEQ ID NO: 2305 - DNA, 657 bp, Rattus norvegicus
  Genbank Accession No. AI233209
  misc_feature (1)..(657): n = a or c or g or t
ttttttttgaactggaaatgatttatttcagagacacacaaggctagtaagatcaagggtaggtaatgtggccatcaccccctaacagaagggtttagctatccaaccacaaacatgaatagggatgtcaatacttatgagtgactctcactcccgttcactggggactaggcctcctttgatctagacactgagccagcgtttgagccgtgacgtccatccagctcaggcacagctccttctgctcacttgccagatgaccacgaatcgtacactaatttggctgcgaccaggtcctccactgacatccccaaagacttgaacaccgtggtcttctcacagtatgcaggcttcgctcctgaaaccacttctccaagctcagcaaagatgtcagcccctgacaacagaacatctcctgactcctttagggcagcctcccgggagtccacatacagcactgcttgcttcatgagctcgtcatccagttctcgccagtcaggtctactggctccaacagcattgatgtgagccccgggcttcacccattcaccaaatacaatgggctccgttgccatggtgactgtgatgatgacatcggcacctgtcacagcctnctgcactgatgaacagacccgaacatctacttgcactgagctt

SEQ ID NO: 2306 - DNA, 537 bp, Rattus norvegicus
  Genbank Accession No. AI233220
ggtatataaactatttattaacagcaaaggcccaaagactcatttcttcttggacacacccacagtacggcccctgcggccagtggtcttggtgtgctgaccccggacacgaaggccccaaaagtggcgcagccctctatgggctcggattttcttcagccgctccaggtcctcacgcagcttgttgtctagaccgttggccagaacctggctatacttcccatccttcacgtccttctgtctgttcaagaaccagtcagggatcttgtattgtcgtgggttctgcatgatggtgatcacacgctccacctcgtcctccgtgagctccccagccctcttggtgaggtcaatgtctgctttcctcaacaccacatgagcgtatctccgccccacacccttaatggcagtgatagcgaaggctattttccgccgcccatcgatgttggtgttgagtactcgcaggatgtgctgaaacttctcggggatcactagggacatggcggcggcacaagcggcggcgtgtaggcccctcgtgcc

SEQ ID NO: 2307 - DNA, 404 bp, Rattus norvegicus
  Genbank Accession No. AI233222
ccagcactaagtcaggttctttacttctcagaagtgactgctaaaaggagagacagcaagaagagacagacagagccagagagagcaaggtgatgggaagaaagggcacagtaaaccgctggtctagtaagtctcaggaggcaagtgctcaaggtaaaaaagagtcctggagaatggtctgcggccacgggaagcgcctgggtttccttctgtgtatcagtcctccaggaaggctgctgccgttaccgcattaaatattatgtacatctcggagtcccaggtagtgagcacccgggggggtcatttcaccaggggccgagttttatcatcatcaccgcactggtgggctttgtactttttcacttctgccatgtacttggcccaccctcgtgccgcctcgtgcc

SEQ ID NO: 2308 - DNA, 625 bp, Rattus norvegicus
  Genbank Accession No. AI233241
aaggttaatgatcatttaatgttttaacaagtccacttataaacatatcatatgcataatcagggagaaaatgggctctgtagacacaacagaacagcagaagcaatcacaaagaagactgcctgcattctctgcctttcgcctacatagactagaaggcgaaatgagaggttacataggatcaacaacacatgtagaaaataagtctgaaccattctgtctcaaacacaggaacttgctacactccagaaggctactgtgggcactagcgacctaagacgagccctcttggcaagggatgatctgaggaagcctcgggctttccttacatatgaaaagttcttgactcaaagaactaaaagaacaatgaagtcagccacaaccctgtcagcagccagcctcttccagcccagcatcattatttataagtctccacagaggagaagagttcctcaacatcagacaagtagttccctccaactcatgaatttcatgactcactgaggtacaaaaccacgctgcaaaaccatcgaaaggacgtcatctatgaggctcggggctgagaaaatgagatgcctgggaaaatattccctactgggtatgccacaaagtaacttcttgggcc

SEQ ID NO: 2309 - DNA, 596 bp, Rattus norvegicus
  Genbank Accession No. AI233262
agtgtccaagcagaagacaagctgcctttattatagttgatgtcacagctctgcttgtaatagattcagccccagaaacaccccggttaaaacagcacggttgacttcaatggatagagtctttggtaaggtgaaccagaccagggctgaccgacaatcttcgggcccctggcccaggggtagcctgtagtcttacgtgaggcccagcatggcctgaagttcccgagctttatcatctggcagagagcccagggctgtgtggaagctgtcgctgtgctgcttggccaggaacgtcagtagtagtagcagtgcggccttggtgtctggggggatcctgttgtctggcaggatcaggctgcagatgcgcaggagctctgaagccacacccacaacctggtcagggttgttctggtgcaggaagctgaagaggtgacctatagtgacccattcctccatgtcttccttcaggggcagggcatgtagcagggtagctagcacctggggctctgtttttcctgccggactggccatcagcagacgggcaagagccccacagatgttatcacggactcgatcaggccggtccccctcgtgcc

SEQ ID NO: 2310 - DNA, 673 bp, Rattus norvegicus
  Genbank Accession No. AI233267
acaaagcactttctttatctttcagaaactgaatatacaaagcaattttttccaaaatattttcataggcaaaggattaaaaacgattttaattatacacatatggtcacaattttgccttaaaaagattgttgggaaatgtacataaggccgcgttgtaaatgtacatcatgttactgttataatgtcttatgtccagaggaaaaatgttatcatacagatctgctcttacttgggagtaggctattcaaaaatacagtactcttctgtacaaagaaaaaaagtcacatcacatttaaagatggaaaagcattggcctctgtggtaatcaatctcagtccaacactttctactcattatgcacaataccctgacttcaattgaaagtgatccagatcctagcatgtccattattaacagagtcaacaactatgttataaaacaaaatgtttcccacaataataaaaagaaagctggttcatacttctgaaaccatataaagataaaaaatttttaaaaatcactctcaatttggagaaataaatttacattatacaacactatattgccaggttaaagagggcagggatggaaatgtacactaaaatgcaagtgttttccaaagagagaaaacagattccatttacagcatgaaggtttacaaatgtacacc

SEQ ID NO: 2311 - DNA, 474 bp, Rattus norvegicus
  Genbank Accession No. AI233300
tccttggtattttttttttcaagcaagaccatgttttcctaaggggctacaatttcagtgagtctcttcttccggccccaacaaacacccctggctgctaacgttacagacttgttccagcttattggtgctgatgtccaatagccttgggggacctgccttcggctctccacaaggctattttgtttcacaaagtaactcttcaacttacgctttactataaagaaaatgtatccgattctaggctaagtttccaagcgatcctggctcctaggagccaccaacaggagtacccgggaaggccacgcagcagaacttcctcaggcattttcacagccatttagaaagatgtcttcagcgaactcgtccaaattagctacaaacgcttggcaggatggacacgttgtgtctgtgggccaatattcaatccaggtggaggaatctagagggtatatatacttgaaactgaaattg

SEQ ID NO: 2312 - DNA, 436 bp, Rattus norvegicus
  Genbank Accession No. AI233308
catagctttattcatctacttaaatctaacctttcacggagcttcggcaaactgagtgtgcaaaatgcatttctaaaacgtaatgcaagcaaagcttttcacatttacactggcaggaaatacagaaactaacaagtcacattagggagagttcagatctgtctttgttttttttttttttaatgacaagaattgcacagtttattattttgagacaagtgttgtagacatgaatatttaaaatccctaagcaaggtgcttcaacaataaaatctgttggaatgagccagtaacttggaataaagctcacaaagaatcccaaattaacgtggacagccatcatttcctgtattttttgcaaacaatgcttttaataataccttttataacactaaaggagacagcaagctgaaattttttcaaagcacacaaagaa

SEQ ID NO: 2313 - DNA, 514 bp, Rattus norvegicus
  Genbank Accession No. AI233316
gacatcacaacctgaagatatgtttattacaacccccatcccagcgcatgaggtcaacctgcagacactgaacatggaagtcaagggagtgggcacaagagttcctccttccaattcaccttcagaaatcttgcaggttaatagcatcttgctgagtcagagtaagatttgaacccaagaaaagctgcccctggagcagaaagaacccgtttccaaggatccagtagcagatcactgtgaattatggtcatttcttcttctgcacgtggccgcagtcatacttgccccctcacaactttgagtttaaccccaggcaggtcctgggtgcgaccaccctccacgaggaccacgtggtgctcctgcagggtgtggccctcgccggggatgaagcagacagcctctttgccggtgctgaggcgtactcggcagcacttccggttggcggagttgggcttcttcggcttcctgataaatgtgcgcaacaccacacccttcagctggggccggccctccg

SEQ ID NO: 2314 - DNA, 505 bp, Rattus norvegicus
  Genbank Accession No. AI233362
ttagcatcgttacaggcaatgcattacgtgagctaatgctcagtgtacaacccacctaggctgcaggacaggtcaaccgtgtgcatctattactgtacacagtgcagaaacagggccaccctgaacgccaacagaagactggaaatcactttacaaaaagtaaataaaaataatgccattttctatttaggaaagtggtagctcacaggcggcagagcacagaaacactggtgggtgtgcccagccagatgccagagtccagcccccaggccaggcagcccaagccaagtgtccagaggctgaccctgtgcgtgcctgtgtggcaggacgtccctgctcctgtttgcttctcaagtgtgcagcctaaccaccatcagccacccttgccaggcccaactgtctggaccagagattccctttgtaaggcgtaaatctgagtaaaagaatgaagaaccaaacaccaagtcttaaaagtcaaatgcgtggagccttcttgcctcgtgcc

SEQ ID NO: 2315 - DNA, 124 bp, Rattus norvegicus
  Genbank Accession No. AI233367
acaggaaggggaaaatctttattgcaaaggggaccttatcaaaggaaaaagacccatttctccatggccttcatttcaacttctgcttctctttctttcagggaatctccaggatgtcactcaa

SEQ ID NO: 2316 - DNA, 435 bp, Rattus norvegicus
  Genbank Accession No. AI233374
ataatacaaaggcatttattggatttgcttacatgatagggactaagtggtgtcacagcgccagagagctctgttcaagtcaccagcctgttgtttggagcatgtgggaaggcttgattggagctttccagtgcaggcactggataggcgttcctgcaggctgttccttccatccgggctcccatgttgccttcggtcaggtggtcgttacccatccactactcctgcatcactcctctgcgagtgccgctgcgtacccagagctgaggtccactagtccggttgacagacagctaagattctgttgttttccacagggtctatgtaactcaaacggctcggaaattccctgtacaccaggctggcctggaactcagagctccgacggccctgcctcctgagcactgggattaaaggcatgcaccaccacgcccc

SEQ ID NO: 2317 - DNA, 501 bp, Rattus norvegicus
  Genbank Accession No. AI233404
  misc_feature (1)..(501): n = a or c or g or t
caggtactttctggtaacttttaatataatttgcaacataaagaaaaagtaatgtgtttaaacaaattctgattttgaggatttttttccaatttacaataaacaagatatatgaaagataaacattacaagatacaagtagataatacttttacaacagacaaaaatactaagatacaaatttattttgaccgagttttatatatgtatttatgaatgggcatgatcttacacacatacataacagttagcatctgcagagtcctaagcatttataaaacacctttattcacacactttactgtttaagaatttctgaaccaaacaatctccattctctaacagaagtctaatgaagatatttactataaaattacagtacagatacccttgactatccgtacgtctgtctctcgantgacaagtgactgtttcggagctgcttccttagctgtgttacattactcaccatttatgacgtgacaacaatttcccaaatat

SEQ ID NO: 2318 - DNA, 424 bp, Rattus norvegicus
  Genbank Accession No. AI233407
gagttctgaagatgctttatttagaaaaataccaatactgacttaaagatttttaattttttaaaatagcgccctaatcagacagctaattctgtatactaaaagtatttacacatggaatacgaaataaatacacagtaactaaaagagatagttatccatggattcatttggcaccccctctgctcatcttctgctgcagtttccgatgccttttgtaaatccttctctttctcgctttcagatccacttttggctctggtttcacccattgtacttctattggtttctcctctgctggtgtaacaaacacatctgcagtgggatcgtgtggaagaatagtctttggttctttcttccttaatttctgaacatctttgacttgctgtttctctctgtacttggcagctgtgatggaccttac

SEQ ID NO: 2319 - DNA, 504 bp, Rattus norvegicus
  Genbank Accession No. AI233425
  misc_feature (1)..(504): n = a or c or g or t
cacaggaaagtctgcattttatttgagcccacaacccctggaggatcagcccccaccagatgcaacccttcccccacaccttcacaaaacactgattttctcacagagctaaaatgacaccctagttaccaactacagccaccccttcctgtccctaggccagtatagccttctattctgaggacttggttccctttcctcggctggcttctcacttgtattctaagtcctctccttaaaaccctccctccctgactaggttctnatgtgcacaatcatccagagtggcttcctgcctaatgtccatgccaggcctggcagcctccccccgacacccaactaggactacctgcaaaaacacacttgttttaagactccanagaccagggatcangctggctcctctgattccctgagggccttggtttctcagttgcactgaangggtacagaaactgactatgccaaataacccataatggggataggcagaggggagaccta

SEQ ID NO: 2320 - DNA, 551 bp, Rattus norvegicus
  Genbank Accession No. AI233457
aatttgaaaaaccatttatttcactggaaagcgctccaaatttctaagtctagtctttgggccaaaaaaagaaaactgggaacagtgattctcatcaaggtcactcccaaatccaatacccactgcagtcaggaggcagggaggagacagcacagcccccaccagtttctgcataggaggcatgctgggagaacagaactcgaatgggaagttacagaagaataaacaggagaacaggaaattgagcaggaaagagaataggaaagagaaagaacttaacaaggtaaattaaggtccatggttcctgagggactgaatgcacagagccgagaacgtcccggagatggggtaccacgaagggtgtattctcatgcacaaccgcagctcggaatttcagcccacacacattccaccttgaaactctgtgttgtcaaggcccctgatggccttcaccgcatcttctgcccgctccatgtgtacaaaggcataatctttcacgatgtcacattcgatgactgggccgtactcctcaaacttggcccgaaactctt

SEQ ID NO: 2321 - DNA, 167 bp, Rattus norvegicus
  Genbank Accession No. AI233517
aaaccaaaagtttatttaaacaacaagacccttgacttgaagggaaaactttctaggatcattttgtccaaaagtaatttatccctacttaaagacagattgccctacatgtaacagcttcgtccaaaaaagttttaaaattggccttggttttccaatgataaatg

SEQ ID NO: 2322 - DNA, 501 bp, Rattus norvegicus
  Genbank Accession No. AI233570
aaaaattatttaatccatggccaacattttttaaaaactgagacacatggtgcttcactggaaaacaatccccttgcccagtaccaaaaggcacccacagctggctagaagagcacctagtcagggcctgtgctctcctgcgggccactgggcagctatgctgaaaacccagagcagtgacaactgggaggaaacactcacccagaaggcccataggcccccaaactcccaaattcttatctccaccatcccactggggagactagggcccataggaggttaatctgcctttattgagggccagcccgtgctaagactgctggaccagccatgcccaccaccttggccgaggctcagacaatcatctccagctgccgggcatactcgatgacctgcctggccagctcagtggaggggatggtgctgtcttctggcttctgctgctggctggcaaacctgtattagttgttagggcccatcagccaaccttgttttttggca

SEQ ID NO: 2323 - DNA, 345 bp, Rattus norvegicus
  Genbank Accession No. AI233583
tttttagtggggggtttttttttcgtctttgataatatgatttattgtccattgacagagcaaacgcataaaaataaaaagaaaggctgacacagagcaatcaggcgcactcggcttgttgactttcaacaactctcatgtacgaatcgccggcggcgtggggcgtgggatgagggggttggggtgcattacaccagctacggctgtacacaggagcatccgtcacatgttcaccttcagcactttcccagtctgccgatctttctccacacagtatcagctgtcatagaactctgtgaaagtggttgctagctcataaatggaatcacacagagtgtggagaaa

SEQ ID NO: 2324 - DNA, 464 bp, Rattus norvegicus
  Genbank Accession No. AI233602
atgtggcagtttttcatgtgtgtatcaaattacagagtaccatgaggaggcagaggttacaatctgagcacagcgcaaagctgggattagtcagctgtccccccaagtccaccgggtgtccgcagcacatggaagagcttatgcggggcaatgtggtgtgcgtcaacgtttctgtaccttatttgacaattatcaggaatatatatgacatgtgtgcacacacgcttccaaattaaacacatttatataaaaagctcaagaatgacgttagcattaatctctttaaaaagtctatcatattaaattgcacccgcattataagcagaaatataaaaaaaaatcaacttactaaatactgatgaatttataaacaattgaaaaggaacttaaaagtttttactgaaatgttggattcctgtgtgacatttaagaggctctaacagactatggaaataaacattttt

SEQ ID NO: 2325 - DNA, 442 bp, Rattus norvegicus
  Genbank Accession No. AI233639
atactgtaaaatatttatttaataaaaatagttttatagtctatacagattgaataaaaagtgcaacagattatttccacttctgcataaaagtgcaaacagtacagcacattgggttttgcattccacaaacatggccacatagtagtacatgaacatagtcttgatttagacaggtaagaaggatcagattaagtgccacaaatagttaactaaattccaaggaaatattgctttggtaatgtgaacaatttgattgtatcataatacatattattttaaaaaacaaaataaaatttctcaatcacgtttcttcttgtttctgggcaaccaacatcctacagagcaacaagaaacggtgggaggagggagaccaaaatgtaagctcggacgttaaatgtaaggctactctgaccttagttctccgtctccttagtgttct

SEQ ID NO: 2326 - DNA, 557 bp, Rattus norvegicus
  Genbank Accession No. AI233696
gccatttcgcctatgtttattttatgtgtatgaacaataattttatcatatgtgcaccgtgtacatatctggtgtctgtggaggtcagaggaggatgtcaatccccaggaaccagagttgcggatggttgtgagccaccatgtgagtcctctagagtctagaacaattactctaacctgctgagttatctctccacccctcagccagtaattctaaaagtaatctttagtattacagttaaaaacatagaatttgtccagtttattgttacacaatgtaaaaagcagacactttttaaaattaatctgttaatgggcaggttgaacctcgaactttacactccacctctgactgcacttttggaccacatacttgagagtattacattttattagaggcaggggaaaggctagggcagaggggctatgcagatgttattagttgtaaagagggtttcccaagggcagtcctttaatcccaacactgcagaaaggcagacctttctgagttctaggactgtcaaggctgaatagtgaaaccctgtctcaaacaaacca

SEQ ID NO: 2327 - DNA, 687 bp, Rattus norvegicus
  Genbank Accession No. AI233729
gccaaacaagttttaatttattttcaaaggaaaagtaaccaagaaatcttattaaaactatttattcctgtatacaaataatacaatccgatgattctaaatgacttagtttttagagactacccaagattttgaggcaaaatcagataaggaaaaagaaaatatggttaagagaatccagaatcattttggcttcattttagttttaaacaaggtcaagagtgtacccatggaaactttgagaaaaccagtctttgaccttgcagcaaagactccagtagccagaggactcagaaaagctcgagtgctcttaggctcctgctgctttcgctatgttccaagcaccaggtccacacagcatttaagtaggaacgacactgctgatggtaagactgtgtccgaaactccatgacagctctgggaaggcagacgtcctgcggagtggagcatggatggaatcatgtaccttgagaaattctggtctgtcttagacggaatcagtcagctccttctacggctgttgtggcaacaggtttcacgtagtatggcccttcacttaggtacgttctgagcctcaaataatttgagttcccaaagatctctgcaactgtcttggaattggcgagcgcttttaccagttcgtatttcgcatcctttgaagttttgtcatgttccacagaccggtcc

SEQ ID NO: 2328 - DNA, 547 bp, Rattus norvegicus
  Genbank Accession No. AI233740
aatgtaatgactctttattattttatctgcataccctcaaatgttaccagagctccgggtttttgacaaacatttgctcagatcaaattagtgtaggagatgtccattcacttctccaagtcacatctgctcgcaacggtctgttcctgattcagcatggggatttaaccacagccttgcccacaccatgatgccaggcaggctgggattgagaggactgcaggagtgaggtatgcatctgcaaaagagaagtctcgccggctggttcagctttcagtactctgcgtcatagggaaactcttccatgttgactgtctcaggcagcaggcaggccctccagtttctgttgaagctcaggatagtggccatctcctggtcgctcaactggaagtcaaagacctgaatgttctcctgtatacgtgctggcgtcacagacttggggatcactaccacgttcctctggatgtggaaccgaataagaacctgggctgtggttttcttgtgcttggcggcaatctctttaatcttggggtcctgtaatagtgaa

SEQ ID NO: 2329 - DNA, 540 bp, Rattus norvegicus
  Genbank Accession No. AI233744
  misc_feature (1)..(540): n = a or c or g or t
aaagtcccaggatgtttattacaaaggtaaaccctgatccttgagactggcttatcggtaggatttctggtaccgggcacgggcaccgggaccgccaaacttcttggattcgcagcgacgggggtcagctacaagcagggtccgatcgtactggatgaggatatctttgatctccttcttagaggcttcatccacatatttttggtaataagccaccagagcttttgagatagactgccggatagcataaatttgggccacatgaccaccacccttcacacggacccggatatccacaccagcaaatctctccttgcccagaagcagaacaggctccagtaacttgtactgcagcgtgcgcggctcgatcatctccaggggacgtccattcaccttgatgagcccatttcctcgtttgcagtgggccacagctgtggctgttttcttgcgtccgaagacttgaacggactgcagcggacccttggacggcatagctacaagtatgaacacgagctcctcaccgngccgcgccctcgtgcc

SEQ ID NO: 2330 - DNA, 462 bp, Rattus norvegicus
  Genbank Accession No. AI233749
ctggcaaagttttattaaaggagaactttcttgtttacttctcaccagtctgttctggcatgcttctaataatatcagaatcacctgggtcaatgatagccagtgtgcatactctgtagtattttccacacgctgtgcccaattcaatgttattgccactgtagtgatggacaccagttttagccaacatggcatagtattctatttcagatttcctcaaagctggacagttgttggcgaggataaccaatttcgctttgccttgtctgatcatcttcagagtctgtttgtaccccagcacgtactttccacttttcataacaagttggagcctagagttgattgactccagagactttttcgtcttctttgcagccaccatcctcttgccttaggtgcgggacaagccccaaccaagatcagacgccaagatggccggggagcggcacgaggcctcgtgcc

SEQ ID NO: 2331 - DNA, 576 bp, Rattus norvegicus
  Genbank Accession No. AI233752
aagcatagaaacaagacttttattcactaatgtgcacaatcgagttccttatacaatcaaggaaatgggctctctcctgggcatcaactcttttatcaaaagaatatccactcttctcagccccacgccgacagtgtttctgaccccaaactaaatgttgatggggcgagaggtgatcacacacctctgaaaaccacaacgccaaggggctttaggccacaagacagcaatgaggacgggctggagccacagcagatcatactccccacacattgccacggagcaggcctgaaggatggggaggctggtgcaggtcagggcctgtgctcggcatccatgacatccaagtacttggcttcaatgattcggggtagcagattatagcggattgggatcatggcaatcatgatgagcggaaagaccatcttcatgtagggcagggagctcatgccgaacgcacagagcagaagcagctgcagaatctgcaggcccgtgaagtagtgaatcttcctttggggcactctccggatgtagtgtgtgggtgggtatgacgtctgcctcgtgccgcctcgtgcc

SEQ ID NO: 2332 - DNA, 534 bp, Rattus norvegicus
  Genbank Accession No. AI233767
ggacacagtatttattcaatgatgttccatacttagtcaccacatggctctctacctgcatcgcagctccccaccttggattgtgagggccacaaggccagcccccagctgtgatttacaacaatgaacacagggtcacaatgaaagagctctgagatgtttgtgaacagaaagaatgaagatgacattgtgggtcctgagtaagggcccagacaggctgcccaacccacagaacccaaggcctgaacaaggcctcagagggtccatctaagggagaatctaaggcactgtagtgaaggacatgattggcccaccaagtgtggtctcctggtctcatggcacgtcccttgccggaaccggtacaacaaacattccatttagaaggtcttcctgaacgtctgcaagcagcatttgctaatgaaaaatgaagacaaggccattcttggaagagtgtgccccagaagacacactctgtcacaagaccaaccaggtccctttctaaggtccctgagaatagcagcctggcctcgttcc

SEQ ID NO: 2333 - DNA, 587 bp, Rattus norvegicus
  Genbank Accession No. AI233771
gtgaaaaatgtttttattataatctcaaactttcagtgtatatcttcattacaatcattggtacaataaatatggaaatgctaagcagacaattatcacagtggcctatgggctgagggacagggacccagagatactgttacccctggtacttcctcagggccaatcaggaggtcttcaaagagtatagagagggagaggaatagaaatattaagactgtcagtgcagcaaattttagaatgtccattaaagccatggatataggatttgctataatagaagacagatactaacaaagaacagagagactcaagttttcctgttagaggcagaggaaatattacagaagccagtgccttcctcaggtccctggtgtgtgccccccgcccacccacgaattgtgtaggtcatctccacttgctatgtgcccagccctgtgccagcccaggctctcccaggcacccaccttgcacctcacacagcatagttaaggagtgcaaggctgtgtatcatataccacagcactggttttcctcagtggtggccaggtgtcccacagaatgattttgaatctgaagaaagctgc

SEQ ID NO: 2334 - DNA, 558 bp, Rattus norvegicus
  Genbank Accession No. AI233822
gagacatacatttgtgattatatttaggtagatatatgccaactgtgcagagaaagcagaagacacttgggaggaaaggcagccccaaggcatcaccactctgtggacaccagggtcttcacaccacaaaaatgcccacattcagttacagccccaggatcaaatgttcacctgtgtgtgtccaattagtaagaacatgctttcagagtaaagggcaccatgtttctcttagagcaattatttagacagtaagatagggaacgtgagtgatgacgtaagtactcttgttttacacagactaccataacactaaggatgtagctcaggctggcttcgaactcatggtaatccccctccatttgcctctcaagtgctgggataacaggggtgagcttctagcattttctcttgtcactggttctgaccctgaggttgccagaggcaaacaattaggggttggagtgtttttgtgaaggttcacattcattcatttctggtgctgttggggctgggccatgtggtcactgctgtgctgagactcctgctttggcagtgatg

SEQ ID NO: 2335 - DNA, 610 bp, Rattus norvegicus
  Genbank Accession No. AI233829
aatagaaaactttattttcaccgataatgttgccgtaacataatttcatagcagacctgtgcaaaagatcccacatcacaaatgtcaccaagagatttcacaacttcccggcaggacgtgtagctctgggcccccagtgttgacacccaacattttacccctttatgtagtagtacagagagtcgagacatcatgacacaagaacaagccgcatgaaggcagtgtgagctctgaggtcagacactcgccgtctctgaacggtcactatagtaaccacgtcttcgcctccatgtgctcagtgtaggtctttgctgttcttatctcttcagcgtggtaatgtggaggactggagagtgtcaactcatcatgagcccacgcaggactatggctactacggatggggtgaactcaacatactaagtccaagtttggcaaccatcagcaaactggctcccgcgatcaaacctgcaggcataaatttcccagagttgtagaatctcatccccataatgccagccaaagtcccagacgtagctaggaaaacccacacgttcctggggtcctgagacagctggtaggcacccaggcctgccaggcccccaaagaagaa

SEQ ID NO: 2336 - DNA, 434 bp, Rattus norvegicus
  Genbank Accession No. AI233925
agaggagtggaaagaaggcaaaactaaccaaaggttaccgttgaccccaggcatcgcctgtgtgaacagtcaggactaacacggggacacagattcagtcctgtcacctcccccgcccccaacacacagtccaagtctgctcactatgggtgaaaagctctatgggtcagtttgtaggtttgtaccaaacaggtcactaaggagctcacggtttttaagcagttctggagaaaggaagagcagtatcaccattatctagatcctgctaaggatccagttctgagaggcacagagaaaggagccctggggagagcagtcctcagtgggatgtcatcataaggcagcttggcttctccttggttacctgcacttaggtgtcttgcagggactttttgtgaaagctggttccaatggggagggatcctcctggtgcc

SEQ ID NO: 2337 - DNA, 460 bp, Rattus norvegicus
  Genbank Accession No. AI233993
ggctatggatgattgatccggagcatatgaataatatggctttgaagaatgcatgggtgcaaatgtggaggaaagcaaggtagggttggttaatccctaatgtgactattataaggcctagttggctggatgttgagaaagctacaatttttttgatgtcgttttgggtgagagcacagattgctgtgaataatgtggtgattgcgccaagacatagtatggctgttataatagtactattgtttgaggttagggggtggaatcggattattaggaagatccctgctacaactattgtgcttgagtgtagtaaggcagagacgggagttgggccttctatagctgatgggagtcatggatgaagtccgaattgggcggattttcctgtggctgcaattagtagtcctgtgagagggactagattgttggtattggttaagaaaatttgttggagttctca

SEQ ID NO: 2338 - DNA, 651 bp, Rattus norvegicus
  Genbank Accession No. AI234012
aattcattaaaagttttattttgaatagcttcaatcaaaaaagatttcatacagttatttacaaggctgaatgtacaattatgaatatctacctttttgacaacagggtaccatttttgagcagcaatacaattttaaaaatataaagatgtgtcatttctgatatataaagttacttaaaaaatccacggtctcagggaatttacaaattataacaggaagtaacttttattaatttcatgtgcacataattaccaaattgtaatacattaaaaatacatgtaaatgcccagactgtacaaaagttaataccctatcttgttaaagttcccagtagcctcccaccataaatacacaaaatccttttgatacaacagaactgcatgcatgagatattaggtgttctctaaagcttgaagttgctcgtcactggatctgagtttttgctgcttttggaatatatatatatatatatgtatgcatatacatatatacacacgagtgaaagcgaacattcttcaccacgcctgtggaactgtgcactgctttcatcatggggataaagtgtgaaaacagtgacaggcttgctgaaatgaaaggtgcgattggagagcttcagaatgtcaggcttataaaacataaaagtcactg

SEQ ID NO: 2339 - DNA, 516 bp, Rattus norvegicus
  Genbank Accession No. AI234038
gcagtactgcaaaataaatttatttgaagataaactggcttttataaaatgtcagaggcaacttgagatcttagatttaacttgtcttgtaaaaagattgaacttcaagtagcacaattttgtgtctgtttttaatctggaacattctctatgaaacagccaattgtttacacgacacacttgacatttgactccagcaccagtggacccgaagctgtcagctctggggctataggctcgacacaggagaacgctcttcaggccactgaggcttctagctcaggtcctagcatcctagcctttcccttccctggcacactccaaaaccataagatcacaaaccaagactgacccttagccaagcatgggacagaacttatgcatgatggtgcacagggcagacctttcctgacgtccacctggcaggcctggctaaccaggaggcccgagcctcaacctttccagggccctacctagctgccaagcagctgggaagaggaaggaaggagaaaggag

SEQ ID NO: 2340 - DNA, 319 bp, Rattus norvegicus
  Genbank Accession No. AI234079
gaggccaacgaatatttgatttatgagctcaccagtcattacacaatgtacagacatgatccactgaatagtttatgctccacacaaatggttaaacaatgatttatgaaatactaaacaaaaagcttctataagcagagtatcgtttcctgccccctcccccaaaaaaatcagcttcaggcatacatttgtgtttatgtctattccttgagaatgttacgttagcagtgcataaagtttattccataaaaagagctacaagagaattcgattttcaagagactcgatgcattgtgctttcagataaaaatcccaagag

SEQ ID NO: 2341 - DNA, 530 bp, Rattus norvegicus
  Genbank Accession No. AI234090
gccgagtgagggctgtgcccacaaaaacgtttattactcactacgacagtaagcacaatgcatatgactgggaagagtcccacccagaggaacaaaggtgaggcagacagtgatactcactgcagagaactaaagaaaacgctcacttgtagcttacacacattaattctaaagaactgacgggaggccccgcatcggcgcctacacttccgatacttctgagttcatacaccgcagagacgaaaggtccgtgagatggaatctgagtgtgttcaaacgaagagggcattcaaggtggggggatgtcattattggacttcagaatcagtttgtccccactcttttcaacctcaaagcccatcttcttcagtagggacgcatttgccaacccctgctcctccatcttggcaatgaaatcttggttttggctgttgtcttcagtgagatttcgcacggcatacaccacccactgcatcataaaggggttgttgtcatccatgttgctgctgtccaagatcagaggaatgcca

SEQ ID NO: 2342 - DNA, 492 bp, Rattus norvegicus
  Genbank Accession No. AI234113
  misc_feature (1)..(492): n = a or c or g or t
aaatgactgtttcaagatttaattacagttgaaggtgacacgttagaaagaataagtgcattgaaggcataagagtgcttacaaacccagctcttgaaatggaggcaggaaagggacaaggattaaaaagatgggagcgatgtgacccacagtgggcagagtgggtggacatggccttctagcttggctatgtggcctctggacaagtagatgcccacatagaaggtgctaggtgctggtttgtctcccagttccaggtagagaaggctggtggtttgtggatcatggcgcaaccacagagctacacctaggatcacacctccagccagccagaagacgaaattgaagacgaagagcaggtatttgatgcatttggtgcagccttccacccccatggcggcgcgcggcctgcggagcttgggttggtcctggagcgggcggtctggggacgcantaccggagtccgggactggaagatagcctgggtcgctt

SEQ ID NO: 2343 - DNA, 556 bp, Rattus norvegicus
  Genbank Accession No. AI234128
gggaaaaatttaataagcatcaaatccactatacatcgataatgcaatactgaaattgtgaaattttaaatattgttttctcaaaacttggtgatttctttttcctgggacatgtggagacagaactaagcattcatgtggccagtccagatttagctgacactcatgtctaaagagctgttcacatttcatctctacagtaaggtagaccgggaactgcttgtatctgactctcaacacagatttcatgagacaacttataggaatgtggaatatttgaggtgcaaactcagaagctctacactgggatcctgttttgttcagctttaactcagtgcattgatcttgaggatgcagcgagtatgttctttcctaattcctttgaaaaatatttccgtggtaaaattggtttcttctttaactctaactgggtgtttctaagaaagattatcagctttgtggttggttttccacttggtaaaaatctatcaaaaacatcctatcataatttgtaaggaagaagaattgtttgttaaaggctgcagggtcaggaaag

SEQ ID NO: 2344 - DNA, 375 bp, Rattus norvegicus
  Genbank Accession No. AI234248
gggaatagttgggaggaaagcggtagggtaagggtacttaatactgtgagggttgggaggataaaattatgttttgggttttggtggagataattgggcttaggagttgataaaattggtataaaattgatagtggagcaattttttgtcatgttagtaagattaatccaatgtgtaggggaattccttgggtgacttccggtagtcagtagtggaatggggctagtccaagttttatggctagtgaaatgagtattatgttgagtagtatgttattggtttgttgttggagggttcatattcctgattgtttgtatttgaagatgatgactagtaggataattattgaggctgtagcttgggttagaaaatatt

SEQ ID NO: 2345 - DNA, 489 bp, Rattus norvegicus
  Genbank Accession No. AI234293
ggtgcccacatttggcaaatgatagtttatacatacacacatttacatatatacatattttaagcttaaagccccagcttcattattaaactctgcttaggctgttaaaaagaggttaaatggcaagaatacatatataaagatcaggaaaacaggaaataaccctaatgtataaaccaagacactttttaaacaaatcttgttaaaacgactacagcctcatatatttacaagaaaagtcctaatgtactcagtgtggcttggcaagctaattacgttcctttttatcaggaacagtcagcgtccagtgattcattcaggttaaaggcatcaagttcacagatcattttatcacatgtatgcctttaaaatgctacacaaatgcatgacagcaatgttcagcttgtagctgaaaattttcttatgctgctggacatttgacacagtcttacgcattttggacaagcgcgctaaactcaaaacattctt

SEQ ID NO: 2346 - DNA, 501 bp, Rattus norvegicus
  Genbank Accession No. AI234496
gaaggaagtgatcagactttggtttattgtaaaacttagcaaagtgtttcatataatccctgacccctcactctgaaaacaaaagcagaaacaattattgcttattttccccctctactttgtctgtgctactgtaagagaagggagaaagattattacaataaataaaaatagagatgtaacagagaaaaataaatcagtctagatgagaagtattaggagcaacagaaatttcattaagcagtttaaaaataagcttctttaaaaaggttgccttattaaaataaatcacaccaaaaatatagcagcagagaagaaggatacatacaagttaattgcacatcagtcccatgcaaaaacgtggatcattagccaaagcagtagtactcagaatccagcttgggatgcttgtgcagagcttgagagtcctctatgatagagctgtcactgaactgatccaagtctgaaggggtctgatggcctggtacatcatctgccaaa

SEQ ID NO: 2347 - DNA, 437 bp, Rattus norvegicus
  Genbank Accession No. AI234527
aacagtttttcactctatttaattggcatttgtcattgtggacagagtggtttcgttctttgaagacctttactcctgagagctctatcttgcctttggaatgctctgtagctgctgctgtgattggacccttgcaccatccactttaaagcacgctgtcactagaacttcaggacggtcctgaccacgtcaacatagtggccatccgggggtggcttcctttgacttccaggttgccggaacttcttaattgtaggaatgttgctgattcttgtcttaaatgcccgcagcagagggaagtccgacaacacaggagcactgacttcttccaccatcaaaatggcttctagtagctgtatgtctgcccaactgagttggttgccaacaagaaatgcctctccatggtcttttaaaatcttttcctcgagccgaattct

SEQ ID NO: 2348 - DNA, 454 bp, Rattus norvegicus
  Genbank Accession No. AI234604
gggtccctgtggaacaatgctataccctctactttgacttaatcgacctcttcaatggtggggcctgaagaagcaccaccagatggaggagctcctccaccagggaagccaccaggcatcaatgtcaaaagtaacctcaatctgaggaaccccacggggtgctggaggtatgcctgtgagctcaaacttcccaagcaggttgttgtccttggtcatggccctttcaccttcatacacctggatgagtacacctggctggttgtcagagtaggtggtgaaagtctgggtctgcttggtgggaatggtggtattgcgcttgatgaggacagtcatgactccaccagcagtttcaatcccaagggaaagaggagtgacatccaagagcagcaaatcctgaacattctcagacttgtctccaaatagaatggctgcctggacagctgcaccataagca

SEQ ID NO: 2349 - DNA, 449 bp, Rattus norvegicus
  Genbank Accession No. AI234620
ggccgcttccattttttttttttttttttttttttttgagttagaatcaagccaccagatttttattttcatgccataaataaagttccctatcactcccattttcttacaaatacatgaaatacagagaagcagaaattcatttggtgaacaatcagcttttgtatatctaagtgccaatgagataatgaagacctgtgaggcactgaaagtaagactagcacaccatccagtaccaagctcttttcatttcagagctagcagacagttgttggtgcctgtctttctggcacatcctggctagttattctagcaccacgagccaggcattgtggattctggacacatgttctagtgtagagcccagtctgttcaatgagaagaatcactactgagcaagcactgctgatagttggatcccagtcaggaaaatggaatggcaagaagga

SEQ ID NO: 2350 - DNA, 324 bp, Rattus norvegicus
  Genbank Accession No. AI234786
aaaggagtcaccatatacacgttatgctacaacagtgtgaaatggagaaaagttatttacatgtgagttgtctttacactgccttgttgtgtgtgaaaagcagggtgtgtaccagttagctgctcaccaatgactttattgctgttggtttttccctttgttaaaaatcttctaggatagaaacgagtgaaccggtcaagggtttaacacacagggagggtcaacagccaacatggtggaaacctctcttccctttctctgaaatctgcagccttcctcagaaggagacaggcatgcagtgccgggctgccctcacctcgtgcc

SEQ ID NO: 2351 - DNA, 620 bp, Rattus norvegicus
  Genbank Accession No. AI234819
gaaggtggaaaacaatatattaatttattcccaagggaaaaaaaaaacagaaaacatccgcaaaaccaaactggacacagtagatacgggtactttccctgccagctcaaatgctgttctctttccaatagtatttacagtaaggaggtgaccgacaatgggcgtgtaaacttctccagaaaaatcgtctcattctccatgagcgatccagtgtaaaacattagtcttcaggtgctctcatccgaataacaaaggagaaagcggttttagatttcaccttgactaagtacttcttatatctcaaccctttcctacccgatacaaccctattttatttttcagtagaagaaacaagaaagtttacacgaagtaattccctttaaaggtatgtaacattcagcaggtacaattacagcacaagaatgaaactgtggtaagtgacgtcattaaagcaaatgggtttttcccctgttagattaaataaatatttctaaatgcgatagagcgagcaaagacaaatcacattttgaaaattatagttattcatttgtgtgtatgcgtatggggtgggaggagcggcagatgtccgagtgcaaggacaagtgtgtggaggttggaaa

SEQ ID NO: 2352 - DNA, 681 bp, Rattus norvegicus
  Genbank Accession No. AI234830
ttgctgtcgtttactttttttttgagtaggatcaatacacaaatttcaattttttaaaaaaaagttttacgtaataaataatgttatagaaatatacagtgtgctggctctgatggtatatcacagcacttgggaggctggggccagcctgggctacagtgtgaaattttgtcacaccctcaccccatccaaataagccacaaagtcttatcagaaaaccaaacagcctcaagcagaaaaattctctttagtaaacgacacaagaaggtgatgctgtctgtcagtcaggttcactaacttttcttaattctctttgatttcttcccctggtcttctactccattctctgcaggccgcttcttcaaccccttcactttcctcgtctgtagtttgcttaggtcttgcttctgcatatgaatccttccaaacgttgtaccaaaagtatcctgagagatattcttcctcttcttcggcttgagagctttgggcactttcatggacagtttataaaggtcgtctgatgctaagtgtgtcctcctcacaaccagatccaacgacggccccatctcttctagctcgattctcggtgttctgcacccagatttcttcagcagcagcttatagcttccaaagtaaaccttcccattcagtgccgtgaagtgcagaacatactctaatcca

SEQ ID NO: 2353 - DNA, 704 bp, Rattus norvegicus
  Genbank Accession No. AI234834
ggccgctcacttttttttttttttttttattatttctaaaaatatattttaaaaggttatttaaaagtaattaaaaagttatttaaaaagtatcaaaagctttttccttgtatcaaaagctgggccaccatcctggttacttgtggattgactaagcagtccagcaggtcatccgtggacacgaagactctagaaggcgccacaggatacctcggggccgactgccctgccttcgcgcgtgctcctttactggcttgctgcctactggcgcagggcagttctgcacagcgttctacgtttctgctggtacactcctggctgtctccttccagtgcgcctactctctcttccgatgctggtgtcacaggaaccagatctgggccaaacggactcgcggactcctgtttcccagcccccacatcggggctcgggtcgcgcgcctgctccacttgcatgtgcttctgcacacccggctcctccccgtttgctctcggagcttgcatttctacttctttagctctttcacaatgatcaaaaaatgcacagacagcactgttcaagtagcagctattgacttcatgagacgtttcctcaacctagggagaaaagaacccttcaacatggcgctggagaccaatcggaccgactcaccatcaacatcaacaccgagagctggccggggcacctggccaccatacatacct

SEQ ID NO: 2354 - DNA, 668 bp, Rattus norvegicus
  Genbank Accession No. AI234849
cagagaaagataccagtctttactaaaatatttattatttacaacctaatacagctcaatctatatttgttacacttctaaagagaagtatccatttctcagtaaggggaacattattcatgcatcatatactgtgaacagcattatttttcgaactttaaacattttcattttaatcaataaaaataagtgaaaagaacattcagattgctgaacattatatggtcactatcgaacatgacctaaataattacttttgaacaatgaatataaaactagttaaacaatgactattaaggagattgctcccttaatacgacaattaaaatctaaaaggagggctggtgatgtagttcaattggtagtgtagacctatcgtgcataaggccctgggttcaatccacagcatcaagttaaaaaaagcaggcgttacggtgctcacctgtaactggatcacgagttcaaagtaatcttcagagacatagaagtttgaggttagcctatgttagagaccctgattcaaaaacaaaataccctaaaaacattagtattggctatcctataaacaagtaaagtggaaatcaattgccttgatcaatactccttaaagacttggtttcataattacctctgataccgactgctacgcacagcaccattaacaccta

SEQ ID NO: 2355 - DNA, 669 bp, Rattus norvegicus
  Genbank Accession No. AI234858
gctggacaccttaaaaactagttttatatatccaggagggttcagagggcagggctgagccacactgcaacaccttagcctgtctccctccgccttacaaagcaacattgtacaaaactgtatttacaggaaaacaaaatgagaattaagaatgtgtacaaaagtagacaagagccagaaatcacacatgcaggggcggctttgggaataaggaatacggagttccacgccgaagcgcagggccacacactatgtgaaggagcagaccccagtgccaactgaggggaccaggcgttcagctgcagtcttaaacgctacaccactttctcctgctgtgtggcaagagccagacaccagtgatggaaacaagaggggctctctggcgagccccccgacaacgatggattcagaaagcatagcgggtccgaatatcctcaagcttcttggacacttcaggtggggttcggtccagctcttcagagacatttttctgcttgttgggctccatggagttgaactgctcacaaaggtctccatcaatcacattcttaacagggaaataataagaacgaaagctgaagtggtcacgaataataccactgtgctttaaaactaacaaaggcagccaagtgtggttgcgtacacctttaatcccaacactccaggggt

SEQ ID NO: 2356 - DNA, 440 bp, Rattus norvegicus
  Genbank Accession No. AI234925
  misc_feature (1)..(440): n = a or c or g or t
acaggttgcatattctttaatgtaagccgaggggagccaggtgtcagccccaggtcagtcctatcctccaccatcagagctgccaacagcagggcctctttcttttggttaccatgaccagcagcatcctctcacacacatggagtagagccatttaatcagattgatgattcattttaaattaacttcaggaaaaattgagaggatatgtatggcctgataaactgccagagaaagacgaggaagacaagtgtgaggtcgatcgatcggctgactatattgacaagatactgattggttacatgttgaagaaaacatacaatacaaaatacagaaaaagttggttccatcccttccactccccccccttacccacccacccccgaatactcatcatcgngatttggtcagaacagggctcacagccagaggtcagggtg

SEQ ID NO: 2357 - DNA, 478 bp, Rattus norvegicus
  Genbank Accession No. AI235054
  misc_feature (1)..(478): n = a or c or g or t
gccattcaaaggccttttattcatatacattacagagactatgtaatcatttttttaaaatccctagcttggatttggataatccctttgggtccctggtgttttccagactaggtggcccagggtatcagtccttggcctttagcacgcagttactatctacgaggaggatgtgtggttgccctcgttnggnngnnggnngggnggggatgttggctgtttatttagacacagctgtgtttgaatggagagtggaaaggctcatttttatgcttgctggctggttcaacaccctcaagactcagttcggccatcggctactgtaggttcctagtatagctgccaggactcttaaaagtcatcgtcatcacagatgtcaaggtacacgtcaaaggcctctctgttgcagtttccatcaggagtgaagacatatttgtggaaggtcccatctacgcagatggcgattacagaattgacg

SEQ ID NO: 2358 - DNA, 193 bp, Rattus norvegicus
  Genbank Accession No. AI235135
cacggaacagttttatttgccaaccttttttgggggccactcactccttgtgagcaggattaaaaatgtccataggtgtcctctggttggatgcagcttgggtccacaagggggaatgctgaccagggcatttttaacctcaacaacctgagcaaaagtccaaactcacctccatttgatgttcttgccctcc

SEQ ID NO: 2359 - DNA, 426 bp, Rattus norvegicus
  Genbank Accession No. AI235186
cggagctggggaccgaacccagggccttgcgcttcctaggtaagcgctctaccactgagctaaatccccagcccaagtctatttttttatttggcaaagtgagtcttttctttgttctctggggagtatagcttcccctcaagtgtgccattgtcctttatcttttaagcaatttgggccttttctaagtgaggccatcccttagtctaatcctagttctcagtggctgtctcttgcaggcctgtaaccaggataggctcctgtagagccatttcccgagccactttatctgttttgtcactgccccatgtcactgaatctcttccctcctgttttcctgggcaatgaatagtactcacagttgttggcttcatccgggcatccaagagatggcaaaggcatctgtggcgccgatgtgctgggggg

SEQ ID NO: 2360 - DNA, 442 bp, Rattus norvegicus
  Genbank Accession No. AI235277
gacagtggtggtgagagatttgattgagatgccttatggagtagtcgcattctgaataaagcaccacactgtgtcagtccgttcccacactgctgctaacacagctggtttgcttagggagtgcccaacttagccagatcaagggaaccccaagagagcaggggcaaatcctgcctctggtgccaagcctcagggcaggcaatcctggagaacactgccagccttgggaagcttgggagacctctaggctgttttcccttcttttcaaatcccacaatttcctgacggggagaagctgtaattagcccagaccaggcaacagatctcagctagaggtacagctgcagggaaaaccccatggaatcttgggaaccagtgtttttccaattacaaggaccgaggaataaactttttctgtgggttctattgaaaccctcgtgcc

SEQ ID NO: 2361 - DNA, 439 bp, Rattus norvegicus
  Genbank Accession No. AI235284
caagggcagaactggtttattctgatccccggccccgccccaccctccggcccgaccctgccctctacaggcgacccgcgtggattctgggacctggggggcggggccggggtccaggcgatgtcatctgggtcgcaggtcagtcagcctagacgggggcggagccgccttcccgaaagcacaggcgccgcttctgataggctacaaagctggacacagcccccgcaagcgccgccaggactgcagcgaccacacctgggattaggccctggggctggccttccgactccgccccatcagtaccgcggtcccccgctccgcctcctcgtcccccatgtccagccacatcctccaggtctcggtcagagattcctcctgagtctctgggtggcccaggtggtttcggatcaggcttgggccggtttcctggcctccgggg

SEQ ID NO: 2362 - DNA, 595 bp, Rattus norvegicus
  Genbank Accession No. AI235364
cacagtccacagaggctttttatttatgctttacatttaaaaaaagaatcccaggattttccctcctgtatgttttcgtcttgcctcttcatggtccatgatgccagccgaggtcgtcagcacaatgaaaccaaactgccgtgatgggagcagattgttctgccacttctctaggtctttgagttgaacatcaaatctagggcttataactccacacttgttcaaccttcctgtgaggttcacaacaatcttcccagctctgtgatcatcaatgatctcgaattcaccaatgtagccatgcttcatcatcacagttaggaaccgaacgatgactttggaacacggcctgatgaggacctggcgtttgcccctcttctccgcgttgttgatgctcttgagagcatctgccagaacattcattcgcaccatggtgattggcagggagtggctgagccgaattccccgtgccgaccctggccacggccgcgtgggacactcgggactccacagcacccgcagacacgagaagctgcagggcccacgccggctaccgtccccgcccgcccaggccgagcccggcctgctgcagtggggc

SEQ ID NO: 2363 - DNA, 445 bp, Rattus norvegicus
  Genbank Accession No. AI235382
aagtacagggagcaatttccagcatattttataaaagtactgccatatcaaacattttgtgtcacttaattccaatgaagagctgcctttttttcttttaaggtactaattccaactgatgggacatgtgtccttaaaatagaaagtttccatcatttattcaaatgtcaaaattaatatttttgagaagtttattgctttatgggtgggcaagatgctactagcacattttaggtaaataaactttattaaaaactatgaggtcatttctgtttaaaactttcaggataattcacagaaaatagatatatttattcaaagtacacactgaagggctggccatctagctatgaacatttaaagtgtagcagctctttaaagaagtaacacacagtggttctgctcagcgcactacacataattgaaatgaataaaactggaagac

SEQ ID NO: 2364 - DNA, 432 bp, Rattus norvegicus
  Genbank Accession No. AI235403
  misc_feature (1)..(432): n = a or c or g or t
gactctttaatgggtcattgtgacactgatcgtcagcagcgtgatatatctctcttcacatgggaatgtcgacagcaaatcaatcatggaacatcatagagccggaaggtcacgtggggtcggtaagagtactctacatgctaaagtgacagttatcctcaaaggaacgccagaatgtgtgtagaccaccgtcacctctgaggagggctcagctgtgcgcagctacccagttataggaagtgtccaggatggggtctcttcaccttgtccaggaacagctgggggagcgctgaatgttcccaggatgccaccctccaccgcaaggcacccagccctccacagctgcagggacaagcccatgatgtgtagtgacanactgaggggcatacattggactcctccactgacccccacaacagaacctcaagacag

SEQ ID NO: 2365 - DNA, 492 bp, Rattus norvegicus
  Genbank Accession No. AI235414
  misc_feature (1)..(492): n = a or c or g or t
gtaaacagcagcataaatacctcccgacgttccttccaagccttctcagctaaacttgtgtttctggtgtacatgcgacacggcgacagtgaacacgctagcatttaatttaaaggaaaacaaaaaggtgcaaacggaaagtgccttatcaattcaacaggaaaagctacgccagtcactacattttatattaattaaaacaatatataaacaatatctctttagctatatatagtcttcatgcccatttaccctgtgtaatatattataatgctattgttgcgagcgcttatggagcccctttccacgccatcctgctgaccggcaataatcggtgagagaaacaaaaaaatcttccttcatgacacagaaaagcaagctgtgcaaagtaacgccgtaactctggccatacacaccggggtcaccgattaacgctggactctgctgttacncgtaagtctgtgggcagtgagctgtaagaaaaggggctcc

SEQ ID NO: 2366 - DNA, 598 bp, Rattus norvegicus
  Genbank Accession No. AI235467
ttttgtttttttttttttttttgggttttgttttattttattttaaagtcagtaaaaccaagtgcagtgcactgaaatgacggccagcaaggggcaggcactttatagcatcagagactgctgtctgagaattccaggtagtttggggaattgaggctttaagaagaacatgggtcatgggagactacacaagataaaggtagaagacatctcagctgctgagatcacttgagggcaagctgcctgatgatgccaagtgggaagagaacagaagggctggggagagcacactgccaaggagctcaagtctgaccttcccggcactgcacagcccacagaagtttcgagccaaggagtgatcaggcgtcttttggtaactggccatggcagcagtatgaaagggccagggtcacagcaacagcagccaggctggcatacatcctggaggcaagcagttgtggggaaaggggacactgatttctgtagtacagccttcgagaagacaggatggtcagtcaacaggcatagcttaaaaagaatggtacctcaccataagatcaggactgggcgataagaaatttgggaatcaaaatatgga

SEQ ID NO: 2367 - DNA, 333 bp, Rattus norvegicus
  Genbank Accession No. AI235481
gcaatctgcaagaggatttttattgatcaggatacacaggtatctgtgggcgtcccagtcaattcggaagactggcgcgcctagcagagccaggcatacaaatcattattactatgacatgttggttcagtaacatcatctaatatagtcaggggagctgaggccccatataagatctcaaagggggtaaagctgaatctggaaggggtatttcttgctctgaagagagcaagagggaaggagtgtcacccagtctacgccagtctccatggtcaatttggtcagggtctcttttagagtcttatttattctctctatctgtcctgaactttg

SEQ ID NO: 2368 - DNA, 673 bp, Rattus norvegicus
  Genbank Accession No. AI235502
aaccaacactttactgtggctcagactgcctcagacttagctcagcccaagaactataatgctgcaaggacttgaccagctcagacaggcatctgctccgctccagacctccacgagtcctggcacagaagggttctctgaaaagtctactacaggagctgtgcagtcagcacatgccaagcaggggttcgccctctgcccacaggggaggctgagcccagtggtcagacgtggtcaccagctctcttctgcaccactgcgggcctggacagagcctgctcctgaagccgctggaccagctcctctacgtagaccttgaacaggggcacagggtccttttcctccagaagcctctgtttctccagggcctcctccagcgtcaggccaacccactcggcctctgcctctgggatgacaaagttcctgtacttgtcatagatggctgctctccgctcggggttatcagggtggagctgggggtcctggcgggcaagcctcagcagcatccctcgcttcaggtccatgccaaacttggagcacaggtcctcctcaggggtcttgagaatatagaagtcgaatccataggcctcatcaatgagatccagggtcctcatggtcacagtcacggtgaacttcttgtccaagatttcactgtaaagctcccgagtgaaca

SEQ ID NO: 2369 - DNA, 610 bp, Rattus norvegicus
  Genbank Accession No. AI235503
acccttaatgcttaactttattatcaaagtgtttccaaagtaaaatgatcctcataacaacaattacttccaaagatcaagaacaagtaattatatccccatataaaaatcagcaaaacacagcaacagtacacggagtaattctaattggctaatggtacaccattccacttctgacagatgctcacgcactgaactgtctttagaaaacaaatgaggttttgtcacttatcctagtccccactgaaagctggaaaagagaaacaaatccccaaatgaaccaccatccttttctatgacagctcaaggccatgaaggtaatgacgaggacttgggcacaggagtaatgagaactgtgtcacacgggaatccaactggagtgtgctccacatttatgttaattaagctgtgagcaaacattccagaatcataatgtaaccattccagagctttgtagctaacgctaaaaaaaaaaccaaagaaaacaaaacaaaacagaaaacccaaaaaacacaaaagcttcacattaaggacagtttaacagagtttctgacatttatggtggggaaagaggataaaaatgagtgaaaccaaattctttcattgagca

SEQ ID NO: 2370 - DNA, 514 bp, Rattus norvegicus
  Genbank Accession No. AI235559
ttggctttttcaaaacagggttcctctgtgtagccctggctatactagaacgccctttgtagaccaagctggcctcaaactcacagatatccaccaacctcttcttcctgaatactgggattaaaggcgtacaccaccactgcctggcttccaattgcattctaaagctcccaagaagggcagcctgactgaactaatgaagataaaatgtatcccctgataaatgtctgtagcaaaaactagaacttcaaacaacaaacaaaatgagtttcctggtgggtatcatagtatttacactcccttaacttaagacctggaaacccaatgtcaaattgactggtcatagaaactgcatagaaacgtacaaatgaatttcacggacaacaaattgggcacttttatatccccacccacctttgccacagcactagaaaagaccaaaaccacctgacacagaggaatgcccacggtggagaaggtggggacggtaaggcacagaagacactgcctgcca

SEQ ID NO: 2371 - DNA, 384 bp, Rattus norvegicus
  Genbank Accession No. AI235585
aaagaggcccaaaacaactttatttgtatatcaactttggctcccatctgactagcccaggatgagggcagcagaggccagccaaaaccagtcagccaataaagacatcgcccaggatccagagcggcccactgggagggggtatgtccatccccatgaagccactcaggcagatcgtctttccagcctgcgataccttgagtatgtacttctctgggtgtagttcaaagttttggcctcctagcttaaaggtgataatgggcaggctggacaccttctcacaagggatcatatactcgccctggatgagaggcactgccccaatggccttctgtagttccttcacctcgtccacaggccccaccagaagagacgtccctgtgt

SEQ ID NO: 2372 - DNA, 475 bp, Rattus norvegicus
  Genbank Accession No. AI235633
aaaaaaagatttattggagtttcgaccattttaatggaagcagcaggtgggtcctgtgagaggttagcgtgagaggatgctaatgtcactgcccatggtctgcgtccaaacggttgagctggccgaaaagagatcgatacaactcggtcctggcctcatcattcattgcagtggggtcaataggcgccatgaaactcaggagcttgctaagcacatggaaccgaagttttcttcctttgctggcttttctatctaccttcttgcggattttgcttcgtagtttctggattgcaagccactgccttcccatggccacctgatcatttggatccaaagagctggtcttccgctctatgagttctcgaaggagctggtggtagaagtcatcatcatcaaatatctcctcgtccaagtccttcaggtgagcattggcagggacctgaaatctcctcctccaggccctctgaatccccat

SEQ ID NO: 2373 - DNA, 494 bp, Rattus norvegicus
  Genbank Accession No. AI235675
cagaactgaatttgttattcatacatttgcaatgatttaaatacaatacatacaatttctacagtgcattagaagaacagggcagcagcgctcaccaaccagcttctgttcctagacataggggacaggccttaggctggcagagggacggctgttctgaagtacctggcactctgggctcctggcactcccaagtccacattcaaggcaacttgagtacaggcttcaagggagggaagcagggaaggccgcctgtacccttgcccaccgggcctggcactggctccctcttccattggacccaatttcctcctgatggcagacctgatctggagcaggacaggacacaagagtctcgtgcagcactaagttctctccagcactccagccaacaggctgatgtgaagataactgtgaggaccctggacccctggacccctgctggctcctgtgaggaggaggcagggattctctcaaacgtgggtctgaggcca

SEQ ID NO: 2374 - DNA, 340 bp, Rattus norvegicus
  Genbank Accession No. AI235703
aataaaaagtgcaaagaatagaccttcatgtttaaattatattctaaaataaaatatatatatatttatattttcattaactgcaggagacaactgttaagggcctgagagttcagtcccctctcggtcactaggataaacgtacattttaaggaagcacctatgaaaaacggtagagttcacaacatgtggggacacagagcttctgggggggacatggctaagaatcccaggtggaattgcatttgcttcttcttcccttaaggggctgtttactctgggtgtagcattataaccctttgccatgggcttcactttcacaggagggtctctcagaacc

SEQ ID NO: 2375 - DNA, 471 bp, Rattus norvegicus
  Genbank Accession No. AI235707
aaaattgaacaggactgctttattgggtgaattttaagacgcaactgttacatgaactgcaaatgaagattttaaatatcctacacaaaagtcaaataactcatgctatgtgtcaatcctcccataaatacttttagcctgtgttcaattatagtcaattctgaattggcccatctctggattagactttctaaagtctacacagagtaaaagaaatagacactaatggaaagtctgtaatctatcctgtagttggaccctagaaagatgtccatcgacaaaatccacaggccaggtaataggctttcttcatagtggttttggctgggtcgtctggaagctgtgtggagatgcttgtagctcgggtggaaagggtgtgcatgcatccaggacagtcaaagcagttggcacatctattctttgttaatttggcttcagctgatggcatgttttctaagcagctgggacaat

SEQ ID NO: 2376 - DNA, 442 bp, Rattus norvegicus
  Genbank Accession No. AI235738
aggcctttgtgggggaagtaacgggtcctagctaagtcagagaaagcagggaaacaaactggcatctgcacaccgtcttcaagtaaacagagtccctgacgcacccggagagtgtacttttaaggcaagaggaaaaaacaacccactgtgacagcttataaaacgcacgggctttggccctagagtctgttaaggcacaaaacctggtaggcagctgttgtcggtggcctgcacctcagaactggatttgtaaagaacagtaggaacatttaaataaaacaacaggccatgttgataggacctgaagtcacaggataaggtcgaaggggaaagtccaaagacgccggtctcttgtctgtgaaagatctgttgcagttgcttcatcaatgatcagtatccggtttttcttcagaattgccctcgcaaggcacactaactgtct

SEQ ID NO: 2377 - DNA, 441 bp, Rattus norvegicus
  Genbank Accession No. AI235739
gaaaacaaatcatggtaagaatttactttgaagacaatgatagaaagttagtgttaaaaatgctaatgttcatgttttttgcagctattgaagctacaacctgatttgggtttgctattttcccggcttgtgtagagtcccattgcagggaaggcagtaagcctggtaggcctgtctgtgaactgaggtgaaaagcgagggaaggtgtttgcgagcatccaggtaacaggcaatgacatggtccttcaatacagaatctcctagacaccagaggtttcctgctctcactgtagaaagtcttctaccaacctgttgaattcatccgcaaagcgcaagtgtaggttatgcttgccctctggcatcaggtgcaaccatctggcagatgtttaaactggtttatgccgtccacccacttctcacaggttttggcaaagtagtcat

SEQ ID NO: 2378 - DNA, 537 bp, Rattus norvegicus
  Genbank Accession No. AI235748
aaatcaaaagcgttaaaaaattttaatagtgatctattcatctcatcattcaaattcatgagtcacatccatattatgattctggtaccagttctgaaaacgcacagcataaagcggagaaagaccacgtccattagaggatctacccacacagccttgctttctactcccaaacagaaccacctggcacaggggcttctgggagtcaatcatcaattcgagggctttgcttgatgacgattctcacagtcagaaccacacaccaggaaatctggggagaggcacacagccaggacagagctttcctccctcagcggagagatcagtgccttggcacgagatggggagagcattcagccaatgtccttatacattcactcatggaaacctttaagtgtcactggtgcctggaaccaaatgtaatcctcggaagccatggctgggacggaaggtctaccacaggacagtgtcacggggagtttgtgaccttgctgtgtcctctgcctggggagaagatttctgggagaagtgctttaa

SEQ ID NO: 2379 - DNA, 593 bp, Rattus norvegicus
  Genbank Accession No. AI235878
ccaccactacccccacggagcaccgatttttccgccgaagcgtcatctgcgactccaatgccacggcgttggagctgccgggcctccctctctctatccctcaacctagtgtacccgcagtggtgcctcagagtgctccacccgagcctcacagagaggaaactttgacggccaccgttgcttcccaggtgtctcagcaaccctcggctgctgcctcccctggggaacaagccgttgtaggctcggccaccgcgaccgtccccagcagtaccagcaaagaccgcccggtgtcccagcccagcctcgtgggtagcaaagaggagccgccgccgtccagaagtggaagtggcagcggtggtgccagtgccaaagagccgcaggaggaaaggaaccagcaacaggatgatatcgaagagctggagaccaaggcagtgggaatgtccaatgacggtcgctttctcaaatttgacatcgaaatcggcagaggctcctttaagacggtctacaaaggtctggacaccgaaaccactgtggaagtcgcctggtgtgaattgcaggatcgaaagttaacaaaatctgaaaggcagagattt

SEQ ID NO: 2380 - DNA, 387 bp, Rattus norvegicus
  Genbank Accession No. AI235890
catatatagctgtgttcagacacatcagaagagagcatcagatctcattacatatggttgtgagccaccatgtggttgctgggatttgaaccaggacctctgtaagagaagtcagtgctcttaacactgagccatctctccagcatttgttttgttttaaaacaatgaccataagaggaatggtggacttctagcttgttctgcctacagtaacaaaagcacatcacacccccagctcacaaacctgtgtgcaatgtcactaccaccacacaacggtactgcgttacactgttggaaaccgcatttccactcagtgcagataaaagcaataggaaacacccagcccagagtcagattattttctgttgtgaagtcaggcctcgtgcc

SEQ ID NO: 2381 - DNA, 456 bp, Rattus norvegicus
  Genbank Accession No. AI235912
aacttgtctgaggactttaatttgcagagatctcatgtctcacaggcagaaccagaggaagaccccagtagttcacagtttccccatggctggagcacaaggctgtgcacttcagccagcactacccacagctcagcctcctagcagcagcggtcaggactaaacgacgacactagcatgcactcagcaattctcaaacagagagtcatcgaaatgaggtatgtccaatgtgtcatttgttaacgaattcaatgctgaagtaggaaaaaaatcatcaaaaatgtcagtcttcatgggactccccaagttcaaggctcttacacaggcactgtcgatgactgaatgcagatcaaccttacactggcttttctcagggctgcagtaattatgctcctggttcagacatgtgttctgggaaacagcactgaattcgctaggtgctggtgttggggtgct

SEQ ID NO: 2382 - DNA, 520 bp, Rattus norvegicus
  Genbank Accession No. AI235919
aaaagtgaccagcttgttttaatctttaagccaggacttcataggctccattcacagattattgagggactatggttctgtgacagcacagaacattagtgttggggaacaaagaactgatgaggatggtggaatggacagaaacagccacaccttatctccagctgtggtcaacgaagcaggtaagaagcttggagagacttggtcctaagggagagtgactatccacagagcttcttgtgagactcgaagtgatgtttaaagccactctgagaagacttcccaaaactgtctgaatagttgccaggaaaccaccgaagtgactgtgccatgggattttgtgagtgtgagcgacttttaaggctcattgctttaggcaggaggttgaactacctggtctaccttctgatgcacaatcttcacacacataggcttgccttgcacacaaacacagcaggtccgtctgacacaccaagtgaggaacgggcacctaacaatgtgcaaatgtcccttaaggagt

SEQ ID NO: 2383 - DNA, 158 bp, Rattus norvegicus
  Genbank Accession No. AI236005
cacagtccacagaggctttttatttatgctttacattaaaaaaaaaaatcccaggatttcccctcctgtaggttttcgtctggcctcttcagggcccatgatcccagccgaggtcgtcggcacaatgaaaccaaactgccgggatgggagcaaattgt

SEQ ID NO: 2384 - DNA, 506 bp, Rattus norvegicus
  Genbank Accession No. AI236021
  misc_feature (1)..(506): n = a or c or g or t
aaatcattcaacggggatgctgcgttgcttttttaattgcatgggtagttttaaataaatggagaaagcaccttctagaagctacactagcaagaagattccatcaagcatttacacagtaaatttccaataattttacaaagattcttgatcttcacttgaactggacataaggaaggacaggcccctcaggttgctgtttctctgcttgtagaaggaaacaaaagaaacctgtggggcggggaggagagaaagaactggtgactctcatgtctacttcaggacatgtgaagaggccggtgtggagctgcacacctggtaaagtccagcacttgggagtggggtcaagagggtcacaagtttcagcttagcctcggctacatagccaggctgaacgataactgtcagatgactttccctatgatttagagcatgctaccacctttaagataatgagaatctcanaagctgtagtattggaatacctttgaagacctcagacagct

SEQ ID NO: 2385 - DNA, 182 bp, Rattus norvegicus
  Genbank Accession No. AI236039
gaatgtaaacagttttattcaaaaacagacaggtacctgtttgcattacagaatttaaaacttggtttacactctttaaaaaaagaacaaatcctcaaattcaagagagcttaacattcacagggcacactctatagacatgaaaccactgctcactgcctcaaacttgattcctcgtgcca

SEQ ID NO: 2386 - DNA, 675 bp, Rattus norvegicus
  Genbank Accession No. AI236097
ttaatggcttgttttatttttttaaaaagctgatttttataactgcatgtagagaactagactttataaaatagtttcattctttatgcacgtggattaccttaaaatatggagaaccaaatcatttctttggtttttatctcatgggaaaaacgacgcacagtctcatcacatggctttgtgatatttatattccattgcacagatatgggctgtacaaattagtaacatgagttgtttcttaaattccaaacagttgtctaaaatcttattacagcagaggcctaggatattaaaacatcaaggctgaaatcctctaaagtagttaacacaacaatgagaaggtgaccgcaaatgctaacaggctaggcagcagggctatcggcatctacaggcaagtcaccgcggtcctcttagcgatgcaaaggtctattctttaggtacccttccctcatggaagtgcagaagtaacacaaaaatccagattagtgatgtcaagacagttatattcttcctagtatgtaaactctatggaaaagcaaatcttatctaggaacccatacatctgctaactcaaatgccaaagacaccacacttagaaaaaaggaaggttttggtttcttttttttaagataatggtttttaattgaattattgagatgaagagacagtgaa

SEQ ID NO: 2387 - DNA, 494 bp, Rattus norvegicus
  Genbank Accession No. AI236108
acatttaaaaaaatgacattgttttattttccctgtcaggcgtgggctgcatgtgtggtaggtgtggtgggctcagtgcaggtgtggatgggggaaggagtggaggaggcgatgacttggtggctggaagggaatggagagggttagatacgcttctgggaagtctggaggaaggactcatggcatgctatagctaagccaccaataaggttgagaaactcttggaaatctagctgcccatcactgttgaggtccagcttcttcatcatgcggtcgaggacaccggggtccttctggttcttcgtgaaggcggccagctccgtgttcatgaaggaaaggaactcagttttggagagatgacagctatttccatccttcccactgtacttctggaaaacagcaatcagggactcgatgcatctctcagtctctgtaggcatttttgccaagttgaggagcgaggcccggctgcgactgaggctgaccctcgtgcc

SEQ ID NO: 2388 - DNA, 612 bp, Rattus norvegicus
  Genbank Accession No. AI236146
atttaaatcagttttatttaagaatttccaagagtgacaactcttataaaaagcatccaagcacaggacacagaactgcagcaaacagcattcttatgaatagctaacagacatgagaacttccacccttctttgagacacctgagctcactggtgaactctgcttccaagttctcctgcaaagcacaccacaagctcagtccatgttcgcagcccatcagcttcagttcacgttcccacacttccagatcagtaacagaggagaacacacaccatacagcattcacagcagttgacagaggggagggaagtacaagtatttcacttaacacattcagctactgtgggtttcctaagaacaaaactcaaagtcttccaacagacgtggatgtcctctgatgcagaaacactcgtacgttagttatctgctatcattgctctctgcacactctcgcaccaaagccacaggattgagggacacatctctccaagttaaaaaatatccattttccaccaccaagtctttgcacgcgctctctccttttctcgctcatactagcctttcatgcctcggcaccaccatcaatcccacacaaggtttcaaaagttcaa

SEQ ID NO: 2389 - DNA, 447 bp, Rattus norvegicus
  Genbank Accession No. AI236152
gaaaaggaaacatacaaaaatcatgtacaaaaaaaattaaccaaacatgtacagaaaattcattccagtatatctacagcagtgcatgtacagtattttacaggctgggccgtccctccccgctcccagactcctccctcttctgagacttcccccctccctgactccccatcttcctccccagcgctttgccctggggactaaggctggggtggcttccgccaatatctcccaccccccaaatgaatgccagtggtcacacgtgctctctctaaacctatgcaatgggatggatggggactgggggagtggtcccggccagagcacaggattcacagtctggacccctcctggacacccccagatgaaggtgaggcaggcattgctcaccgtccgccggcggctcagggaagatggctgggcactgggttgaaaaggctttcacat

SEQ ID NO: 2390 - DNA, 450 bp, Rattus norvegicus
  Genbank Accession No. AI236207
gaaaaaaagcaataaggcaaaaaaactgaaaatatatatagatatatatatagtcttattttgctttcatgtgactttattccatcttcaggacttctaagcttcttccgttagcagggatctgggaaatcaagctagaaatgtagtgcagatagaggggaaggggctaaagcaaggaggttccttgggaaatttccactctatccaaagcctccagagatggtgcccattttatgggcctccctggagtaaccccttgtgctggggaaagtcttcttaggaggaaattccctagtgctcattctttgatcattttttatctagggaaggagagccggtagggaaggactgagaatactaatttacccagtaaaatccaatttccctggagggataacgtcctctggaatggtattttccccaaggacccacactggctgaggctcaaca

SEQ ID NO: 2391 - DNA, 358 bp, Rattus norvegicus
  Genbank Accession No. AI236284
aaaggcatttcaaatgggatacatatattggaaaagcctttaaaaaaaaacggataaacagtgcactaggagtaggtagaagctgactagtagtctacttgatgtcttttcacacttcaaaggcaagatgggaagcatgagaatactcacatagaacttcagggaaaacttgcctcaaattttagtttgcacaacactgaaaagaaacttttacaaaaaccttcgctgttgctcagaataccagatgattttttttctcaatattaccaccatatacataacatttaaataatttctttataaatattttagagcacaaagaactcattttgttgtagtggtggcccaccctcgtgcc

SEQ ID NO: 2392 - DNA, 488 bp, Rattus norvegicus
  Genbank Accession No. AI236318
caaaataaagatcacacattgtttagagacaatctacacaagagttacaaaaaatagttgcccaggcataagcatacacaggtttgttaattatacacatatggttacaagtgtgcttgcaaaaagttcattggaaatatacacaaggctctggaaatgtacaccgtgtagtgttacagtctatattcaaacgaggattgacagtatgttacattcacttacaagtagacaaaatgcaaaatacagctcatctgtacaaaacggagggtgagtcactttacaaggggaggctgtgagcatgggaaggggcaggcgaaacttctgcacatccttttgactgtcacaaaataagcgaaacattaccttttcttaggataaaaaaaaaaaaaggaacactagtgtgaactgaatcatctgaagtaacatttagaaaggctctcactaccgtcttgactagctgacaaataaaccaagctattttttctttt

SEQ ID NO: 2393 - DNA, 500 bp, Rattus norvegicus
  Genbank Accession No. AI236366
gacggacgcaagatggcgacggcaactatagctctccaggtcaatggccaacaaggaggggggtcggagccagcagcagcggctgcagcggcggcggcggcagtggtggcagcaggagacaaatggaaacctccacagggcacagaatccatcaagatggaaaatgggcaaagcacaggcaccaagctggggctgcctcccctgacgcccgagcagcaggaggccctccagaaggccaagaaatatgcaatggagcagagcatcaagagtgtgctggtgaagcagaccatcgcccaccagcagcagcagctcaccaacctgcagatggcagctacgggcagcgggcactggctatcatgtgccgggtgtatgtgggttccatctactatgagctgggagaagacactattcgccaggcctttgctccctttggccccatcaagagcattgatatgtcctgggactccgttaccatgaagcataagggctttgccttcgtg

SEQ ID NO: 2394 - DNA, 105 bp, Rattus norvegicus
  Genbank Accession No. AI236370
cccaaatgggatgggtttattttactctgatgcaaaccaaaggtctcactaaagcaaaaactgatgtaacaaaaggtcatggaaaggggagttgggacatgcagg

SEQ ID NO: 2395 - DNA, 525 bp, Rattus norvegicus
  Genbank Accession No. AI236376
aattccagcgcatcagggttcctcagccttcaagcgggagaagaaggcaacgaaccccgtcctacagatacatgctacttttaagcacaagaagcacaaaagtcacaggaatggggaggggtacatcgaggcacacaggattggttggaaccatttgccctttaacttcattggtccacgtcatggtcacattgtccttggtgcctggagaaaggctgtggttttgggcagtggaaagtccctgccggtcctgccggtcatgtgactaccacgaagacagggtcgactaggtcataaaaccatgaatgggtggggtaggtataactggtggaatttcccttaggggaggggtgtagcttgtggaattttcctttggttccacagtgacatttctagccaatgctgtttcacgtagacatcactctatctggctctgatcatatctccactacctcttctcactcatagatccctgaggtttggcattaggggtgtgatgtaggtgtctaacttaggtcagggtat

SEQ ID NO: 2396 - DNA, 460 bp, Rattus norvegicus
  Genbank Accession No. AI236402
  misc_feature (1)..(460): n = a or c or g or t
atagcacagtgaatattgttacctttatttttttttttaaagaagaaggtacaaatggctagggacatattacagggggaggaaagatggtgttatctctgcagaatacactttcatgctccacgggaaagggaggaggaacctcaggaccaatctagagacgtgtaagcaacatctctgtggcttctggggatatggccgaacaccagatgtgtctcaaactgtggataacccaagatcccttcttcccttgccactcctgtctacccaggttcccaatctgagtcctatccacttttctttctttctctgtttctgncttgagactgattcccacaagttttcctggccctcatattcattctcattgttgggtctactgacatatgtctttgaatcaaggaatttctttcagcctaaaatctttcagctaggtcctaaaacccccctcccactcccc

SEQ ID NO: 2397 - DNA, 205 bp, Rattus norvegicus
  Genbank Accession No. AI236444
gagtctacataggtgccatttgaggaaaaaaacggtttgttaaaaattacaaaagttcattcaaaaaaatttgtctggaaactccttttgtagctgccgccgtgcagctacagttgatgcatagatgacgaatccccaagagagcaagaccattgcaagtatcaacgaggagtaagtccagtccaggtttcggcgactcaccggc

SEQ ID NO: 2398 - DNA, 403 bp, Rattus norvegicus
  Genbank Accession No. AI236460
agagtagaggaaaatctatattcattaaactaaaaattattgtctattcaagttactcctgtggctactcggggcacatattttactgagagaagaatagtcaggcttctatggaagtctgtcccaggggtgagtctgtcctgagtaggatatgaaggaatcgtgtattagtgggtctgcagggaaggtattgtcacttagtgagggcaggaaatgggtggtcacttagtaaatctacagggaattgaagagaatttactggatctgcaaggagggatggtaacttcctgattctgcaggataggtatggtcaattaatgagtctgcagaaagggatgatcacttactgtgtctgcaggaagggatgcttacctctgagtgtgcagaaaggaatggtcactta

SEQ ID NO: 2399 - DNA, 321 bp, Rattus norvegicus
  Genbank Accession No. AI236473
atgctacgttcaaaagtatttttttttgagaatacaaaaagtaatccttggaaatgagaatatataacagaaaagagcacaataacttaagtgttaaacatctgtatgaaataacttgcaaagtttgacaactatgcacacatagaacatgcgggtgtttaaaaaacagaacaaacaaaaacaccacccgattctgtagaaccagcatcatttcaccagcgggagagcaccaagcaaggcaccattggaaagacaacacacttggaaagtctctataaataaagcaaatgctaatctggtcgaaaaatcggtgtctttggt

SEQ ID NO: 2400 - DNA, 490 bp, Rattus norvegicus
  Genbank Accession No. AI236484
caaaccagtgatttttattcctttgctctgaaaagctgtgtgtggggaacgtaaccaaggaaagttgactagaccaatggggctttgagaccttaaatcttaaaagcagaaacaaaccaggttcccaccacagtctgctcagacacagcaaacttggtggttctatattaaaaggctgttaaatagggagatggcattcatctaccgcccttgggaagtagagggcagtataaacacttcataccccaaactattggcagcagtttcaatgttatcaaggtaaatgtggaatggagatgttcttaaacatggttaggacttaagtctaccacactaaaatcatgattacattttgaaagaaaatgcacaaaaaccaaacagcaaatattgagatctttttcatttgaatgtaatcttaatgctattaaatacacaaatatgctattttttattacccaatcctaattatctaaaacacacatttgcaaac

SEQ ID NO: 2401 - DNA, 440 bp, Rattus norvegicus
  Genbank Accession No. AI236565
  misc_feature (1)..(440): n = a or c or g or t
gacgtcagaaattaaggtttaattggtccgggttaagttctgggctttggaattttgaaaaatttccacgtgactcgaaggagcagacaagcttgggttccactacgttctgaggcttgtgtcaggatgcagagggcaaaactggaatgtgaagaacaggccaccttaagtcatgtcgggttaatatttgggacgtttaagcagcgcttcctgtttccctaagacacgaaccaggagaccagcgctagttacaacaaagcctggaagctagacgcgttcgttcgggcctgtgtgggccccgccccgccgcgccccgcgctccccagcaggttcatctgctcctttcctgactgcagcgctagttacaacaaagccttggaagctagacgcgcacctctgcaagcacacgggnggaggtaacctggcccgccgggtgtgca

SEQ ID NO: 2402 - DNA, 406 bp, Rattus norvegicus
  Genbank Accession No. AI236576
cccttggcttattcaagggccagtggaaatttattttttcatccttttccatcttctcccaagtggcttttccttgcaaaatgcctgacatgacaccagaggggaaaagggaaaagagaaacccagtgcagcatacatgggggtgagtgacagacagcggagccctcattacagagaaaggtgcgtggtgggcatcttttcaaggtacctagaggctgctcctggccccatccgttttttggtctctgcagccattgtcatgaatgcctgttcaacattggtggcattcttggcacttgtctccaggaaggggacacccagagagtctgcaaattccttggcgtgtggtattgtccacgaaccttcttggttggtgaggtcaactccttgtttgcctaccaaccag

SEQ ID NO: 2403 - DNA, 646 bp, Rattus norvegicus
  Genbank Accession No. AI236597
aataaagacaagtgttcagatttatttggaaattcacagtttctaatggtactacagctctgtagttacatatttaaaaccctcttttcacaacacatagtgacttcccactctggctctgctggcatctggacttcaagggcctgctgtaccatcaggccctattgctctgaatggctaattgtgcagactggaaggggtaaaattcatttcctaaaacgtactgttcacctaaagcagcaacttaaagaaaaaggccttaaataaatcacattacaaacaacaccaaaaaaggtattagacaaatttaaaaacaattattaacaaaagtgctcaataagttataacttaaattttacaacacaaaatggtcaattctctcaaaaacacatttcactttcactcatccctgtacaatccacacatcaagaactcaatttactcagacagacactgccaattacttaagggggggggtggggggacaaaaagtaaatgaagacaaacgctgacaaccacatacacacatatctgcacattgtagccaacaaaagcaaacacaaaggaatcataatcctactagacttcaccaattagactgaatcaggcctgacgtgctcactggctggctgtgactatgtacaaa

SEQ ID NO: 2404 - DNA, 625 bp, Rattus norvegicus
  Genbank Accession No. AI236601
agaaatgacaccacagggtggactttattttaaagctcacaaggtgttcacaatgatcacatgatccacacgtctcccgtgtcacacctccacgggacagtgcatgtatggtgatagttacagccctgcttcgcatgctgctacggttcactagctgttgtattcttggtaataataaagcaaatcactctactggacagacttaatttggaaagcccttatgcagatcagactcagtctcatatgaacaaccccggccacacatgcggaaatgaagagcaaatgcagaagaacacagaaaaccccttggcaagaacagctgctgcagactgagcccagcgctgtcagtgcagttcacgtcctcagaagacaaacgacctccctcctcagcatatgagcagcaatactgtacagagctcagtggggtcccaactccacaggagcctgtcaccaaagtcactctcatttagggtcagagactacagactcaagctttttcttttttccctcataatacacaaaatgtctagacagtctttaaaaaaaaaaaaaaaggaagaaagaaaatataaatagactcagtctgtcatacagaatcacatacaatggcaaacacatttcatga

SEQ ID NO: 2405 - DNA, 458 bp, Rattus norvegicus
  Genbank Accession No. AI236635
acccatagttcggttttattcggagtaatggggggaaaaaggaaacttctgctcatagaagaaactcagccacaggtctgatctgtactggaactacacatgcagtgaggacaaggctgtgtttgtctactgatctctaatattaacaattataaacagagcagtgcaactagcatttggaacaacccttctagtgttacagtgacaggcacagttcacttctcttcacaccactggttctctttgcgtacctgggcctcctcctcttcagtaaagtcatttttgatattgaaggttttacgaatctcctcaggcgttttccccttaatcatattagccacagtcttgcaggtgacatcaagcaaacctttgatgtctaagtagtttgcagccagaataagttcaaaaagtgttccttggtcaactttcaggaattcttggtcccaaacagggaatat

SEQ ID NO: 2406 - DNA, 430 bp, Rattus norvegicus
  Genbank Accession No. AI236707
acggtctctaaaaatatatatttagagagatagttttatacagttttctgaaaataattgtttggaaagaaacaaaatacaacgccgtttgggcatcacaaaggaagctgctcacagaggggtatttacttcgtggtcccaaacacggattccaaaggtgaagtatttggcaaaggggctgcagaatcagaagtaggttagctcatcgtgcttttctttgtcggtctggtaagaggacaaggtcaaaggcttgttctcatgagggaggggttcaaacaccctcaagtgcacacatttttcttctgcgtctcggtcgtggccggcattgtggcggatggcgcgccacacatcatcttggcaagcactggttagaatatcacagagaagctacggagagagccaactaggagacctgggtgtccctcgtgcc

SEQ ID NO: 2407 - DNA, 513 bp, Rattus norvegicus
  Genbank Accession No. AI236717
gacttgaccaaaacatttattatagaaatgttccctttgtccttacatagcttctgtctagggaagaaacacagacattaaagtgacaacttaaaaaaaaaagatttaaaaatctatgtatctgtatgtgtgtggctgtgtgaatttatgtgcatcatatgcatgtgtgcacccagaggctagagggcactgatcaattcccgggaactgacattacaagtatttgcgagctttctgagaactggatgcctattctctgcaagaatagcaaacgctgttaattgcccagccatctcttcatcccgccattttgtgcccatatatatgcatgcaggcataggagtgcaagtgactgcagaggggaaagggtcagatccacttggaaatggaattccaggtagctgcctgatacaggtgctgggaatgggacttgggtctctgcaagaggagaaggtctcttagcccctgagctgtctcttcagccctgagttacatttttaaaaacctcgtgcc

SEQ ID NO: 2408 - DNA, 475 bp, Rattus norvegicus
  Genbank Accession No. AI236727
aaaaagaaaactgggtgaggtttaattacaaataaaaggatcacatttttttattctcaggaaacctttccaattcccaggtcttcttgatcctgttaagtatgtatagccatagttggttaggccaaaacctgaccttgatttgatcaaaaacactcttcaaagctgctgattttaatccaaagagatacaaaacttagcccctttgtaatattaaaacaaaaacaaagcccaacaaaacaagttgattttgaaaaaccccaaatactcatagctgcctgaagaggagatcctgatcattccacttaaacagacactgtcacacccacaggtcatcagggctgagatcaagatgaatccattactcatttcctctccggctcttcttgtggctctttttagacctttcaggagactttgaggggcttctatgtctgtgactacgggggtgacctggggatttagagcgggatct

SEQ ID NO: 2409 - DNA, 577 bp, Rattus norvegicus
  Genbank Accession No. AI236745
gagatcaaaaagtaaactttaattaacagcaaattttaatgacgtaattctgttactaaaaaccagagtagagaaaatcgattaacaaatggaatttagggaggaaatgcagggcggtaatgtggaattacagctgcacttctttggctaactcattaaaaatgccaattaaacattttcagtcaatttttattttttaaaaaagcagcaaatcaacaccacaacttaagactaagctaaatgtgcgtccgacagtgaagcacgcctgtacgtgagtggaaaaggtttccaagaacccatcaactgcatgatctccaagtgtccacacacagcgctctttgtaagcctttgttaagtgactcgcaggcatctgagaagttattgctgtggaaacagacctgcagtacagtagcatgagtctggggcattaagcacaatcagttcaacggagttaagaggttgaaaacatggtgagaaggtgtgtgtggaggaggaaggcagggtgaggcagtctgtacgccggttgacccaagaacaacagacatacatcataactctccaactgagaccaggcata

SEQ ID NO: 2410 - DNA, 652 bp, Rattus norvegicus
  Genbank Accession No. AI236753
cactacaagtcattttaattctaacacttatgtcaacatttacagcataaatcactcatgttataaaagaatcattccttcatctagaatgtgattgaaattagatattggtaaacaggcaatgtaaatacctcagtgtttgcctctgatagtttgcaatgaccaagacatgatactatagcctcatcaagtgcaactttgtacatgtctgatgcatatatgttgtgtacatgttgtggactgagaggacatcttcaggcactggtcctcacctcctaacttgagataatcttgtttgctgttgaatgcatcaagctagctggcccatggtcaaattttcttcctgtactaaaatgtacggcagcaatgggataaatcttaggttaacagtatattcagatgcactgtgtatagcaataaaaagctccagtgatgttctctttctaaagacacactgtccttctggggaggtgggatctgactctaatctggcaccatgtctagctcattttacaaaattaacctttacaaagatctacatcagcatctagaagagtcaccaatcaatgatcaagaaaactgttatttgcttttctttctttttgactgggtaatttccttaagctacattattatgggctaactggaaaac

SEQ ID NO: 2411 - DNA, 420 bp, Rattus norvegicus
  Genbank Accession No. AI236761
gctgtctagcatgatctgcatggcctgtaatctttgaaccactttcgtacctcatgtttttatccagcactcttattgtactgtgtactagtctgtgaacaatgtcaaataaaaaagagcgaacaggtcgtatggtggagctgagctagtgtacaatgcaccagttgtacagaaacaaaaatgaagtgagccatcttttgttcatttaaaatggtgttttgaatttcatatgcagaaaacgttttgttacattgcagattttaatgtatttaataaatgcaacatgcagattaagtgcagtgtatactgagtatttaaattaaaatgtacatttcataaatacagtttcaagagaaagcatcattttgtgtatactaacacattaagtgtatgtcagaaattgatgtacaaatatatatt

SEQ ID NO: 2412 - DNA, 655 bp, Rattus norvegicus
  Genbank Accession No. AI236772
gaaagtgaaagaggctttattttcaatatcatataagtcattccatttaatatttatagtgcatagttatgtatgaaagcatacacggaaaacattaaaaaatacccaaggatgcgcgtgcacaggcaaagaagacagcctttgtgtctatagcaagctcagaggtagcacaagagagtatccatctggtaacattggaaatcatgcaaacaactgagtcaaggcatggcattaaggtgacatcagcatgagttataattccctgggtacaaaacctatatattctttgggtttcaaaaaaattaaatgaatggcctacttttatcttctggacaaaaaaacaaaaaaaaaaaaatctctaagagcaaagtgcacatattgtcctaaccacatacatataaaatattcaaggccacagatggaggtcgctagatgacaaaagaggatactgagaggtaaagtaaccagagagagatgcaggagggaaaggcccctctgcctccatgggggatgcaaaggcttaggcactggaacacccaacgtggaccacactgcctgccacaaggaactcctcactgagctgacgtcaccatcatcaaaccgctcgacaggcggttgtaacttcctttacatttcccatgggggacaagcatgg

SEQ ID NO: 2413 - DNA, 433 bp, Rattus norvegicus
  Genbank Accession No. AI236784
aacagagaaataaaactcttgtgattatcaccttggagactccaagaatccccaagcaatggagacccccaagcttattcctgagacagagaccgtcacagagggttgcactccgagctattcacattgtgtagcagaaaccagaaccaaggtctgaagatgccctttctttttcctaaagtcttcacaaaagagggtctttccatggttcaaaagaaaaacagctttctttcccagccaatggggacctgaaatcttactaagaaggcttagtataggcagcctatacaaccagaaactcccagggcaccctggctgctttactgtcttcctataggaggatagatgtatgagcctgtctgtcagaagccgctctcctgggatctcctcgtgggcccatggtaccaggagagtgggggtttggggggaggag

SEQ ID NO: 2414 - DNA, 514 bp, Rattus norvegicus
  Genbank Accession No. AI236788
  misc_feature (1)..(514): n = a or c or g or t
cctctctctcctcctaatacacactttttttagtaaggggaataccatgatgtcgctctagcccggcccctgtagattcgaccccggggcctgctgttaaaaccactgtagaatcgagatctggagctgttgtaattggtagtccgggcgcggtatcgggcacgcgggaagccccggtctgttgtgctgatgcctggtctgttggttcgcttgggaatcaccttgatttgtcttcctctaaacagggactcatctaaggccagggacgtcctcactgactctttgtctgagaactctatatatgcaaaccctttgggatggccactaaatttgtcacagagtatagtcacccggttgactgaaccgcagccgtgaaaatgggcctccagctcttctgctgtcgcaccatagtccacattgccaacgtagatggaacgggcatcagcctccatcttctcctcaagagacatgatcactgggccagcattgcctgngggtggactcatattcatct

SEQ ID NO: 2415 - DNA, 348 bp, Rattus norvegicus
  Genbank Accession No. AI236794
aaccatttggctagaaattttatttcagaaataagcattcagggtactttaaagggattaaaagttatttatggattactggaataaatacttctcaaaaatagttactctgtaaatacacatacaaacttcagtgaaaaactccttgccacaaacaagtgatctggatcaaaatctgatgtcacagggaagctgaacgggggcatattccctgctgggtgttaaaagccattggttctttgggatggaattcttcacaagtggaaaggccttggggatgaaagtgggctggaaaaccctggaaggtagtgtccggagacacacaagcctttttcagttcctcgtgcc

SEQ ID NO: 2416 - DNA, 428 bp, Rattus norvegicus
  Genbank Accession No. AI236795
attttgcatacttttaatttcagaacaaaataaaacaaacaaaaaaacacaatacacaacacccaaccctgctattctgtgggaggggatcttcctgccttaaggcacaaggacaggatagaagagattcttgtagacatgagcagagagccaggtgggtcagggccagtcaaggctgttgggggagccacagggatactatacagagggcgggggcttcccaggagcctttaatccacttcttccatgcgagaggcatcctctcctctaagtactctgtctggtcttctttgaggtgaaggatcactttggtaccccggccaatgggctcaccgtggtctgcacggacagtgaaggatccaccagcagaagactcccaggcatactgctcatcatcgatgtgcttcgtgagtgtttcttcaccacct

SEQ ID NO: 2417 - DNA, 527 bp, Rattus norvegicus
  Genbank Accession No. AI236834
aggaagcaaagatctttattttttttttaaaaatttatttattaaaaacagcaatttctagctaaataatataaagcatttaaattaattatttcaaagtatgtacactctgtataagtaaacccgtgagactgtacagatttaaacaaatattcactcagcagacaaagtgggtcagtaccgccctcccagcacttggtaaggtgtgtgagtgttttcagaaacaaaaaatcaaagcacaagagcccgaacaagtcctgctgtgagcgtgagactgctgagccacagtgtgtgccacggttgcgtcctcatttctttggaaaggctatctgaaccccaatgcacatatgatacacagaactggatatcacagtttatcaataagacatgtatttaaaatagtacaatcttccaaactcattcacttcatagcaaagaaaaatatggcccctcttacctttgagtttcccaaaatatagagtaatatgctctaccaagcaacagccaccaccaacttaagctgggct

SEQ ID NO: 2418 - DNA, 390 bp, Rattus norvegicus
  Genbank Accession No. AI236907
  misc_feature (1)..(390): n = a or c or g or t
cggctgcctgggcggccaccgcggcctggttggcttggtgctgcgcagctttgattttggcctgcaagtgtgcaggagggtgaaaatatttgcatttctccctcatgcaacgcccctttatgtaatccatacaaacggttacggtgttgtcgtttgtgtcgatcatggtgctgtctgccgggtgtgcaaagcggcagtctgtctctccccgggcacagtttcctcgctggaactccctgcatacctgagacaacaggaaagagcagagagctgcagaagaaagcctgtggccaccgcaccaacgagggggaggtgggcagaggaccaggagaggcaggagggggagagaaggaggaggagggagaggangatcangangacnggggggca

SEQ ID NO: 2419 - DNA, 647 bp, Rattus norvegicus
  Genbank Accession No. AI236912
aacaaaaaggaccacaaaatttctcaaaatagattatggaacacaggaaacagttcatgagagtacaggggcactagccagcactgtggctaagattagaactaaacactctatttaaatggtattgcactagctctacacacagtggatagtgagaccacagtaatcaacctcacagtagcaacagaggcacgtggtccctaagatacttcttcagtgggcaagaatctatggtccaatagaaacatttaggaaggaaaaagccttgtaatagtagaaacgctgtttactggtgtttttactgtaaaactcttacagatcaaattgaaatgtgattatctatgagacagtgcttagagcttacggtgcagacatttcatcgaacatctggccaacagatttcagtataacagattaggaactcatatctatgacagcatgatctaaaacagaactaaaaacacacacacgccatgtcaattcaccaacatcatcatctttatcacatttagggttaacttactatgccttaatttgtttaacacattctgaaatatcaatgtttaagtcaaggctttacacagtaacccatttatttcaagtcctctgtccaacttctgttaaatcttgagcagctgtcataaatg

SEQ ID NO: 2420 - DNA, 446 bp, Rattus norvegicus
  Genbank Accession No. AI236947
taaatattcacatatactgacttctgtagagcggcctaagaacagatgtttccctttaagaagtttcaaagaagcagctgaggaactgagctccgacttcatcatatgcgaagaggctgctaaaccgttttgatttctgccatttctaaatctgttaagatacaaaaaaattcactttcgacttcaggagaaaaccattttggttctttacatgttagctgaagggcctacacataagaaagcaaagctgccgtcttagggatggacatgacagttccatagaaagaaaaccaaggagctatttctcaagtctttccataatggagccacagtgactcagggactcagcactctagagcttagcccaggactctggctctacaagcactagcatgccgaagacaccagcagcgaacaatctgcccaggctctaaacctgaaaaaac

SEQ ID NO: 2421 - DNA, 469 bp, Rattus norvegicus
  Genbank Accession No. AI237002
taaatacacgtgtttttttgttgggtcacagggcataggtggtgctgtacagagctggtataggcgtggggtggtgttacagtggcactggattcagcttatgtcattcagggcctgtgtcagctgctgcacgggctcccggaagttggtgctcgggtttttgctacacagcatgaagccgatctggccactgggataggtgggaatggtacagtaggcatagctcaccacagggaagagagacttgcagaaatgcctcatctccttgatgaggtccaggtgcagccactggcactcgccctggcaacagaggatgccatcttctttgagggctgtcttcatgagctggtaataggactccttgaagaggctctcagcagggcccatggggtctgaggagtcggtgatgatgacatcaaaggcatcttggttctgcttcatgaactcaaagccatcgcccacgtggaga

SEQ ID NO: 2422 - DNA, 436 bp, Rattus norvegicus
  Genbank Accession No. AI237016
tcaaatctatcattaagacaaaaaagtaaacaaaagttaggtctgttgcaaattttatgattttttttttctcttctgagggggaaaaaccgtaatagtaaaaagaacgccactgggtgtacagtaaagcaccacaacacgcgttacaaacggggcttcctgctgctgctgctgctgctgctgctgacacaggggcacggtctctccactgctctgtgttaatcaggacttcattaaagtaaaactataaaatctcctaggttaactaagtcagacacggtctggaacgcagtgcttagcaaggacaatgccagctatcagtgctaacagaaaacattgtagaaggccaaaaacaatcaaaccggaaaccaaaaccttatttcccctagatgagcagaactgaaaaggaaaggagccccacctcccccctcgtgcc

SEQ ID NO: 2423 - DNA, 504 bp, Rattus norvegicus
  Genbank Accession No. AI237070
aagcagcttttatacttaaaactcaaaatgacaacacactgtacaaacataagacgacataaaataaaaagctatgaggaacatcctgtcgtcagcacacgacactgaccaaacgcagcccgcactgtctccaacagttcccaagggctgaggccaaggttcatcttcagaactggacagaggtactcgaaggggcagcttgtccatcaggtggagcttcagagccgggcctggcacggtcagctctcttctccccagtgattgtgacccctagatggactcgccgctgagcaggtcaccaggcagcagagtgttgagaggcgtggggctgccgatcactctggtatcatcagcactgggtgggccccacaggctgctcgagtactgggggaccccaccccacagcagctcactgctgcctttgccactcaggcatggggtgttccagtgggcagtgtcgctgcgcactaggccatgggtgctgcccgaggtgcccagcctggg

SEQ ID NO: 2424 - DNA, 521 bp, Rattus norvegicus
  Genbank Accession No. AI237075
  misc_feature (1)..(521): n = a or c or g or t
gagataaagcataaagtaggttaacaaagtagaaaaaaaagaatatgcaagatgaaagctaacacaggaggagtggggacaaaggctgagtaggtaggactcaagctggccaccaaggcactgtggcatacatatcaagaaacactgtcacgtccaacaggactccagatgttccccacttctcttgtgctcttatcagttggtgctgctgatactccactcagggctccaaccaatgtgtgcaggatgggattcttagattctgcgcattagttggtagggaactgaattcactcaccagtaaggaactaagtcagtcaattctgctaaggccaatgctttaaatgcagttttttttttaagtgcatttaataatcgggtcggtatgaaaacctagattaatcaaatgacctttgtcnccactagaaaaattgttatgggtattggcatttatttattcatcatatacttattagggcagctaanaaagtctaatgcctctgtcatgtattaccacagaa

SEQ ID NO: 2425 - DNA, 430 bp, Rattus norvegicus
  Genbank Accession No. AI237132
caaggatggagttttctttattgtaactgtcaggacagccacagcagaagtccttccccagttaatattctttcctattaaaaatatgcttttaagattgacaaatgacacagtctttacctcatggtacataactggccaccccctgctgggaataacaaggtaagacttgttcaacaaagcgttaaagagaggttgaggtctcaggccaagtggtgtgtggtagcatttctcaccaccctggcagtctggagacgaaggcaggagcattgcctggtgtacaaggtccaggccagccaaggctgcatatcaagaccctaactcaaaaagactggagtattttaaatccgtgttgggcacctaggataacccaacactggaggcgggggagggagggctgcaagtccaagaccagcctgggcctcgtgcc

SEQ ID NO: 2426 - DNA, 442 bp, Rattus norvegicus
  Genbank Accession No. AI237163
tctgggggcggctggggcaagtgggtgcggctgaatgtggggggcacggtgttcctgaccacccgccagacgctgtgccgggagcagaagtccttcctcagccgcctgtgccaaggcgaagagctgcaatcggacagggatgagaccggggcctacctcattgaccgtgaccccacctacttcgggcccatattgaacttcctcaggcatggcaaattggtgctggacaaggacatggctgaggagggggtcctggaggaagctgagttctacaacatcggtcctctgattcgaatcatcaaagacaggatggaggaaaaagactacacagtgacccctcctgcctcctggcctggggaggaggggcgtggccgcatctgctctatgtcctccaacccagcagagcacctctgaggctggccttggccacaggccctattct

SEQ ID NO: 2427 - DNA, 657 bp, Rattus norvegicus
  Genbank Accession No. AI237371
ttttttttcaagagactaataaacatatttattttaaatcagtttgatacgcatacacattagttttatagttttttaatgaactcaaatagaaatttctaagtacagcagtatctgcttgtacagcaaatataggaaaggtgaaataaggtatttgacagaactagagcctccggacaaatcagatgaaaactctgaaaggtttctacataccttctggattaaaaaacccaaaatcactgatggctcaaaatactaccttgctaaacaaaaatgggaaagaatcagggcagctgtgaactctgtggcgagagcttatgtagagacctgcaaactgtcactaacttcctacagtgttagagcagtgctcaaaattacaggaccttcaaattaagttacattctcataaaacttgttacatacgctgacatttatatggtgcaaggagtcacatggaagcaaatgacaaactgattttgccacctttttaaggaatgggaattctgtgtactttcaaaagaacttgagcactcactgaaaactaacagccatggcactgaaatagatttgtgtgaggaacctagattataatggaaactaactgtgaggtaaacctatctttcccccaaaacctctgaagccagaatttaaacaagt

SEQ ID NO: 2428 - DNA, 559 bp, Rattus norvegicus
  Genbank Accession No. AI237381
tctttttaagtgaacattaaccatttattcaaagttatacaagaatctgaaggattaaagtctcctgtgacacaaagccatttcaatagtttcatgtctcagctgagcatgaggagagagggtgacagagtgcgtggctccactgggcagctagccggcaacagcagactcagcagcagcctccccctgcctgctgccctccttggttgcctccgtgagatgcattggtagcagcatgctgagggccaattttgatgccgtttgcctgaaggagaagacaggacggtaaacagaagtgggcctgagcaggcagcataccaactagattactcttttttacattcatgtaattcttagtgacttaattgtgccaaccaacagttaaacatattttgagtagacttttgaaacgaggtggtttcttctttaaaaacaacacagagggaatgttttggaaagagtttgctagggaactggtcagcagaaatcagataatgctgcttgtcagggctccatagtgaggagattacttgtaacaattagtacatggggcgattat

SEQ ID NO: 2429 - DNA, 555 bp, Rattus norvegicus
  Genbank Accession No. AI237388
acacgcatccattctaggcagctttgcctaccctaatgccacagtggccaggtgccagacctgaaaggaagcacccagggggcaaggtctaaaagacacaagggacagccctttctcaccctcaccacgaggaccagcacacatttggtttcacctgagacaggacaggaagaggcctcagccacatggctgagtgcacgtacaaagggcttgagtcgtaagtgtcctgatccctcgacccttccacatttggctatttttggtttcattattaaaaaaataaagtgacaattactggcagggaccagttcttgcactgtcttctgttaaaaatatggtaggggtatgggtagccttctcgttggccaatctacttcacaagatatccgcccgcttgtcccttgcacgactcccggccttggtccgggctttgaaggccgcagcattgtacaggtgcttttcaaaacgtgaaatcttgcaggccttcagggcagcagcatccagcaccagcacagggcccatgccgaatatgtcaacggagaaattcattattct

SEQ ID NO: 2430 - DNA, 658 bp, Rattus norvegicus
  Genbank Accession No. AI237399
tcaatataaagtcatttatttttaaattagcaataaaatagacaagtttacatttaaaaatttacaaacaacaaaagcccttcacatgtagcatttcaaacttttagcccctgacctgaaggaggaaagaaaaggcctttactaagggttgtttcctctcctagctcgagccagtcctgccagacatcacagccatagggaggagggcatccctacggctccatcttgagtgccggttgactgaagaggcgcctttacaaaggaagctcataggcagtgcccagactagagtactcatcccacaaaacacgttaaattaggagtttaaataccccaaatcagggatactggcagggatcaccaaaggtctaaggcttaccactgcaatcactagcaaagatttccaggttattgcctccatgataggaaatacaggggacaaaagaaagcagaagagctgttctacagactcccgagtctcctgccagagaagagagaaagatcacacggacagtgtaaataatatcagacagttgggagatgttctctggccaaagctcttgtaagcagcagatagaggtaaataatattacacactcactatctgctgtgcagaaaaattcaatgggaatcactttagtccttactgcaaagatct

SEQ ID NO: 2431 - DNA, 581 bp, Rattus norvegicus
  Genbank Accession No. AI237403
taggaaaaatatttccctttgcaagatatagaaactacaatctttggaaaatacataacgccccataattgttacaatacatagccttgtataccacttgaacattgtttaaaaattataccctgtaaaggttggtataagaaacattgtcagtcacatatcctgacattcaagtacttaagacacagttgaaataaaatgaacttccagagaggttcatcttccactgtcccagaaactcctattgtgtaagttaggcagtggctccaggagtgggactaaatgagaggaggctgctatagaaaccggttactgcaggcctccctcccatcatcccccaaacccctctgagttctaaaggtctgatgactgtattttctaggatgctggtagaatggcaccattgacggatatctctgcggggtcaagcgcgacagtgactaagctaaataaatgtttaggatgtcaggtggcaaatatgatttaaaaccaccaaagttcctcttaggagctactggagaagaccctttcatagctgaattaagaccccagactccagcccctttcttcagaaaaactgt

SEQ ID NO: 2432 - DNA, 472 bp, Rattus norvegicus
  Genbank Accession No. AI237535
aaggcaaggtctctgtcattagggctgggagagatggtacagatcaagccaaacagtgaaaaataaggcaaactgtagcttcgggttttgagcctggcaccaggaaggcctcttcttgaggaagagggggcaggcagtggcaaatcagcagacgagatgcaaatggagtaacaatcacagttagtggggtaacgagatcaggcggtaaacccttaaagcaacacccaaggtccacgtctttgcatgtgcagggcacaactccagcagcagtttctgggtttgggggtttgttacttttccgactttccccaccccctaaaagacacgaagacgagctcatgaagagatcaaggaagggacgtcttctggctgcgctgggcaagggttgggtgacttccgggagcacttgtctaccttccctgtggctggccgagtcctacaaacgtttgtaggtgcccaggagcgctttgca

SEQ ID NO: 2433 - DNA, 592 bp, Rattus norvegicus
  Genbank Accession No. AI237592
aaaatgaaaacacagaacatacttaattttttattttgaaattccctattccctctatacaagaacctttgctgaaacactttccacaaaggcagcagtgaattttcagaacattttacattttttccccctcagcaaaaaagataaatcacagtgtaaattatgttgttctgctgtcatctttggctggggttagacctagaagttggcgactagcaaaccatcatagagaaaaggtgccagtgcttcttaggcctttaagctacaaactcagcaaggaatgtttgcatttaatctctgtaaggtaccaccaggggggtatgacagcattaacttccataaacttttatagacaaatgggaaaaaaaatctacaaaattagctagtaatattacacagcaatacacactttttatactctacacaaaaccaaaattcttggtcttaatggcgagtagtaatttttgtttgagaatctgtttagaggaatagagtgggacataaagtcgagaaatacaagtatttgcagtaggaagatgttggtcatctggtggtcttattgtgaattgagggcataagctgaaaacctttt

SEQ ID NO: 2434 - DNA, 452 bp, Rattus norvegicus
  Genbank Accession No. AI237607
acaatttcaaaaacagtgtcttgttaacatgtttcctagattaagccactaggttttcttattcactatggaagacattcatcaaaggccatcaaatatttttacaattaaaaaatgtagccccagaacaggagggaaaaaacaccatattttctgttttagactctcaaggaaaaaaaattgttaaggaaggtaaacagcaaaacagtacaaagtaaaactaaagccttaccaatatgctgtaaagagatagaaagaggatggcccacggcaacaccctcttccctgcaggattggatgtgtttgttctgtcgttcaacatgctccaaccctcgctgccgccgtgactctcgcttctcccggctactggggactttctcatgactttcagctggcactgtttttttgggctggggtctccatctccgggctggggatctcctccttgggcc

SEQ ID NO: 2435 - DNA, 655 bp, Rattus norvegicus
  Genbank Accession No. AI237620
caagcaagataaaaaaaatgaatcatagccaattttattcaaatttccaaaatttttagcaaacatgttaattgcttctaaaaatgtatgtcgtcttttatacataatggttactgtgtcttccactgattcctttttcttctttataatcctttaatagaagccagaatcttgggttgcccagttgggagcctctgatctactgttctgattaagtttcttttcgatattcatggccaacatttggcttctaaaagaaagacttttagtcttttcaatcacttgctggtagggtgagactgcattgttgcccattaccacatgacctagtttagaatcaatcttggcatccaacctcgcatttctaatcaaattcacaatccatctttcagcttcttctggagtcatattcagtttatctgctagcatattaatgctgatacactggtggatacgacagaaagtctcaaatatgaagagacgggcattctcaatgaagtcctcaagacatgctaccaggaagaagtcattcacaagcactgattcacattctcttagctttttctgagctccatcaaaatcaaagttaacatataggcattcaacaaattctgtaattgggtctttatatgtgtaagactcctgttgaataact

SEQ ID NO: 2436 - DNA, 589 bp, Rattus norvegicus
  Genbank Accession No. AI237646
aaaaatataaaatttattcatagtcactttcacacagggttactctcgagctagcatcctcaagagctcacagcagtaatagatcgctatcaaatatagctcatgctattggacttggagaacgctcgtttcccctttaaaaatgttaaggctcagtttccaaaaggtagttattaccatttagttttctgctgccaaggctggggagtttggggctaaacggcttacagtgaggttgcgggtagggcggcaggaggcaagctccacatagctcactctcgcatcgtgcagagagtgccgttctttttcttaaaggttccttcccttggaaaaagtcattttgttacaaagacaaacaaaacaagcaaaagtaacaatcataaggcaaaagaaatctttagcacacaaacaaggaaagctaacagtgctttttccattgcgtctggatgaaatgtgttgtgggaacaaacgccgctcctcgcggttcttaaatgaatctgaccaatcagcaccacttcccgcggttcttaaatgaatctgaccaatcagcaccacttcccgcggttcttaaatgaacctgaccaatcag

SEQ ID NO: 2437 - DNA, 689 bp, Rattus norvegicus
  Genbank Accession No. AI237654
tttttttgtaaagatataaaaagggaacactgattttaaaaaacaaaaacactcctcgctttcaaaatattggccatgatttctctttttctagtatgtgacattggctctgttgccccatggcacagaagttcatggtctgttcttttaattcccttcaaaacaaaacaccttggaaagaccatgcctgaaggtcacttagaccccgactcaaaaaaaataacaacttcttcatttccaacatctgggaaagtgggccaggtctgaatgttttgagcgttccgacattcacccagcaaacactcctatatcacggtgcgggcactggtctgcaccccttgaggctggagacttgcctactgattgccacccatctgtggagtcagaggcgggggtgtacccactccccactggagagactgagtctctgaaacattggagttcaagcagagaggcagaaagcgttgagtagtacagatgagtcgtccctgaaggctcactgcacgttgttgttgttgttgttaaggacgcagggatccacctcagtgtaagtgggcggaggcatgaactggaactcgggggcgtacataaagatagggctgtcttgagaatcatccacatcatctagcaggggggtggtggggctctccaatctgtgatcttcaggaatcacgtccatataacaaggt

SEQ ID NO: 2438 - DNA, 568 bp, Rattus norvegicus
  Genbank Accession No. AI237683
cccaccatcataagagatacacttgttctttgtgatcagaggaaaaaacattttggaatggacaatctgattctactattcattaaagaaaaattgaagtcaaaacaatccagtgcaacaattttcagtagtacaatccagtgcaacaattttcagtagtacaatccagtgcaacaattttcagcagtcctatctccagtgtaacccagcaaaatattcacatgttaagaaattctaaatcccaagctgcaaatttatcattttttcatttatgttcgagccaaggagcctaaagcaacagtgatcactgcctttcagaaccttggacctcatgactgacaacagaattaattgagtagctaagtcgctggatcagccactgtctggcagggacaacttccattccatcatgctagctttgggcttctcagttcttaaaactgaacagatcacttactggagtgattagggctttgatttttttgaatgcaatcatttttataaaaaattaaatgtcaacatatgccatgtggtatcactatctgagatgcaactgtaaagagataaa

SEQ ID NO: 2439 - DNA, 464 bp, Rattus norvegicus
  Genbank Accession No. AI237688
ttttttttagtatttttataaatttattaaaaaagaaaagcaattgcaatgacagtgatcacctgtactcccctactggggggcgggggcgggggaagacctacatagctgagtcccaaaggaaaatcaagacattattatcaggcaccctgtagccaggagaggctgttggtgcagtggtctagacactggcgtgtcccattaccagtgcaattaaaatatgtacatttacagttatcctgtaacaggaagtagagtgcccagtagaccagcagcccactcctccacttactctgtatctttgaagccatcactacaatcacaagaacaaacaagtaaaaagaactaagttaaacaaacaaacaaaaagaaatccaagtgagcctctctggcctctgtgggctctttttacgctgtgctagaatcagaaggaccacacccacagggccatgggccttgtgccg

SEQ ID NO: 2440 - DNA, 470 bp, Rattus norvegicus
  Genbank Accession No. AI237700
acaaagcaaacacttttattttctatgcaaaggtgatccagagaatttatataaaggtggggaggggcagccaagcagggagtattactgatggacaggagagagcctggtttcccagtcgcctgagggccctttgattccctgacaggtcaggagggtggcacagagcagctccagcctttgccagagggtacctgtggtgggcaggagcccagcttgagctgtggccattaaggtggggactctagggcaaggggacaggggaagagactggaaactgcctgtgcttattagtcacccttccttgtttgcttttattttcgtttggggagaggtccctgctaggccccttcccagggatgctgtcttgagaggagttgagtggaacatgaatgtggagggaacacacaggcctatgctagctatcaggacagaatgccttccttgtgataaatctttgaggtctcttg

SEQ ID NO: 2441 - DNA, 217 bp, Rattus norvegicus
  Genbank Accession No. AI237810
cagaattccttcaactttaattgtgggggtaaaatcaagcccccacttaggaaaaatagtccctggaagcagtcgaaacgtttgtgtaggggacaccatgagttatttattaccacaggttgtcacaagtcgccagctgttctcattcttccactgactccttcttgccagccttttgcccttcaaagagggggtacctggcctccacatcagccca

SEQ ID NO: 2442 - DNA, 487 bp, Rattus norvegicus
  Genbank Accession No. AI237820
acaaagcatatacattttaatcacctatgactctcttaattcccaaagactattaagaaagactattaagattggttacaagttagttatatgaacagaaatgtattctacaatgtgcataaccaagtattttaaaaattcacgattgcaaacttttaatggcagagtaacagcatcctgagatatcttttttgtgtatacatctatatttctgaatgtgtgcatatgtgtgtgtggatgtggaagccagatgtcagtcttggctgtcattcctcaggagccatccaccttgctttttttgatacaggattgagcccttggatctggggctcgctagttaggctgagttggctaccttgtaaatccagagaacaacttgtctccaagttcaaactcaggtcctaaggctggtgtgactccattactgagttttgtcctaggctcctgaggtattctttatggtgaaatgatacactagtgtttttgt

SEQ ID NO: 2443 - DNA, 572 bp, Rattus norvegicus
  Genbank Accession No. AI237836
  misc_feature (1)..(572): n = a or c or g or t
cttgcggccgcgagattttttttttttttttttgctcatttttaatttttattttgattttttaatgctgcacaacacaatatttatttcattttgagtttcatttatttcatttatttctttatttctgtttgttgctgcttttattttatttactgaaagtgagagggaacttttgtggcctttttctttttctttttcttctgtaggccgccttaagcttactaaatttggaacatctaagcaagctgaagggaagagggggttttcagaatcactggggagaaaagggaaaggttgcggtgttgatcatgccctatggtgggtgatcaactgcttgtacgattgcgtttcactcttaattaattgtgcttaaggctgaattaaatttgggcgttcccttcttagagcagctcgtattggcgaagatgcatgcgctggatgatgtcacggcagtcgttgaagacacggcggatgttctcagtgtccacggcgcaggtaaagtgagggtagcagtagtgacgtccatctccactagcagtgctgattctcagaaactcatcccngatgaa

SEQ ID NO: 2444 - DNA, 598 bp, Rattus norvegicus
  Genbank Accession No. AI411279
gctaaatgtagctaggttgtaaatatttaattttcaattcttgataaatggatatatcttgatttagtcaggggtttgatcactggagagtaggcactgctgtactcaaatcgatcatttattccgggaaagtcagagtcctcttgggcgtcttcagagcagtcacaggaatggctaagtgaccaaccagtatcactgaaacttgataccttgagccagagggagggccgtgctgtagttgatggtacacgtagatctccgcatgtactgcttccaggcatcgctgccagattccctgccaccgtccgtgtgctttttgcctccaaacgcaccgtcgatctcatccccactggtaggaatattgacgttcacaatgccacagtctgaacccttaggtccaagccagcggaagattctgcccagatccttggtaaagatactactcgaaagtccctgttttacttcattgttccattcaaagacctcttcttcattcttgaatttgaagacatagagaattggggcaaaagtctccttgtgaacaatgggcgcatcatggacaagaccaatcacaatggtgggttccacataattgcca

SEQ ID NO: 2445 - DNA, 685 bp, Rattus norvegicus
  Genbank Accession No. AI411389
cctttccagttttattttaaagttttaaaattacaaccacagtaattttttcccggcactagttacacttgtttaaaaagtggggtagggtacccgagtttcctactttattaaaataagaggacaactgtacagagtttttctcccagctcccgaggtgagactaagtactagtcttagatatggatatatacatatacacacatgcacacaatcccgcttctctaaagctacctagcaaattcgaatccacgggagtatatcccacagtccactccctgcctctccccctcctcggctacttagaaaagactcaaaagcttggaggggttttaagtggcagctggtagaactgaagtggcaccaagcaatgccacatcttacacaggaagaggggaaaggaaacgaacaacgtcctcctaggacacaatccatcaaccgtgtggaaaaacccaagtttccataggcacactgaggcacttggctgactctgcacccctccccctaagtccactcccatttaaccagagactgctgagaagacccttccttcccaatggctaaatcccggttgtgagaagctatggcttctctaaccagctgtcacttggagaggcactagggcagaagagaaaaagaaatcaggtcccccaacttaccaccattggtagggcagcccagggag

SEQ ID NO: 2446 - DNA, 693 bp, Rattus norvegicus
  Genbank Accession No. AI411413
agcgggtcaaacaagtttaattcatttccttttcacagcacatttacatttctgtttggatacatgattacatccactttgttatttttgaagcattttatggttatacattactatacaataaaacaaaattggaatctttataggtggaacagagaacccaccaccccatgacggactgggaaccaacagagagcttatagactggttgcagctacaaggagtggatgcaaatacaatagaaaaggtaaatttctaaatcaaaggattcctatgatactgttgaaaagctgcttatgttgttgaatgtatgttgaatctttcagattgttgaagaagattacacactttctgatattctcaatgatatcactaaggaagacctaaggtgcctcagactacggtaagagagcctgcaaacaatttaaataataaaatggggcttttttatgtgaatacttttatttttaatgctggtagtttccccgatctttgaaatttatctttcctatgttgtagcaagcacagctcattttctcaggttggcaaggcatgaggtgccagacctttctttacattgtttaaatgcccacacctctacccagatcacccagtgttcctatggtaccatgtctaggaaaaggttacatacttttaagttagagattacatttgaagagtagatgggtggct

SEQ ID NO: 2447 - DNA, 562 bp, Rattus norvegicus
  Genbank Accession No. AI412054
atatatataatatcatttaatgtgaaattataattaacatctccatattaagcttttggatcttgcctgtatcttacaattaaagcacactttactgcggacttagaagcacgcgagcgccggcaagatgaattcttcatgcctctgtgcctattcgttcttcaggtgaagtccgggcggatccgcaccatcgccccacatatgctccggcggtagttgcttccttcactttactgtgctgtgtttactggtccgtggtcaatgccctggcgatgaggcttggaccacattacagcgggagaggttttccaccttcccgtccgcttgctcgcagctgggtccggatgtgtattttgctccttctggttctccgcacttgctagtgggctgcgaacaaactaaggccgacttggtcttcagaggcacgcggctccggaattcatagcggtcaactcgccccggtgggctcagaggccgggatccagcggcctcagaccgtgcctgtcgacctgagcgctcccagtcccgctcgaacatacgcaacgcgaagactgcattcttt

SEQ ID NO: 2448 - DNA, 571 bp, Rattus norvegicus
  Genbank Accession No. AI412439
attctccacagagttcctttctacagctctacagtataaatacacagaggtgaccttctctcaccaggacaaaggggtacacctcacctgcttggtccccactgccaaaccctcactgttctgtgtggggcccatcagcagagagtcactcatgcggctcaagtgtgcgcgccaagtccatgcttgggtagaaacagctccgctgctactgatgcaagttcctgaagatctgccccaagggcggtccatggctacagaagggtcgcaggcagaagcccctcatcgttttcatcccaccctgtgctgcatgctcccaggaaccatgaaataaataaataaatactctgaaaaagctctgggggaggggcctgagccagctcatggcttaagaagaggtgcagcgcccccttggcagagaagagggaacataaaactggccatgtgccctatcctacgatgtaaactcctctctaggaacagccctgaaatccaggcgatccatacttcccccaacctcaaaggcttccagactctctgctccaatcgcctggcctcatgttccatgagataa

SEQ ID NO: 2449 - DNA, 594 bp, Rattus norvegicus
  Genbank Accession No. AI598451
gcctctcgtgggcaccacagcgtcccggagtctttccgccgcccgtcaccaggatggctggaatggccttagtcatgaggcttttagatttgtttcaagaagggattatgcgtcagaagcaatcaagggtgcagttgttggaattgatttgggtactactaactcctgtgtggctgttatggagggcaaacaagccaaggtcctggagaacgccgaaggtgccagaactaccccttctgtggttgcctttacaccagatggggagcgacttgttggtatgccagcaaaacgacaagctgtcaccaacccaaacaatactttctatgctacaaagcgtcttattggacgacgatatgatgaccctgaagtacagaaagacactaagaatgttccctttaaaattgtccgtgcctccaatggtgatgcctgggtggaggctcatggaaaactctattctccgagtcagattggagcgtttgtgttgatgaagatgaaagagactgcagaaaattacttgggccatacagcaaaaaatgctgtgatcacagtccctgcttatttcaatgactcacagcgacaggccactaaggatgc

SEQ ID NO: 2450 - DNA, 614 bp, Rattus norvegicus
  Genbank Accession No. AI599895
caaatatccagggaactttatttttaaagcataaatcaaacagacacaactttcattgacccaaatatgcataacccaacctgaatataaaatgcactgaataggcaaattacatgatacaaagggaatgtattttacaaatgtgaaatgattgatggctacagcaatttaacaaatcaattaaaacactgtatgtttcaaaacaaaagtatcttaaagccaattatctaatagtaaaccaagggaaattctggtatggaatgatttgattcaaaggaaataaggcacctgctataaatttagagaatatttttcacttttaaagttatagtaaaatagaattagttaaccaagacttgcttcagtgaatccagttcagggattcacttacagggtgaaaagaggcagacaaccatcagtcatgcccctgcagacccatagccagctttctttcctgatcagagacagataaattcctgtgcatccctaactattcctttccttcattctcctctacatctgaggggatccaaagtcctgtgaggtttacactgctctcagaacaggtagcaagtttcccttctgttcctttgaaaacagcttatttcaaaaga

SEQ ID NO: 2451 - DNA, 430 bp, Rattus norvegicus
  Genbank Accession No. AI638948
ttaagaaagaaaaaataaaaatataaataaaaaattaaaatttttaaaataaataaaaaaaaaaaaagggggaacccgtacacccacaaagagtgaaaaagggctatcactaaccaaaaatctcccacaagaaaaaacaaaaaaagggggaggccccccccaaccaaaatgcgcggtggtaacccaaacttaagccaaagtcaggagagaggctttaaaaaaaaaaaaaattcccatttgcaaaccccacccttggtggattttttcccaaaaacccccccgaaaaaaaaaaaaaaaccttttttcttattcccaaaaaaaaaacatatctggggcgaaaaagcagaaccccccccttgaaaacaacccccccaaaaaaatggaaaaaaaaaagctccctttcccaaaaaaaaaaaaagggccatggaac

SEQ ID NO: 2452 - DNA, 333 bp, Rattus norvegicus
  Genbank Accession No. AI638949
ttcagtattcacaggcctttaatgcacaacttcctggtcatactccatccctgccccaagctggcagggaaggatgaaaacccatgtaggccacaggatacactcaaggagggactggagtcaaactgaaccctgggcagggaggtcctggccccaggaaataagggagttgctggcttgggcaagctcagtgatggacacccggccccgctgtcggatgaaactggccacagcagccagttcctctggggttatgtaaatgaacttgccccggtcgtcaatcacacctgttagagtcccctccgtcagcaggtcctggatgcggtttatggc

SEQ ID NO: 2453 - DNA, 415 bp, Rattus norvegicus
  Genbank Accession No. AI638988
ttccgtccccctcccagctcagctaatccgacttccccgtccctgcagctcctggagtccggaaggttgacctaaaggacagacacagtcccacaggttttccggagggttagtgagtccatcaaaagagccagaagagcagtttccgggctccctcccgcggattctggttaccagttctgccgccccctggtctgttgccatggaaaccaaaccttccaggcgactttgactttgcgtaagaagggtggtggtgtgtgaggttgctgaagggagagctgggttttctcggagcctggtgttgaaagggcggggtaccgagtgcctgggttctattctgggcatggaagcagacagtagggcaaagagcagctgtggctggtccccagattggtatgtgggcatcagaagatga

SEQ ID NO: 2454 - DNA, 402 bp, Rattus norvegicus
  Genbank Accession No. AI639008
ttatattgctgaccttcatttttatttaaatatattcatcttgagaggaaactacacaggaaatattttatataaatgtaaacatgcatgtctacatcagaattaagcaaaataaattttgagtcacaagattttaaatatcattaaaggacaccaggaattgaagacggaagtgacaggaaacaagaacacagatcctaacccttgagttggtcttccaagctactgggtaaggcctgagtttcaaaaagtttatgttccttgccaagtggaaatatccagtttggctgttcttaatacatatctacaaaacaaacaattctcttttaaaataattaataaatatgacacacacacatacacacgcacacacacatacacatacacacatacacacaaact

SEQ ID NO: 2455 - DNA, 498 bp, Rattus norvegicus
  Genbank Accession No. AI639012
ttcttttacaaaaaaaaatataataacttagtttgcattttacaacatttccaatgggtcagggcatccttgaatgggacctaaggggtcagagcagcatgtacctcccttcccagttcaagcaccaggcggggctcatgccaccagtctgcaatctctatcgggatttgatagagcaactgagccatggctcatctgaaggacagcagtacggtgtcaccctgcaagtcactccatatttatttcacaagggtttatgcccctttcttctgctttcctgtacatcttttgaaagtcactaaagcgtggggcacatccaagttgtgcctccccaaagtgcacatgtccagtgaagaggaattctccatgccctggtcgtactccacactgcaacagtgttgtgacatggcccagccagtggccactgtcctcaggagctggctggaaaaccctgctcttctgcctgtggagcctgctcacccgtaggtgaatgactga

SEQ ID NO: 2456 - DNA, 358 bp, Rattus norvegicus
  Genbank Accession No. AI639017
ttgtttattaccaaacccaacatttattgagagcacagaaaatcagttggcagaggcccaacttcaatgagcgaactgaggccaggctcagtggggtaggccagccctgaagtcactcactcccagtgagaaaccagctctgggagaggggctgtaaaccttccaggccttactggggtcctccgatgggggaatgtctgaggggcagtgccccggcctggattttaacagtcctcaggtgttgatggggggcagggagctgaggtcagggagcagctccgggtgggggtccagacgggccaggcggctctgctccagggcgatggcctcagctgaatgcttgcacttctcagagcca

SEQ ID NO: 2457 - DNA, 448 bp, Rattus norvegicus
  Genbank Accession No. AI639029
  misc_feature (1)..(448): n = a or c or g or t
ttacaaaaacaaactttattttgctatctcacaagtcagccaggagattgccatggtatatgtccctgcttctggtaacttttaccagacacaaacaggatcccttcacgtcctcacgggagctcaggctgcctctgccatgctgggggcttcccaaagcagccagagagatttctctgcaccacctcagcctctacagaagttctggctggggaaagactcgctgagcctccgtggctaaccaggctttctgacccaagatcaggcacggtggccctcggctgggcttgctgaccgaacatccagacagaggtttctcctttggcagggcctgcctcagagccaggtcccatttgctgcacagtccaagaagccatcatctcaggagccttccccagacttcactgaaggctgtacagccacctnctcgatctgccagcgacacatg

SEQ ID NO: 2458 - DNA, 392 bp, Rattus norvegicus
  Genbank Accession No. AI639042
ttgacaattactgtatgtataatatattacaacatacatattacagtttaattatatgtacacatacagagcatcaaaatacttttgctactttgacaactaaattgagattaaaaatacacaagttcaaacatttctacatacaacatttttaggttttcatttaccaaaaacaaaatagtacaagttttgctgccctgatatatacatcaaaataaatacttttaattgtggaaaatagaaatcaaatttcttaacattataacaacaaatagtttaccctgaatttgtagtatctttttgttaaaaaataaatttacttaatcttaaatttaagtcaatgtactttaatgctttttaaaaagagacaaaatactaaaggacaggtttac

SEQ ID NO: 2459 - DNA, 336 bp, Rattus norvegicus
  Genbank Accession No. AI639043
ttaagtatgagtgtggttcatgcattattagggatatacttatgttacaaagtatctgaggtggacgtctgaagttacaatttcagcggatgtttttatgttcattgctaactacagtcctgcaagggaaggctctctcccactgtcttccttgctctgcctccagcctccaagtcacaatgctgacaaagccaaatgcttggatgagtgggttccttcagcttttcactcctttattcagccaaccacttactttacgcaccagtggggtccctcaaaaaccacggcagacaggcagtccaaaggaggaagcagtggccatgacagatacttaca

SEQ ID NO: 2460 - DNA, 278 bp, Rattus norvegicus
  Genbank Accession No. AI639058
ttgcaagctttctgagcttctgcattcagaccacacagaacatgtaaatatttatacacagaccggagaactagcacacgccttacagcctgtgtgtcccctgccttcctctctcttctctcttaagaagtgcggagtgtttttttttcttttttgcggatttgcctagaggtgccccaggcccccgctcctagagagggtgacctttctgtttctccttctccttgttctccagaggggcaatgtgagggtgatggagccgggtcccttctggtgcc

SEQ ID NO: 2461 - DNA, 340 bp, Rattus norvegicus
  Genbank Accession No. AI639070
ttaaagttgagcacaatacgctgattggagcgtcatcaagtccgatattttggattccattggggcagcacggtgaaacatgcgttttatctccaaggatgaaaaacaaaaccttattctaactcctccaataactacgatggggccaatgttggtcactttctttaaccctgaattggcccttacttagctcgcaaggttcctatataaagtatgcctgggctgctgggactgccacttctctgatgaagttgtctgttcaagtaacctggggaacagagcgcgccaccgtggcttgagaggggccctgtgacacaccattgtaccattggcacaccat

SEQ ID NO: 2462 - DNA, 498 bp, Rattus norvegicus
  Genbank Accession No. AI639076
ttcggagctggggaccgaacccagggccttgcacatgctaggcaagcgctctaccactgagctaaatccccaacccctcttggtctcatatttatggaagaaaaattcatattttatgagcagctaaaacatacctgcttatatgcacttatatattataatatgtgagatttatatatatacatataattaattatatatcatttacctgcatatatgtatgcttgcgagatttttatatatattacatataatacattttatatatgatgtatatccatacataataaaatatatgatttgtatatatttatatacaaatatataaattatataaaatatataatatagttatattaaattttatgttaatataattaatataatataaaattaagtgtaaatacattacatataaatataaaaattacatataaatatataaatattaatagatattttctatattttcctcctctatttaagtttctgaggttt

SEQ ID NO: 2463 - DNA, 416 bp, Rattus norvegicus
  Genbank Accession No. AI639093
ttgaagtttaaaattttttattttaaaaatagattcataaagtgcaagaaatgttttctttcccgtgctttatatccatcttcgacaagctgagcacaggctgttagcgaagacaaaactattttctttctgaggtctggaagcaagccacgttcctgcaagccgtgcaaggacgagccgggactcagggcgtgtagtcgcgcagctccccggatacgggctgcacgaggcttggagaagaacccaacgtgctcaggccaagtccagctttttctgagtcgtcgccagcttgtcctgcagcctccgcttcctccagtccaggtaacgcctccgcaaccgattcgcttgccagccaaggaccactccagaggcgaaagccactagcacggacacttgcagcgtcctctctcgtgccg

SEQ ID NO: 2464 - DNA, 387 bp, Rattus norvegicus
  Genbank Accession No. AI639097
ttaaacatcccagaaaactttttttaagctgcatggttcacaatttttggacccaatttttaaaggcgatctacaaaaacctttaacataaacccggggtttaataaataagaggaaggtttccatcattttggaaaaaaatcctaacccggaggctttttttccctatatattcgaaaaataagtttccaaactaacgggggcacatgggcgtgggggcccccccccccccccatgttcactcggaagggttttttacggggtcaaactaaaccctttttaaaacgtttaagccgaaacacaaaacaggaagcccactgggaaaaagtctttggtttaaaaaaaaaaaaatccctagctaaaaacggggaaatatttcccttaggg

SEQ ID NO: 2465 - DNA, 398 bp, Rattus norvegicus
  Genbank Accession No. AI639117
ttggattggagctgctttaatctgccctcaccctcccagcaggaagctccttataagaaacccaagtcctcgtctttgagcttctcctttagccagggcagcacctggaagagattgatgtggaagtcccgggcataggagggcaccaactgttgccgcctcgggtctttgcagacatccactactccccagctgatcacaccaacttgaatgaagcggcttctcttgtgaacaatgagagggcccccggagtctcctttgcatgtgttggggtcagcatagggatctacccctccggtgcacaggaacctgggggtgaccacctcagaggcaactttgaccttctcatagccttgggcctttgtagcatctctctcacaactggctttcttttcccc

SEQ ID NO: 2466 - DNA, 457 bp, Rattus norvegicus
  Genbank Accession No. AI639120
ttgccaagtgaaatgtgtttattggccagttaatcattgtggttaaacatttgcctaagactacaaggcggcaaagacttagatcctaaggaaggaaagaatcatgttcacttttaggttcagaaaggcagaacagagcacctgaggccagctgtgacatcagaaaagccggagagagggtgccctcaggcacacgtccaaggtggtgagcctgagcttcaccatggtgtgcctgggcctttccctagaaaggcttcagtacagtagctgggacatggacatcccactgaggctctgcatccctgggcagcgtctagggtactgtctcatgccccaggacagtgccatatcatgatctggcatggcctgtgtgggtggacaggcctgggaggtgacactgcagagtgaagggctccagttctggctgttgtgctaggttggcagtctcactgggcga

SEQ ID NO: 2467 - DNA, 213 bp, Rattus norvegicus
  Genbank Accession No. AI639125
ttaaaaggggccaccaaccttaatggtgggatttcaaaaaaaggaaggcttcccaagccccttcttgtggtattggggtttggaatgaaatgggaaggaaaagcttaatggttggggcttaatttggaatgggaattcttaacaacttgaggccttttttttggttttaagattcctggttggcttggggggtcaagggtttttaattctttg

SEQ ID NO: 2468 - DNA, 567 bp, Rattus norvegicus
  Genbank Accession No. AI639154
ttaagatgttaattgtgctcagggaagccagaagagtggggtttcttagaactgcagtgacaggagttgtgggcacaccgacatgggcactgggaatcaagcttgggtcctattctaaagatatatgtgcttataatctatctctaagtgccaagctctggtgggaatggagtagcatgattcctgcccctgggacagggccctggtgtgagcctcccggagttgctcagcccagtgtggcaagtatccagtgtctgtcgtctgtgggtgtaaggcttgcttgagtaataatgtatatcttttcacatcccttcagggaatgccccctctctgaatgttaatgactccatgataatctgaggcagcctgagtccaggaggcaaaggcgtggctaatgtctcagtaaaatggtaaacctgggatcttcaagacagcccttaaggctgtggaaaagaactctaaatacatgagttcaaaaatatttaattccaggggttggggatttagctcagtggtagacctaggaagcgcaaggccctggggtcgggccccagctcaaaaaaaaaa

SEQ ID NO: 2469 - DNA, 393 bp, Rattus norvegicus
  Genbank Accession No. AI639167
ttgatgctgggaattgaacacagggttgtaacgctctatgacagctacagcaagcacgtctcatcctcagctgttcaacttaactgcaaggccagtatgttcctgtcgtctcaaagctgcacctggggaagcatgagcgatggcctcagcctgcagcaagtggtggtcatgcctgtgcacaacaagctggagcggagattggtggggcttgcacacccctttcatccgcattgctttaaatactggacacagcctttgcacagtggcccctgtggccacctatgaacactgcaagtgtagtaaccggatgtgtgtgggcaaacaccttctaaaccacaccagtgtacccgatagccagagcctaggatcacagtatagagaggtgactcaggg

SEQ ID NO: 2470 - DNA, 357 bp, Rattus norvegicus
  Genbank Accession No. AI639197
ttaattttaataatttatttttttaataaaaacgaaaatgatataaaacccaccccccctacttcaaaggaatggaagggcgggaagaaggacccaaaaaaaaacactttcgaaaaaaacacctcgcaggagatgggcctcaaaaagtcttacggacccccccccaaaaaaaaagtcaccccaagggggggggggttcttttgaacaaaaaaaacatgtggactcaggtttttaccaaaaaaaaccccccatctattgaaattaccaaggaagagcttaatttggtcggtagaacccacccccacagaccttggcccctggggggttctgcacaaaaaaaaaacccttgaggaaggg

SEQ ID NO: 2471 - DNA, 516 bp, Rattus norvegicus
  Genbank Accession No. AI639247
ttatgataggcacaaatctttaattcatctagcctctaaagtactctaaagtactctaaagtaaatcggactatccacaccgtgggcattcagcttctcaagttagttaacaattagcctaaagaaatcctggtacttgaagctggaggatgtgagcctggacaggaatgctgctatctctggatgctgtgaggagacacattcttcttcagagacagagcggagcccgtggaaggcttaagcaagtttgtgaaagacgatgtacctgtgaacatctttctttccacttcttcttgaattttcagaagaattcgctcttgttccaaggcttctatgtactttgaatagcaccaagtgggctgtcggccataggactgcaggactagcaaggactcgctgcctaaagtaggttttggtaagagagcctgtagtacttgcatactgcttgactccagactttgcagctttggcctcttctatgtctgatgttttccttttctgcttatattcttgcct

SEQ ID NO: 2472 - DNA, 481 bp, Rattus norvegicus
  Genbank Accession No. AI639257
ttcacttagatactgatttaattcatggatcaaggccatattttcaaagtattttaaggatgccagtacactgcaaaagctggagaagagttgagaaacagtatatgcttactaaacaagaactatctttatttatctagtgaatacctagagtaataaatttttacttcatgatagcaatcaggctcgcaaacacccagaaatagaatttaagggttttaaatgtagttataaaggtcataaaaagtctgattagactgaggtacatttactcaaaatgttgagattcattaagtggtagaaacaaaataatccctcaaaccaacccatattctcagtgtacatataattggaaaggagggggtgcattaattggtgagattcaccaagctgcatatcaatattttgttacatcaagtagtttgaagacaagggaaatgttctaatatataattttagattatgtattgtttggctaaaa

SEQ ID NO: 2473 - DNA, 314 bp, Rattus norvegicus
  Genbank Accession No. AI639282
ttggggaaaagggaagtttattatttacatgtttaaaatgggcataaagatggggcctggcacaacctgacagctttgctcaatcgctgatgatgagctcatccaccccccaatccttatagcttccatttggcaggtaacggcgaatgatgatggggatcttccgggccttgagttccttcatggcgatgagcaaagggtttgtttccccctccaggttcaccattactggggcacacattgtaatttggaaagcccgggtgcccaacacttgggctcgctcgtacttgggcatgtatggaggggggaaaccc

SEQ ID NO: 2474 - DNA, 224 bp, Rattus norvegicus
  Genbank Accession No. AI639343
ttaatgttgcaaagacccgaatgatgttggataattgtgggaaaagtaaatccgtctcaggatcactgtcactgctgttgccactagtgattcttaggaaaacacagtcgacttttccaacaaaatgtatgatactatatgctcgatattagaacagtgagcccatgaatgattctatgaagctatgcatcatagacctcttgagctgtgaattagcactattt

SEQ ID NO: 2475 - DNA, 301 bp, Rattus norvegicus
  Genbank Accession No. AI639347
ttgtctttttgttctttcttgctttgtgatacgaagacaagaagttttgccccacccccgacactgaacaaggaggcgggctgaaaaaaaggaggggggggggctctaagaagcttataaaaacgtaaaaagagcccgcccgccatctaggagggtccccccgagaattgttcacaccacccacggtgctgggggggggcttcaaaaggaaaaaaaataccgagagaagaaccgagacggagctgaaggattttaaaaaagacgtactgccccggggggttttgttcccggggcccaatgc

SEQ ID NO: 2476 - DNA, 531 bp, Rattus norvegicus
  Genbank Accession No. AI639353
  misc_feature (1)..(531): n = a or c or g or t
ttactactaaaactataaactgtttattttagaaatcaaacacaggtgagggacatggggagcagtttattgtaaaatacaaagcagccatgttttctgcaagtgagcatccatgaatgactggacatcctcagcaacaccaagctatgaacaggacagccatgaggacactaaaatctctttctcttgataatttctggtttccagctgactgggtgagtttcttctgtcgcagtctcatcctctctgtaaactttaatggttttatcagcttcagctgttagtaaccgactttctgaccgatcaaaagcacaagcgaatattcctgattcactgtccaaagacccaggctgtacagcagcatgaacgcgctgaaaattatagccagttctccagtcccaaaggtgcatagtgccattgtcagctccagatacaagtactccatccgtattgactgccagcgtgttaataattgcattgtgcccagagagattctgaatgaagcctncgtcagggaatttccactgcttt

SEQ ID NO: 2477 - DNA, 450 bp, Rattus norvegicus
  Genbank Accession No. AI639366
ttaaatggggctggagagatggctcagtggttaagagcactgactgctcttccacaggtcctgagttcaattcccagcaaccacaaggtggctcacaaccatctgtaaagagatctgatgccctcttctggtgtgtctaagacagtgacagtgtactcatagataataaataaatctgtaacggaaccaagggctttgtacatacattctaggcatgtgctctcttgaatgagttttattccccggctatttttttgaaaacaaccttgtttataactaatttggccttgaagcaaaaagccctgcctttacttccaaaaactaaaattttagggtctgctaccaccctatgttacatagtttaccactttccattaatgaatgccccctgcttggtcccgttgcttaagctcccttcaaatgcaatggagcagcaaggttgtctaaaac

SEQ ID NO: 2478 - DNA, 281 bp, Rattus norvegicus
  Genbank Accession No. AI639396
ttaaaatatatcaaagaggtggggtttttattcactcagcagggggagaaaagtacacacagaggggcatgtgccccagcgcgcgacccagggcagcacattgtgtgctttttttcacccactggggggcctcctaaagacgcgtacactctgcactgattggggctactctctgagtttccccatgccccccaaagaccacaagaaaaaaagggatgccgaaaagtccgccaaaaaagacagggccccagtaaataaatctgggggcagggccaaaaaaa

SEQ ID NO: 2479 - DNA, 597 bp, Rattus norvegicus
  Genbank Accession No. AI639411
ttggaaacattcaaaaacctatttaatagaatgttttcatgatacctactgggctacagagcttggtgtaaagaagtccactctgctgattacagacttgtatgaccaagtagggcatttcttgatcccttcccacaccccaagagtcacagaaccccgtgggacaggctcacttgactgttcccaacagagatacatgtcttctggaaggctatcttccaacctgtgtgtgacagcagcctgtccaccagccattgtggtgtgcatagcgacagctctgccattcggatcttgtcaggcctcgagtgggtgtcttagggatctcagtccatgggcacctcagagatgctgacagtcttggatctatcctttaataacagcaattggtctcagtttaatggccttcttgctgatcccagcatcatggcaagtgttcacgacgtctgtcacattcttatatgattctggagcctcttccataaccagcttgggggacgcaacccggatggcgattcccatgtctgccagcttgtctaagacatcttggaaatctaaattacgacgtgattttgctctggacaaagcacggcccgctcc

SEQ ID NO: 2480 - DNA, 354 bp, Rattus norvegicus
  Genbank Accession No. AI639441
ttaattgtacagcctggaaattcttctttattgaaaaataaatacagagtcaaacaggtgggccagccaacatctgtagttttggggccaaaaggaaggggtcagacttgttcaggattcagatctccatgagctggtcatttcccacgatcacctcgttcatgcgtttagctttggcttcaatcctatgaccacttccaattaaacagtccctgatctccgcgcccgcctcgaccacggcgttgttgcagatgacgctgccatggatgctgctcccttcttccacggtgacagagttcatgagaaggcagttggtaacagttactctgtctctgatgacacaggatgagccaa

SEQ ID NO: 2481 - DNA, 418 bp, Rattus norvegicus
  Genbank Accession No. AI639447
ttacattaaaattgagaaattgatttttcatgaaatagtaggcagaatttttcatgaaacagcagaattaaagtacagaaatatacatcttaagacaattgaaatgatacgaggatctgaatgacaattacacattgtgaccaaacgaaaaatgaatagtttaaacaatgaattcactttaaagtttttgctcaataattcacctgaaatgaaacatacgaggaaaacagatttgggcacctcgtcaaatgaaataatgccgcttcatccttgtcagaggaactgaccctagtaaaaccgtggttcggatcctatcacaaagccctgtgtctactccattcacaactgtgtaaactatcagtcctttcaaaattttaaggacgccaattcaaaaaatactttttttaggcaccaagca

SEQ ID NO: 2482 - DNA, 315 bp, Rattus norvegicus
  Genbank Accession No. AI639465
ttgggagttacaggaaaagagcgctgtgagtttattttttattctttttcatttttttatttttgagacagagagtctctctatgttgccctggctggtctggaactctccatgtagaccaggctagcctcgaactcatagagatccaactgcctctgcctccagagtgctgggatcaaagggtgtgcaccccccaatacccagccccttctgcatttattaaaacaacatataacacaaattcagtcctctccccatgtttggggatgggtactgaagttcagtacattgcccctttctaggcctttgagtgag

SEQ ID NO: 2483 - DNA, 401 bp, Rattus norvegicus
  Genbank Accession No. AI639488
ttagactaagacaatgctccggctttaatgtatgaaaataatacccatgttgtctaatttgggggtcatacattagaagtgtaaaggtctgcgtctgcccgccgtctagttgaagtacgtgagcacaatcatttggatcggctgtctgcacacggggcagggcttattcctcttctttagcttctttgcacacgtgaaacatgacatcaggtgtccggttttgccgtgaacaatgcaaccatttttaggccgcccctggcaaatcacacatggctcgatggcgttcagagagaagctggattccatactttcctctttgtcttgtgtgtcctccttcaactctttgccactttcttggctgctgtaaacaatgctactggaagtcgacggctgggaatagt

SEQ ID NO: 2484 - DNA, 543 bp, Rattus norvegicus
  Genbank Accession No. AI639504
ttagagagcatcagccgttctatttcttgcatgatcattggcatgaaggaaaagtccaaaacaggggctttgcattctggggattgcgggccaagtgttataagctcctcatagcactttgcctgggttcatgagacctcggggatccagtgtgtctttgagttgcctcatggtctccacacccacaggacccacttcctcttgaagcagctgcctcttgcccagaccgatgccatgttctccagtacatgtcccatggagtgccagggcacgcctgcccagattttctgcaaaggccttgaccctcctctgctcctccacatcatctgggttgaccaacaggatgcagtgaaagttgccgtcacccacatgcccaacaatgactcctgtgagttttgaggccttaagctcctccttggtctctaccaagatctctggcaaccgggagatgggcacacacacgtccgtggaataggccttacttcctggacgcagggccaaagctgcataccaagcattgtgccgtgcagcccaaagttcatt

SEQ ID NO: 2485 - DNA, 437 bp, Rattus norvegicus
  Genbank Accession No. AI639518
ttgggagaagagtctgaaaaagtaaactttaattaaaaaaaaataataataatacaacttcaggttcgtgctaggctctcccacttggccttttacagactggtcggttttccactgaattcggagaagctgaagatgtaccacagaggacacagagcaccatcacttctacaggcaaacagctcgtgcacaggcttgaccaatgtccgtggctcgagtgactaagcggcaaggctggtttcccggaagttcaaaacgccagcttcttcatcagcaggtagactcgggagtccacctcaaatccatgcaggttgttggcgtccccctgaagcctcatgaggaggccgccataggacacatacgcagagagacgtgtggctgcttccgttgaggtctcgtccccttcgatcctgtacactttcccatacattacatac

SEQ ID NO: 2486 - DNA, 528 bp, Rattus norvegicus
  Genbank Accession No. AI639525
ttcctttttctttttttcagagctggggaccgaacccagggccttgcgcttcctaggcaagcgctctaccactgagctaaatccccaacccctcacacctgcttttaaacaagtgaaccagctttgctaagggcttaccagtcaagacattgctccctgctcctcactgttgatacccggtgttcctgaggatggagggactccaaaccagtgggagttttgtctgatagggtaacaggaatagtctctgctggtgggaaacttccagaaagggggagttcaaagcaaggcagaagtttctgctattttttgtttgttgcttttcttttagaggcagggtctcatttagccaaggctgacctccaactccctaagtataagtagtcaaggatgaccatgaacttctgatcctcttgcctctactgcttgagggttgggattacaggcatatgtcactgcctgtaccgtgtatctggtactgagattggactctgggcttcatgcatactagagaagcactcttaacaa

SEQ ID NO: 2487 - DNA, 3166 bp, Rattus norvegicus
  Genbank Accession No. AJ001929
tagaattcagcggccgctaaattctaggtggccacggaatcctgcggcgtggagctccggggaaaactcagtcaaccatggacctgcgtcagtttcttatgtgcctgtccctgtgcacggcctttgctttgagcaagcctacagaaaagaaggaccgagtacaccatgaacctcagctcagcgacaaagttcacaacgatgctcagaatttcgactatgaccatgatgccttcttgggagcagaagaggcaaagagttttggtcagctgacaccagaagagagcaaggaaaagcttggaatgattgtagataaaatagacaccgataaagatgggtttgtgaccgagggcgagctgaagagccggatcaagcacgcccagaagaaatacatatatgacaatgttgaaaaccagtggcaggagtttgatatgaatcaagacggcttaatctcctgggatgagtacagaaacgtgacttatggcacttacctggatgatccagaccctgatgatggatttaattataaaccgattatggttagagatgagcggaggttcaaaatggccgaccaagatggagaccttattgccacaaaggaggagtttaccgcttttctgcaccctgaggaatatgactacatgaaagacatagtcctgcaggaaaccatggaggatatagaccagaatgctgatggttttattgatctagaagagtatattggtgacatgtacagtcatgatgggaatgctgatgaaccccagtgggttaagacagagcgggagcagttcgttgagtttcgagataagaaccgggatggaaagatggacaaggaagagaccaaagactggatcctcccttcagactatgaccatgcagaggccgaagccaggcatctcgtctatgagtccgaccaagacaaggatggcaagctcaccaaggaggagattgtcgacaagtatgatttatttgtgggcagccaggccacagatttcggggaggccttagtacgacacgatgagttctaagctgcaaacagaggagccttcatttcttcaaaagtaatttatttttacaggtctggtttcacataaaattgtttgcgctactgagactgttattacaaactttttaagacgtgaaaaggcatatcgagatagtgaaatcacccgcccccattcctcctccctctgaggggctggaaggaacccatgcttctgaggaacaactctgattagtacacttgtgtctgtaggtttacactttgtataatgtataacatggtgtgtttatttttgtattgttctctagttgggagtataatatgaaggatggagatcctcaacccacacttgtaggcatacattagccatttacactttctcaatcccttaccacattttttttttaataattctcacttaactaattttttaaagcctaagatcaataagaaatgttcaggagagaaaaagcagaaggaaagcatgtacttcgtgatttacgttcagagagagaatgcttcatcttgcttgttgagaagtctcatttcatgagtagctgttcagttgtcacaggcccagccacggagcctgccattgtctgggcaaggacagagtcctccgctgtaagacagcgtcacgcagctccacttcactcttcccctcaggactagctgtttgctaattttgtcaagcacagctgtggtaggaagaattagggcccagtgtcttgaaaaatcaaccaagtagtgtgtatgatgtcttcacagggctatttctagctctttctagagctgtttctaaccagaaacagctggaaaacaaaaagaacaaagtgtatgcagggcatgcatctcattcttagtgaaatcactacaaggacccatcccagcccctttctaagtcttaaccttgggttttactgcagtttaaattgattcttttcccatcatgacattgaaagttgccctttaacaggaaaaatggtcaccgaatgagaattgggactcaagaataacgaatttggggcgcccttacgttgaaagcatttgaacctccctgataccgaaggggattcccctccccgcctttttctcttgtaaacaggaagtaaatagcattattagttaaagcttggttgcagtgttcttatcttgtgggctggtttctaaaacctcatgctgctgatttgaccagggcatcctcatacctcagatgcaaaccactcttctaccgggcctctgtttaccggagctttgcctcaaggatagaaggctgtacagaggggctctttggtttgaggaccactgctcacccttcctgtcattaacctgtcacaccccattttatcatctccctttctctctgacacacaaaggtggggtacgtgggagggtcgtggattattcttattaaaaaacaaaatcatctgttgccaaccccatttacccatctttggtctcttactgatgggcctcttaagaattattgtattccaagtctttaaccctcatgttactaatgtaaatatacatctgggcagtctttattacttcctgtatctctgagtaatacatcaagctggtgctgggtgatggtcatatctgaacctagacctccccgtgggtcttccacaatcctgttgatgtgggctgcttggtgtggtaaaaagcccagtcgtggtgtaacttaaccttggcgattgcatcaagcttcttgatagcagatacactctaaggttttagccccagtagaggtgaaatgaacatccctcactgccttccccagatcctcaactctccattgttaaggagaccagagataattaatgccaccaaccctggcttagaaagggtacgtcatacactgtgtagcaagagggcattacagagcctaacgctggcgtgaaaatcatgtacttagccagcaagtgagtctgcgagggtggcgtagtctggacagggtgttcagcatcgggaactgtgctctcaggtccataagctccacatagtgttggggtttgggtttgggtttctggttgaatttgagtatttgttctttttttatagagtgtaaaccaagttttatattctgtaatgcaaacaggtacctgtcgttttttgaataaaactgtttacatccaaaaaaaaaaaaaaaaaaaaaaaaaa

SEQ ID NO: 2488 - DNA, 1557 bp, Rattus norvegicus
  Genbank Accession No. AJ005425
ctctctggcactaaggacccctggagaagatggggaggaaaaagattcagatccagcgaatcactgatgaacggaaccgccaggtgacattcaccaagcggaagtttgggctgatgaagaaggcctacgaactgagtgtgctgtgcgactgtgagatcgcgctcatcatcttcaaccactccaacaagctgtttcagtacgccagcaccgacatggacaaggtgctgctcaagtacacggagtacaacgagccgcatgagagccgcaccaatgctgacatcattgagaccctgaggaagaagggtttcaacggctgtgacagcccagagccggatggggaggactcactggagcagagccccctgctggaggacaagtaccggcgggccagtgaggaactggatgggctcttcaggcgctatgggtcatctgttccggcccccaattttgccatgcctgtcacagtgcccgtgtccaatcagagctccatgcagttcagcaatccaagtagctctctggtcactccttccctggtgacatcatcccttacggacccacggctcctgtccccccagcagccagcactacagagaaacagtgtttctccgggcctgccccagcggcctgctagtgcaggagccatgctgggtagagacctcaacagtgctaatggagcctgccccaaccccgttgggaatggctacgtcagtgcccgggcttcccccggcctcctccctgtggccaatggcaacggcctaaacaaggtcatccctgccaagtctccacccccacccacccacaacacccagcttggagcccccagccgcaagcctgatctgcgggtcatcacttcccagggaggcaaagggttaatgcatcatttgaacaatgcccagcgccttggggtctcccagtctacccactcgctcaccaccccagtggtttccgtggcaacaccaagtttactcagccagggcctccccttctcctccatgcccactgcctacaacacagattaccagctgcccagtgcagagctttcctccttaccagccttcagctcacctgcagggctggcactaggcaacgtcaccgcctggcagcagccccagcagccccagcagccacaaccaccacaaccgccacagtcacagccacagccaccacagccacagccacagcagccacctcagcaacagccccacttggtccctgtttctctcagcaacctcatccctggcagccccttgccccatgtgggtgctgctctcactgtcactacccacccccacatcagcatcaagtcagaaccagtgtccccaagtcgtgaacgcagccctgcacctcctccaccagctgtgttcccagctgcccgccctgagcctggcgaaggtctcagcagcccagctggaggatcctatgagaccggggaccgggatgatggacggggggactttgggcccacactaggcctgctgcgcccagccccagagcctgaggctgagggctcagctgtgaagaggatgcggctggatacttggacattaaagtgatggt

SEQ ID NO: 2489 - DNA, 1077 bp, Rattus norvegicus
  Genbank Accession No. AJ007291
tccgccaaagttttgatgcctgggaaccgcgcaggaaaaacacgcggaacgtgcttcacagtggcggctaactgctctcgttcgcggtgcagagccgtctggcagggttgacctcctaaagggatattccatctttattaattccagacatttcagcagtttatcggaacagcaacaacagcaacaaaaccttcaaaatttacaagtctttaagaaatagaaatggcatccaaaagagctctggtcatcctagccaaaggagcagaggagatggagacagtgattcctgtggacatcatgcggcgagctgggattaaagtcaccgttgcaggcttggctgggaaggaccccgtgcagtgtagccgtgatgtagtgatttgtccggataccagtctggaagaagcaaaaacacagggaccatacgatgtggttgttcttccaggaggaaatctgggtgcacagaacttatctgagtcggctttggtgaaggagatcctcaaggagcaggagaacaggaagggcctcatagctgccatctgtgcgggtcctacggccctgctggctcacgaagtaggctttggatgcaaggttacatcgcacccattggctaaggacaaaatgatgaacggcagtcactacagctactcagagagccgtgtggaaaaggacggcctcatcctcaccagccgtgggcctgggaccagcttcgagtttgcgctggccattgtggaggcactcagtggcaaggacatggctaaccaagtgaaggccccacttgttctcaaagactagagcccaagccctagaccctggacccccaggctgagcaggcattggaagcccactagtgtgtccacagcccagtgaacctcaggaactaacgtgtgaagtagcccgctgctcaggaatctcgccctggctctgtactattctgagccttgctagtagaataaacagttccccaagcggaattcccaaaaaaaaagacttggtatttgttggctgttgatttcactgcagcctcaggcatctcatcaatccgggccggccaatgtgggtatcccttcatcgtcgcga

SEQ ID NO: 2490 - DNA, 2363 bp, Rattus norvegicus
  Genbank Accession No. AJ011969
gatctgagggggggggtctgggatcagcagggggtggattctggggtcagcccgggcttctacctcctgtccagtgagcaccaggacagagggacagaagggatggccggccgggtgaagacttaccatgcacctacctggccttcacagggggacatggagccccatagtcagtcataacttggagtcaccccacaggtcagaggccacccagcagtacgtagatattgggagggaaccctaggtgctccagatcccagcaggagaacttggtgacacctggtgccctagatgctcactctggtctcactcagaagtcccggctacagccactacccttcggaggctcaggctgactgtggacagggctcctgggcacttcgtcctcatctatcttcctttggagcctgagaccaactgccctcaccctccagccacctaccgactcccgactggaaggagacccatgggcagatttcctcttgcctctctccccaatagagacccctggtctggggatactgaggcaggcacagggcaggcgtgtgtgagcacccagtcatcctggaaatctagtgaaggttcctgaagcaggagctgttcacacagggttttgaagcattagtaggagttccgaagagaaccttgaatgggtgcagtactccctggtttgctcttctgtcccagcccatttagacagggttgtaaagtctactcctgggacactgagacgtagggtgacttgcctgaacttgccttttctagatcttccttggcttctttaccttcgatgggggtggagaaggggagggagggagagaggaagaaagggagagagagccctggtcccaaggggaaggaagaagccacttgaacttcagtctggactacatcacatgttctgtggggacagtcagcactcactcaggtcacagtccccgcattttccctcgtgagctgagaggttccgcccccgcccccctgcggagccttgggattcccgcccggattagcctggtcacccgagttggcatcgcacaaggggggcggggcggacagagtccagtgggtataaaggcagctgcgaaggcttaacgcaaagtcacactcaggacacaagcgacatggccctgcgcgcgctccatgcccagcctacaggcggtcctcagctgaggttcctgctgttcctgctgctcttgctgcttctgctgtcatggccatctcagggggacgccctggcattgcctgagcagcgacgctccctctctgagtcccaactcaacccggacgagctacggggtcgcttccaggacctgctgagccgactgcatgccaaccagagccgggaggactcgaactcagaaccaacccctgacccagctgtccggatactcagtccagagggtaagtggcagctggggacccacttcagcaacaccctctccaagctctaaccaacacactcaagtccacgagacccagtcagtccagcttccgagcctcagtttcccctgctgtgacctctggagttgccagcagtcccccgtgcagtgggctcagccagagtaggaaggacgaccgtcctcagaccggagctggacaaatgatgtccagagaggtcgaggtctttcctggagatgcacagcactctagtgggagaggacacgggggatggttagagggtactggagaggggaggtaggaaagagagccaggttgagagccagagggaaaagaacctgcgggaactggatctctaaggtctgccctgtggagtacttctcaaacctttccccaaacctctgaataaagtgttttaacaaacaaaagttgattttctttaaagcagtgtttggtggccaccttttcacacttgggaaatggaggcagaaggattgccctgagtttgcagtcaacctgagctacaaagtccctatctcaaaaagaaagaaagagagagagagagagagagagagagagagagagagagagagagagagaaagaaagaaagaaagggggctagagagatggctcagaggttaagagcactgtctgttcttccagaggtcctgacttcaattcccagcaaccacacatgatagttcacaaccatctgtaatgggatctgatgccctcttctggcctgcagacaaacatgcaggcagaaagctgtatgatgtatacataatgttagaaagaaaggaaggaagaaatggaaaaagaaaaagaggaaaacaatgaatgggacgggggctgcagaaatagcgcagcgattaagagaacgcactcttcttccagaggacctgagttcaaatcccagcaaacacacggtggctcacaaccgtctgtaatggatccccgg

SEQ ID NO: 2491 - DNA, 6412 bp, Rattus norvegicus
  Genbank Accession No. AJ131902
  misc_feature (1)..(6412): n = a or c or g or t
aattgtgagcggataacaattcccctctagaaataattttgtttaactttaagaaggagatataccatgggcagtagccatgatcatcatcatcacagcagcggcctggtgccgcagcggcagccatatggaattcatggcaacggcacttcagaagcctgggatggtcccccctccaccaggagaggagagccagacggtcatccttccacccggctggcacagctacttgtctcctcagggccgccgttactatgtcaacacgactaccaatgagaccacctgggaacgtcccagcagttctcctgggatttcagccagccctggccctcacaggagctctctgcctacaacagtgaatggataccacgcatcagggaccccggcgcaccctccagagactgcccacatgagtctccgaaaatccaccggtgattcccagaacctgggatcctcatcgccaggcaggaaacagagcaaggaaaacaccatcaccatcaactgtgtgacattccctcacccggacacgatgcctgaacagcaactgctcaagccgactgagtggagctattgcgactacttctgggcggataagaaggacccacaaggcaatggcacagtggctgggtttgaactgctgctgcagaagcaactgaaaggcaagcagatgcagaaggagatgtctgagttcatccgagaaaggataaagattgaagaagaatatgcaaagaaccttgctaagctctctcagaactccttggctgcccaggaggaaggctccctgggagaggcatgggcccaagtaaagaagagtctggccgatgaggctgaagttcatctcaagttctctgccaagctccacagcgaggtggagaaacccctgatgaacttcagagagaacttcaagaaagacatgaaaaagtgcgaccaccacatcgctgacctccgtaagcagctgggcgagagccgctatgcctcagtggagaaggcccgcaaagccctcacagagcggcagaaagacctggagatgaagacccagcagctggagatcaagttgagcaacaagactgaggaggacatcaagaaggcacggaggaagtccactcaggcaggagatgatctcatgcgctgtgtggacctctacaaccaggcccagtccaagtggtttgaagagatggtgacgaccaccctggagctggagcggctggaggtggagagggtagagatgatccgacaacatctgtgccagtacacacagctgcggcatgagacagacatgttcaaccaaagcacagtcgagcctgtggaccaactgctgcgaaaagtggacccagccaaagacagagagctatgggtcagagagcacaaaacaggcaacattcgcccagtggacatggagatctagaagtgactgtatggtcctgggggtcctcctgaggagaggggctgggggtcccatggagaaggggctgtatctgccctattacctgctaatctatccagggaaaaggaggaaaagagacagtgattcccgaaggangngggcccagccaggggctcccccaatattcccaggccataatgatggacccacagccccaacttcacctcaaagactggagcctcccctccaactcccatgctgtgcttgtcactctgagaaccaactgaggctagaaccctggggtcccagctgagttccacaggggtggccatcacacacctgtgccccaggtatccaaggcctgtcctctagcgggattgtcatctccaggaccatggaaggggaagggggtggtgtctctgtctccaaacaatgtcaggatcaggatcgaggacaggagggaaagtgaagttcgcatcctgtcccacaaccttttttagtcctccctacttctccctttgctttgtaggagcccccatctattttttttcgtctcccacaagaatggtggagtttcttcccaacccaaatctggagaggtcagaatggaactacctcagttggcacaaccagatcatagctcccatcagtttcagattccagatctggcattgactgtaaagtctaccacaaagtcccaatctacctttcccccaacctctttctcaaggaggaaactccacacctcatccagacagccctttccagactcaatagaggatattttcccaagtcctcagacagctagatgcatgatcaaaggctttgggggtggagccccacaaagtcttgtttgacacatgcccccgcccctcatcactatgacagccttgaccagtatgctctcccgtgctgactacaggccatgtgagtcagcggtggtaatattcaggtttggttattctctagaatggctctagctgtggatgtgcacaatggagtaggacctgctgtcccccttactgccattggtccgtagtgcagagtctcatggctgtaggtggttgccacccaggaaacgtaggaacgttgggtcgtcacacagtgagtggggttggggggtgaattctagctgggaacttgtgcggggtggggggcatttttcctcgtctttccacagatgactttgtgatttgacctgtctacccaaagggcagaatcccctgagcagcacgaattcggcacgagcctgagcgccactcccatcttgccatctcacatgcttgtcgcggatagcttactaatcttggacctttgggcagcccatccacagaaccatctctcatggttgttagcaagatgcctaatacactaaagcaaactaagcactgtcactttccttactgaaacatctcaaccataaaagccaccatgaggacatttcaccaacctgtgttcagcatggaccccgtgacaccagcctctgatattaggacattatttcttgatttccttattaaagaaaatgggtgctagtggtaatttgctttgtggcttagcaacctaatttgtgagtgatggtcaagttccaagtcttgtcatacacaggggttttgggtatcacagtgtggctcatgactttgttcccttgccacctcgcttaggacattcagagtcccctgagatgtcacttcctccagcataactgaagttggctgatgtgagccgattccgtgtgaggctattctctttttgttgtcccctcacttcctttttaatctatccatgtatacattttccttcttttgtccccttctttccattgatcattcatttagagttttgttaaagacaagcaatctgtgatctctcatctgaagacagcgtacagctctgtgatgcaaagaaaccctcagacgttctgtatagatccaccccttcctgagatgcacttggctctccctctccggtaccagctctatgtgggttcatgtgcacctggtttatgtgccgtgtgctggttcacaggcatctgttcgttttcatactcataaatgctctcagtaatgctggaacggtgcgagtgcgactagcaccatgtgtctaggagggcacccccccagcttcggctccacctccggtttgaccctttctggacagaggaaacaatacattttccaccccacacactgggattcttgaagtattaactgtgctaagagatcttggcacagcagtgggatcttgagtctcctgactaccaaatctcagttcacaccaagctcaatttcagaaatggctgcagttggtttccggtatgtttccttctactacaaatagggaagataagagcatagaggaggtgggtgccaggaagtgatgcccagaactgtgattgtggtagagtcacgtgtcccaactaccctcactgtacccaggggatgaaaccaagaagatgatgatgtgcaagaacctgaaagtgcatactgagttgagtattcaagctgctgttgtggtccttggtctccatgcagtgctggatacccaaccaagagtcatgtgtctaggccagttgctctaccacttagctattcccatccccgttaccttgcttttgtgaacacgccagtgcataggttctgagaggatctggcagggtttatttagagtgggcgagcatccattgtccaggctgagagcagcaacagccctttctacctgcccccgactaggagtgccaatgcacttaagctttgtctgcaaaaccctgattttaaaaaaaaaaaactctaaaatgaatgatgttcaaaaatgggttagttgccatggcaacctccaggaagagatacttgttacccttcattattttctagtacctttgaacagtctcacagtgcaggggccatttgaaggatgtgaatggcagccctaggctgtctctgctatgggggccacctttctacctccacacaagaccctgttgactcgggaggatctctgcaatggttgattaatagctgaggcaaagtatccaaatttgtgacaggggtttgtttgtgtgcaatccctctgtggaatccacccaattatgagggtagtggatgggtgcatgagaatcttggttaagccaaagccccttcatggaaatacaagccataaaattcaaaaggtgtcaaaagaccttggcttgtttgggggtttgttccccatctgtgagtagacttgacaagaaggatttaaacaggagtctgaagacctgctgttactaggaagctaagaaaggcattttacagacttgaagtagagaagcaggtcagctcctgatggcttagactgaagaccccttcattgccaaagttgttcccatgccacaaagcatctctccaactcccttttcaaggtaaattgaaggtgtgactaaaatacaagtacaactcgccctttcaaggaatgcagttctatgaaccttaccatgactggtcttctcaaccacaaccaagataagcatatcaccttgtcaattcctcttttcccaccccggatctagcagccagttcaatgttctgtccctataattttgcctttttctacaacaccatgtaaatggagtcacactgatacaaccttctggatcagccatgttgtgggtgtcagtagaaggtcccctttccctgctgagtgttctatcaaatgaatgggccctaggatttccttagttttaaaatgaggtttttatgccttggaagtcctagccccagatcttggcacagcagtgggatctgagtctcctgactaccaaatctcagttcacaccaagctcaatttcagaaatggctgcagttggtttccggtatgtttccttctactacaactagggaagataagagcatagaggaggtgggtgccaggaagtgatgcccagaactgtgattgtggtagagtcacgtgtcccaactaccctcactgtacccaggggatgaaaccaagaagatgatgatgtgcaagaacctgaaagtgcatactgagttgagtattcaagctgctgttgtggtccttggtctccatgcagtgctggatacccaaccaagagtcatgtgtctaggccagttgctctaccacttagctattcccatccccgttaccttgcttttgtgaacacgccagtgcataggttctgagaggatctggcagggtttatttagagtgggcgagcatccattgtccaggctgagagcagcaacagccctttctacctgcccccgactaggagtgccaatgcacttaaagcttgggttgggtagtgcggatgatgtttagactctttctgggtggtattagggatgtgagccctatgtgtttaaaggagagtttccaataggactgtgttggtggagtgtggaggccggaagccacactatggcaccggggcagaaaggaagaactgagactggccctcccctgcttcccagtctgtcccacatcctaagatcacaccccgggggactcctctgtgctcacctgttccttcctgcagcttcctcgacagacaggttcttggacccaggtaccgacattccaagggacaccagccaacctgggtgagggccgcactctgtatgtcttcccttccctggggaaagagatacccagaagcacccccttacaacctgagcacatgagcgaaccccatgaaagtggaattttctaacaaaataaacttgctcgttttgtctgttttctgtaacttttgctaaatactttatacatttttaatgttgaaaaaaaaaaagcagtgtctcctgccagaactcctcacccgggatgaatgtgtttacttctcgctgtatatctttccatgctgcggctgcctggaccagtaaataaaatggatgtaatataagttgtaagtaacattgtcaaaactcagatcccaatggaggctgcccgcctcccccaccccatgatagcatctctgtgtattaattctgaagaattaaatgtttaaattagaaaaaaaaaaaaaaaaaa

SEQ ID NO: 2492 - DNA, 2513 bp, Rattus norvegicus
  Genbank Accession No. AJ132008
tggcactatggtcatggcggaggggacggcagtgctgaggcggaacaggccaggcaccaaggcgcaggatttctataattggcctgatgaatcatttgatgaaatggacagtacacttgctgttcagcagtatattcaacagaacataagggcagactgctccaatattgacaaaattcttgaaccacctgaaggtcaagatgaaggtgtatggaagtatgaacatttaaggcaattctgccttgaactaaatggacttgctgtcaaacttcagagtgagtgccatcctgatacttgtactcagatgacagcaactgaacaatggatttttctttgtgcagctcataaaactccaaaagagtgtcctgccatagattatacaagacacacactggatggtgctgcatgtcttctgaatagcaataaatattttcccagcagggttagcataaaagaatcatctgtagcaaaactaggatcagtgtgccgtaggatttacagaatattctcacatgcctattttcatcaccggcagatatttgatgaatatgaaaatgaaacatttttatgtcaccggtttaccaaatttgtgatgaaatataatttgatgtcgaaggataacctgattgtaccaattttagaagaggaagttcagaattcagtttctggggaaagtgaagcatgaaggaatcatgtagaacaatgtactgatcacataattaacaattatgtactgtatatatatcattttagacacatcaatcatgtatccatattatagcttatttgtttagtataggtttttgtatgctatgtgttgcctttttaaatgggaaatacattttaagttattcatgagctgtatattcactggtgtggcactcatggtttttaaataagtttagtattatctgtttataatgcctgttaataaaagaatttacagtttggtataattgctgctaaacaatcattggatcacaatcctctcaaatctataaaggaatgaacttgtgtctcacacaagtatttacaattactaaagagaatattttgttttcacccctaagatttaatattttaggaaattcagtagtattccatctgtactgttaatttttccaaaatgagataaaagtgtttaagagttctgtttatagcttttgatatgcataactgattatgtgtgtgttcagagaaattcgaggaggtgttagtaataaattatctctctcttctacataaagtatcctttaggtcagtgtacatggaagcattacctttgctatggcagtgcattattaaatacatggtgaggaggaggaggcacatacatgatgttcccatggacacccacccgccccttgtttcccttagtcctctgggaagtatactagtcatgaaatttacttaccaagctatggttagtggtggcttttccctatttatactgtattaattgcttacagagcatacctcatactagcagtgacgttacactacagggaaactggactgcctacctttgttttttaaaatggttgtaactacttagaaaatagtccttaatatagtttgacttttcctgttagtaatattaatcttttcacctagccctaggcagcattaaatagatatgaaaaaaaagatagtgtatttattttattctccctccttaaaagcttattgttctaattatatgcacatgtaagactatttacaataattcacaggttaagtgctgttgataagtggtcatactttgatttcttatttcagtgtcttaagaatttaagtgcagacttagataacatgattggtggagtttctctttaaacactgaggtctctatgccacactgtagcaaggcactgagatgaaacagagacctgtgcagttgggacaattgaagccatcttttccaatttaataaacacaagaaacttcttttttatttaagagctatttgcaaatgaaattgaaaaatgcattcatcttgtttgtttttctaattatttgaagaaatgatttgtattgtattataagacaagtatacacagaaaaattgggaagtgagagcaaactgagagtgtgtgtatagttgacgcctgtctgaacctgtgctgtgccagcggtcacagtcatcactgtacctgagcccacagttatcttctgagaagttcatgtatgcagtgaatagaacattgactgaaattgggtgtttatattactgtcaccataaatcattggggttagtaattttaataaacttggtagatatgagagactaacctatactaagttcataaattatacatagcctagtaatgttgctgttctctagttggagtccccggtggagtcctgttgtttgacttgctcagtgagcagttaaggcaggtggagacctgactgagtacttggaacactttgtgaatatatggcttagtgttaacaggaaaataaagtgtggttttctttttatacttactccaaaaaaaaaaaaaaaaaaa

SEQ ID NO: 2493 - DNA, 1194 bp, Rattus norvegicus
  Genbank Accession No. AJ224120
agagagagagagagagagagagagagagagaacccacccacccggcgactaatctgatcccggctgtcccccgggaccagcgaggtcccagaagacccacgagggagcgggcgtaacgcgtggctgcgggtgggagccatggacgccttcatccgagtcgccaaccaaagccaaggtcgggaccgacttttcagagccactcaacacgcatgcatgttgcttagatatttgttagagtctaaggctggcaaagaggcggtggtaacgaagctcaagaatctggagactagtgtgagcactggccgtaaatggttcagactaggcaacgtgctccatgccatccaggccactgagcagagcatccaagccactgaccttgtgccccgcctatgcctaacattagccaacctgaaccgcgtggtttattacatctgtgacactgtcctctgggcgaagagtgtgggtctgacatctggaatcaacagagagaagtggcaaatgcgggcggcccgccactactactatttcctcttgctgagcctggtccgggatctgtatgaggtcttgctgcatatgggacaagttgcacgcgacagagcaaagagagagaagtcctccggggaccctcctaagtacagcgtcgctaatgaagaaagtgaatggctccagtccttcctcctcctcctcttccagtctctaaagcgaaatccgcccttattcctggacaccgtgaagaacttctgtgacatcctgatccctttgaaccagctcgggatctacaagtccaaccttggcgtggtaggatttggaggtctcgtgtcctctgtggctggcctcatcactgtggtgtatcctcagttgaaactgaaggcccgctagggtgtttggaaaatttaagactgacgttcagtggagcaaacatttgcttttgtcatgatgtctactgtacttaattttttttaatcatgtgagcatcttaccaaccggtgatgtgagcagaggtaggacccacaacggagcctgaagactgatgacgtttttgtaaacacggcagtaacttctgcacatttccccttcagtgacttctgactactgcaaaaacatttgtgccgtcattgaagacgtgtaaaggggaagtcagaacattgctgagcatcttttctgtacatagtaagagctcatatatctaacaaa

SEQ ID NO: 2494 - DNA, 2737 bp, Rattus norvegicus
  Genbank Accession No. AJ242649
ctgggacacagttgtccaggtgctgttggccagtcccaacatggaccataaggaaataatccttctgtttctcttgtttctgaaaccaggacaaggggactcactggatggctatgtaagcacacagggggcttcactgcatagcctcaccaagaagcagctagcggcaggaagcatagcagactgtttggccaaatgtgaaggggaaacagacttcatctgcaggtcattccagtaccacagcaaagagcagcagtgcgtgatcatggccgagaacagcaagacttcctccatcatccggatgagagatgtcatcttattcgaaaagagagtgtatctgtcagagtgtaagactggcatcggcaagggctacagaggaaccatgtccaagacaaagactggtgttacctgtcaaaagtggagtgacacgtccccccacgtacccaaatactcccccagcacacaccccagcgagggactagaggagaactactgtaggaacccagacaatgatgaacaagggccctggtgctacacaacagacccggaccagagatatgagtactgcaacatccccgaatgcgaagaggaatgcatgtactgcagtggagaaaagtacgagggcaaaatctccaagaccatgtctggactcgactgccagtcctgggattctcagagcccacatgctcacggatacatccctgccaaatttccaagcaagaacttgaagatgaattactgtcgcaaccctgacggggagccgcggccctggtgcttcaccacagaccccaacaaacgctgggaatactgtgacatcccccgctgcacaacacccccacccccaccgggcccaacctaccaatgtctgaaggggagaggtgaaaattaccgagggaccgtgtctgtcactgcgtctgggaaaacctgtcagcgctggagtgagcaaacacctcataggcacaacaggacgccagaaaacttcccctgcaaaaatctggaagagaactactgccggaacccagatggagaaactgctccctggtgctataccactgacagccagctgaggtgggagtactgtgagattccgtcctgcgggtcctcggtatcaccagaccagtcagattcctcagttcttccggagcaaacacctgtggtccaggagtgctaccagggcaatggaaagagctatcggggcacatcgtccactaccaacacagggaagaagtgccagtcctgggtatctatgactccacatagtcactcgaagaccccagcgaacttcccagatgctggcttggagatgaactactgcaggaacccagataatgaccagaggggcccttggtgcttcaccactgacccgagcgtcaggtgggaatactgcaacctgaagcggtgctcggagacaggagggggtgttgcggaatcagccatagtcccccaagttcccagtgcgccaggcacctctgagacagactgcatgtatgggaatggcaaagaatatcggggcaaaacggccgtcactgcagctggaaccccctgccaggaatgggctgcccaggagccccacagtcacagaatcttcaccccacagacaaacccacgggcaggtctggaaaagaattactgccgaaacccggatggggatgtcaatgggccctggtgctatacaatgaaccccagaaaactttacgactattgtaacattcccctttgtgcatcattatcgtcctttgaatgtgggaagcctcaggtggagccgaagaaatgccctgggagggtggtgggtggctgtgtggccaaccctcactcctggccctggcaaatcagccttagaacaagattttctggacagcacttctgtggcggtactttaatatccccagagtgggtgctgactgccgctcactgcttggagaaatcttcgagacctgaattctacaaggttatcctgggagcacacgaagaacgaatccttgggtcagatgttcagcaaatagcagtaaccaaactggtcttggaacccaacgacgctgacattgccctgctgaagctaagccgcccagccaccatcacagataatgtcatcccagcttgtctgccatctccaaattatgtggttgccgaccggacactgtgttacatcaccggctggggagaaacgaaagggactccaggtgccggccgtctcaaggaggcccagctgcccgtgatcgagaacaaggtgtgcaaccgcgctgagtatctaaacaacagagtcaaatccaccgagctctgtgccgggcatctggctggtggcatcgacagttgccagggcgacagtggaggacctctggtttgcttcgagaaggacaagtatattttacaaggagtcacttcttggggtcttggctgtgctcgccccaataagcctggtgtctatgttcgtgtttcccggtacgttaattggattgaaagggagatgaggaatgactaattgggtgggaggcagaacaaaactactaaatatggggaggggattagggcgcttgaaaaaaaacctgacagcaatcaaaccaaagacactacactggaccactacttcctgtcacccctcagctcctccctctttttgtattattgtgggtaaaattttcctgtccctggacttctggattttgtgacaatagaccatcacttctgtgacctttgttgaaaataaactcgatacttactttaaaaaaaaaaaaaaaaa

SEQ ID NO: 2495 - DNA, 495 bp, Rattus norvegicus
  Genbank Accession No. AW141322
cccgtgtccccatggatttcgggagactctcgcctatgttacaggagcacttggcacttgaaaaaactcttgtttttgttgtgggaaacacatgaccggggacaaggcaaatttcttgcttccggcgcacccttatcgtcaataggaggcgcccctccgcggcgccttgcgcgtcccggagacttctgggtagcggtttacccccgcccactgcgtcagcatcttcctttcgccgccggacgccgccgaggtcgcacgcgtgaggtctgtccaccgcaaccgacatgcgctacgttgcctcttatctgctggccgccctcgggggcaactccaatcccagcgccaaagacatcaagaaaatactagacagcgtgggcatcgaggcggacgatgaacgactcaacaaggtcatcagtgagctgaatggaaagaatattgaggatgtcatcgctcagggtgttggcaagctggccagtgtgcctgctggtggggctg

SEQ ID NO: 2496 - DNA, 545 bp, Rattus norvegicus
  Genbank Accession No. AW251642
tttttttttttttttgtccagaaaattttaacaggtttatttataattgttataaagttgaactgttgaaatgtgttcactgaaacattttgcttgcattaatgctttacatcttgcatttatattaaaaattcacacacaaatgaacgtggagaaactgccaatacctgattctgtcccctatgtttccactcgcaatcatatacttaggtacctttgacccccatggaaaaaatatctaacattcagaactactgataacaggaagaagaggaaaaaaaaaaatttttttttgagaatgaaatgtttcccctcatagtggactcttaagcacgttctccgcgtatgcggcgtgctagctggatgtcttttggcataattgttacacgtttggcatggatagcacacaggttggtatcttcaaaaaggccaaccagataggcctcacttgcctcctgcaaagcaccaatcgctgcactctggaagcgcaggtctgttttgaagtcctgagcaatttctcgcaccatacgctgaaaggggagctt

SEQ ID NO: 2497 - DNA, 667 bp, Rattus norvegicus
  Genbank Accession No. AW914080
ctaacgggaacaaaagctggagctccaccgcggtggcggccgctctagaactagtggatcccccgggctgcaggaattcggcacgagccgcactggacatggctggcaaggcacacaggctgagtgctgaggaacgggaccagctgctgccaaacctgcgggctgtggggtggaatgaactggaaggccgagatgccatcttcaaacagttccattttaaagacttcaacagggcttttggcttcatgacaagagtcgccctgcaggctgaaaagctggaccaccatcccgagtggtttaacgtgtacaacaaggtccatatcaccttgagcacccacgaatgtgccggtctttctgaacgggatataaacctggccagcttcatcgaacaagttgccgtgtctatgacatagatctaccctgcctcctatttccttaggggaaaggagaaggagtgactggaggaggaacccagggagggaaccaaggaggctggcccttgctccctgactcttgcggagaccaccatctccgtcagggaggggtatgagtccctccctgtgcagaacgatgcccatgttcctggtgccagcctcctcactggggctctgccatgttataatttgaataagctctcccattttctatagagtccctacctcagttg

SEQ ID NO: 2498 - DNA, 544 bp, Rattus norvegicus
  Genbank Accession No. AW916210
ggttgaggcaaagtcttcggtgtcccccgccggtctgggcttcggtgtggcgtgtaggttcgagctgagcagacggaggctgtgcttgaccatcggtgatcaaaactccctctgccccctgcccagacgctctaacatgccctctgtccatttccctctccccaaggccatgggttataaaggccctatgtaggatggggagccagaggccctaagacatgaagcacaccccagatcactgtctctagcctttctgggcactgaatccatcctgacccaccacacaccccccggccagttggcaagaaagaggtggctcttgggggcttttatgcccttcattagctgatgttggattttatatgcatttttatattgtctctaagtgtcagaactataatttattcatttctctgtgtgtgtgtgtgccaagaaacgcaggctctgggcctgcctccttgcccaggaggccttgccagcctgtgtgcttgtgagaacacattgtacctgagctgacaggtaccaataaagacactctattttt

SEQ ID NO: 2499 - DNA, 620 bp, Rattus norvegicus
  Genbank Accession No. AW917404
ggacagcataagctctgtcctcctgtcctcctgtcatcctgtcctcctgtccttccatcatgaagaagaatagagaggctcagctgtgccttttttcagctcttcttgccttcctgccctttgcttccttgctcaatggaaactcgaagtatatggtgctggtcccttcccagctctacaccgagacccctgagaaaatctgcctgcatctataccatctgaatgagacagtgactgtgacagcttccttgatatctcaaaggggaacgagaaaactgttcgatgagcttgtggttgacaaggacttgttccactgtctttccttcactatccctagattgccctcttctgaagaggaggagtcactcgacatcaacattgaaggggcaaagcataaattcagcgaaaggcgtgtggtgcttgtgaagaacaaagaaagtgttgtctttgtccagactgataagcccgtgtacaagccaggacagtcagttaaatttcgggttgtctctatggataaaaatctacaccccctgaatgagttgtttcctctggcttacatttaggatccgaaaatgaaccgaattatgcagtggcaggacattaagacagagaatgggctt

SEQ ID NO: 2500 - DNA, 554 bp, Rattus norvegicus
  Genbank Accession No. AW917737
gggccccaacaacgtgcaacttaccagacttggtggttctccattcttcctgacttcagcctggatctccatgaaggtcttcccctccattctgagctacaccgggatcctcacacaacccaggtggatcctgccagtcatttgacctttaaccttcacttatccaagaaagaaagagaagccaaagacagcctcactctgcctttccagttcagctctgaaaaacagcaagctctgctgcatccagtgccaggccagaccactggccgcatcttctacgagccagatgcttttgatgatgtggaccaagaagacccagatgacgacctagatatttgacagacatataggagaggaaggctgtgggctcagaaccatcctgctgttagcagactctgcctttgttgctttgtctggagaggctgtgtcttgtgagccaaggagaagcatcaagctggggcagaaagggtggtgagagtgtagtatatgcccagagaataagaaatcccctcctcccgtgcccatttctaataaaatatatgtgtgtgttactc

SEQ ID NO: 2501 - DNA, 565 bp, Rattus norvegicus
  Genbank Accession No. AW919998
ggcaggtgcgactgctttagccctgcctgggctccacggctgcctggagggtctctgcagtgcccaccccttctcctccgggaccccacgccagcagcgaccctgagccagcagccggagcgaccggcaatggcggcctcgacggcctcgcaccggcccatcaagggaatcctgaagaacaagacctctacgacttcctcggtggtggcctcggccgaacagccccgccggaccgtcgaagaggagctgagtaaaaagtctcagaagtgggatgaaatgaacatcctggcaacatatcatccagctgacaaagactacggcttgatgaagatagacgagccagacactccataccacaatatgataggtgatgatgaagatgtctgtagtgattcagaaggcaatgaagtcatgactccagagatcttagcgaaaaagttagctgctgctgagggctccgagccaaagtttcggactcgggaacaagaaagcagtggagaggaagacaatgacctctcccctgaagagcgagaaaagaagcggcagtttgaaatgaaaaggaagc

SEQ ID NO: 2502 - DNA, 1596 bp, Rattus norvegicus
  Genbank Accession No. AY032729
gggactgggacgaggagcggacctcagcctcgcaccccagcctgcgcctgccatcggaccggcctcctcgctcccggtccatccaccatgcacttgctgtgcttcttgtctctggcgtgttccttgctcgccgctgcgctgatccccggtccgcgcgaggcgcccgccaccgtcgccgccttcgagtcgggactgggcttctcggaagcagagccggacgggggcgaggtcaagggtttcgaaggcaaagacctggaggagcagttgcggtctgtgtccagtgtagatgagctcatgtctgtcctgtacccagactactggaaaatgtacaagtgccagctaaggaaaggcggctggcagcagccctccctcaacatgaggacaggggacactgtaaaacttgctgctgcacattacaacactgagatcctgaaaagtattgataatgagtggagaaagactcaatgcatgccacgtgaggtgtgtatagatgtggggaaggagtttggagcagccacaaacaccttctttaaacctccatgtgtgtccgtctacagatgtgggggttgctgcaacagtgaagggctgcaatgcatgaacaccagcacaggttacctcagcaagacgttgtttgaaattacagtgcctctctctcaaggccccaaaccagtcacaatcagttttgccaatcacacttcctgccggtgcatgtctaaactggatgtttacagacaagttcattcaattattagacgttctctgccagcaacattaccacagtgtcaggcagctaacaagacttgtccagcaaactacgtgtggaataactacatgtgtcaatgcctggctcagcaggattttatcttttattcaaatgttgaggatgactcatccaatggattccatgatgtctgtggacccaacaaggagttggatgaagacacctgccagtgtgtctgcaagggggggcttcgaccatccagctgtggaccccacaaagagctagatagagactcatgccagtgtgtctgtaaaaacaaacttttccttaattcatgtggagccaacagggaatttgatgagaacacatgccagtgtgtctgcaagagaacatgtccaagaaatcaacccctgaatcctggaaaatgtgcctgtgaatgtacagaaaacacacagaagtgcttcctaaaagggaagaaattccaccatcaaacatgcagctgttacagacgaccatgtacaaatcgactgaagcattgtgatccgggactgtcatttagtgaagaggtgtgtcgctgtgtcccatcatattggaaaagaccacatctgaactaagatcataccagtttttcagtccatcattttgctgccttgaaaaactgttgccacattagaactgtcaatgcacagaaagactctgtgggaccatggtaacagggtccaagtctctgtctcctgaaccatgtggattactgtgggaatggactggcattcatgtgcataaagccttttaagagactggttttctgccagtgaccagacagctgaggtttttctcttgtgattttgaaaaaaaaaaaaaaaaaaaaaaaaaaa

SEQ ID NO: 2503 - DNA, 618 bp, Rattus norvegicus
  Genbank Accession No. BF282149
ggtgaataaactaacagctttattaatgaaggcaaacatcagataattgtatgaatattatatataaaagagaaattcataccaataacattgtatttcaaaagtactgtacttcagtttcttttaaagagacttgtcatcagttgtaaaaaaacaaacaaaatgggtattcttctcctaaaaagttctggaaaacaaaataatcactttcaagcagatgaagtgaacacacctgtctgtaaatgcagactctcgctaaggtgcgaatgaagccaagcatcatagagatgcaggacaacctcacaaaagccagagagaagggatgtagcaaagattactcaaaggtcattcaaaactggtctctcatagaagtataaaacaatacagagagagggaactatgaaaccacacccatctgaaatccttcatgatgcttctggaatagttctgattctcttacaagaaggacaaagttaaggtttgggaattgggaaggaatgaagatgtctcatttaagtgtacaagtaaggcacaagattaagccacacccgaatctcgcatgaaagacgtggaaaggacaagaaccatacgtggtacagcacagcaggcaaccacact

SEQ ID NO: 2504 - DNA, 563 bp, Rattus norvegicus
  Genbank Accession No. BF283018
agaaatttaacacataaatatattttctaccacatgcttcctcattcctttaaagttcccctcgcctctatcgagcagcttctttgagactgttaggtcctgggttttgaagactgtgctgacaagactgagcccatccttgaggggttgctttcacctccaggatgctctgggcttcttgggctgactcaagacttcataggcagcctggatctctaggaagtgcctctgggcctcctccgtctggtgccggttgtggtctgggtgccagaccttcaccaggtctcggtaactccgatgtatttcttcattggtggctccttctggaatgcccagaacctggtgagccagctgacgtttctcatcctgaaaactgtcaacaaattcatagagcttttcccattcctggaactggctgctattgaagccaggagccccaaccagtagccaccagatccggcaaggcagaagcaagacagactccacgagacgaccgagaagtgggaaaaagttgaaccaactcaagaaagaaccaagggtttctgctgcgtaattaatggtgg

SEQ ID NO: 2505 - DNA, 593 bp, Rattus norvegicus
  Genbank Accession No. BF283075
gttgaagcagggtttctttagctaaccttaaatcctacatagacaggctgacctaaaaattacaatgatcctcctgcctctgcctcccaagtgctgagattaaaggcctgtgctaccatgccggctttattttttattacgatcattagtactcctcctcctcctttgtgggcatatgcacaaaagtatgagtgtaccacagaagccaaagacaccagtcccacccccatatggagctaaagcaagttgtgagctacccacctgggcactagaaattaaaactggctcttctgtccgtatgagcagcaccactctaaaccactgagccatctctccagttccttcccaccatgtttgaaaagcactgctcttggccaatagctcacaaccatttttggctatctgtgataacctctttggcccaagataacctacttcataacgaagcagagaatgaccatgagctactgattctcttattttcagcccccaagtgtcaggggcgagacatgcgcattttctagaggcagttatgccggggtactactgccacctactgggcagaggccaaggcaaggatgctgtgaagcacc

SEQ ID NO: 2506 - DNA, 702 bp, Rattus norvegicus
  Genbank Accession No. BF283130
aaatggaaggtacacatttattaccagagaagagaaaacacacacaaagcctggatcctttctcctcatgcactagttttctatgcagtccaaaaccaactgggaagctatttacaaggacaaacttcctaacatggtcctggactgtggggtgggctgcttcttatagaagccatatactgcaaactaaatatattcttaagagtttacaagaagctttagagcaactgtatcaacagagaagactttttagtgcaaaatattataaaagtgatacaactgtgtgcctcttaagtgtttaattatctgatttgaacaaggaaatgagcaaaaaataagtggtggagaccggcctggctttatgactttttatactcaattcgttctacttttacgtcatctccaattagctgatagacgtaagtgaccacggtagaagcctggatgtccatcagcacaaatgacggaataatatttgtttccaaggcattataggctccagtggcagaacctgggttaatatagaatttattttcatgctcaaatgcttcgaatttgtgtgtgtgtcctgagataagaatgtccacatcaaactgcctctgcagcagggctaagctagccatgtctccccacggaataacttggtggccatggatcagaccgatcttgaactgccccacagtcacaaccttctgttctggg

SEQ ID NO: 2507 - DNA, 571 bp, Rattus norvegicus
  Genbank Accession No. BF283631
attttcacagtttattcaaaagttgaatagttaaaatgtgaacatttccccccaaaacgaaccatcccccaccacgcggactaccactattcaactacttctcccatgctcaccacacactctgcaaacacagggatcaggacctcaactgctcatgaacacagagagcacagagccacgcacaggcacctctatctccttcgcattagcaggttctgaatggaggattaaggagcgaacatcaatcacccttaacccagagttaagacttccctaacattcctttttcttcatctaagacatgaaaactcaaagcagttttgcttacaattttaagtcttatattctgttctctgaatggctgagctgggaccaaactgaccttcacaatctcaggactagcagagagccgatcccagttgtagcttggccaatgacactgcaagttaccacacaggtgcaaataatgctttaacagttaccgacacttaaaaccaaactctagtaatgcattaatatggaacctccacatttttctgacacagcaaaagtctcctaaaggtggcagcag

SEQ ID NO: 2508 - DNA, 590 bp, Rattus norvegicus
  Genbank Accession No. BF284430
agttaatttcaaaaaaagttctttattggcataaaaatgaaagtgttgtaaataaattggcaccaaatatcccaaacacgagggtcaaagcctatttacccctctttgctgtttttcccccttctgcccactttcctgggtgttgggggagctcgctgacaacagtcacaaatccagcgacctgatggaatagcaccaaggcccacacaaaaagtatgataacctctgtcacacacatcacagaacatcatttcttcttcatggtggggctgtccacatataatgcatgtcttacattccatacactgccatgggtaggtcttaatcatagaaacaagctccatggtcatatccaagcaagaagggtggccactgttatcacactgggagcagtatataagtgattcagcctttcctttcttgttggactccttacccttcagacaaattccacatagagcatttggaatgacctttggcttgtacccaggaactgatttggacagtacagaaacgttggagccgacttttcttggcgtggccattttgtctttggattactgtcttccctggaaggtgtcctcctggct

SEQ ID NO: 2509 - DNA, 691 bp, Rattus norvegicus
  Genbank Accession No. BF284897
accttctaatcaaatttagtttatttctaatttgtaccaaaaaatattccaggtacctcttcagatagatcactttcaaaatatatttatagaccctttgccagtgctgtcatcccaaaagctgccagaactctggaagtcccgtggtccagccctcagcccaggaatataggtagagtctccatgatgggtggtaagagagcagtacctgggctgtgctggctccttctttcctcataggtaaggtatgacattaaaggacaataaatacgtgttgaatattagcaaaaaaagattacaagtcctatgctttgttgccgtggctctttgaagttcatctacctcactggcagctggaagacagttctgctgcttcgttctcagctcttggccttctgggctgtgtccacactaaaccctatggctatactgtcttgatttttcaagaattcacttaagaggaagaaagcagaaaccttagctgcaagtacattccccaatttaaattgtggtagattagtgataacatgaaaaactgagggatgatggtggtacagtcacatctccaggggccaagacatcttgcttgtgaactcagtgagtcacaggaggaaaagcaacttgattttctcttccgcattaaatagtggcccccagtaattgaaatgtgattattttcctaaaattactt

SEQ ID NO: 2510 - DNA, 546 bp, Rattus norvegicus
  Genbank Accession No. BF285349
agcgtacagtgtttattttacactgggaggatcacctctgtacaatagaaagcacggtctgtgcctggccctagggtgggtgggcactaaaaagaaacctgggtcagctggagagcagacagatgcagagctcaaagaggtgggacatccggcttgatgaaggagtcttgggagtagagaagcaaagaaacttatctgtgtgaaataaaaggtgaaagagaaaaagtggagcaatggaaaagggaaaaaggaagaaaaccaaacagatgattgcagtgtttgacatgcaagccagtaggaagccatgtgaaacccactgccagctgcacctgggggaggccttcctcagcaactactgcctggactcaaggctgacatgggccagccttcaggaagagacagaaacataaaaacaaagttcgagctaaatcctccttttggggcattttgtcattctaaagagttccccctggggagtacgccatttgattgatccggaggactgtgactatagataagctgattctactcttcctttattaactg

SEQ ID NO: 2511 - DNA, 552 bp, Rattus norvegicus
  Genbank Accession No. BF286287
cgggctaatctatagacccatagatgaaatactgctaatatgagtaaccaagaaccaattctcctagcaccaagtgtatgaccaacccggataacccattgtcaattatcgaatcataggtactaacccaacaataaaattaccctatccctaactcgttagcccaaccacaggcgtgctttaaggaaagattaaaaaaagtaaaaggaactcggcaaaccacgaacccccgcctgtttacccaaaaaccatcacctctagcataaccaagtattagaggcattgcctgccccagtgacctaaagttaaaccgccgcggtatcctgaccgtgccaaaggtagcataatcaccttgttccttaattagggacctagaatgaatggctaaacgagggttcaactgtctcttactttcaatcagtgaaattgaccttccagtgaagaagctggaatctcccaataagacgagaagaccctatggagcttcaatttactagttcaacttatataaaaaccaacctaatgggctaaaaccaaaataaatatgaacct

SEQ ID NO: 2512 - DNA, 643 bp, Rattus norvegicus
  Genbank Accession No. BF289183
ggtgttgtaaaatcaaagcactactttattaaatgagttattttacacaatatgaacatcaatataattacaattgtaaaaaaattttataacaagaatggactgatttttcagatttccacatcagagtcaactgtacatttacacagaattgtctttgcatgaagcccaaagggaacagcataaaaatgagtgtttctgtagcccctttattttttgctgatcaacagtttgtttaaaaaagcagctgcaggtttgttacctaatgtctgagacagtagaagagtccaaggtgtcatgaattcacctgtaaacaactttatgcctgaacatcagccaattctggaggaagtggagtcttagggtgcttgctctcaaagtgctgcttgaaggtcttggggtcaggcatttgtgtcctacagactgtgcaggtatatattaaggcagctttggcagcagccttttggtcatgtccttgtttcttcttttgtccagcctgctttttggcatttttctgctgagactgaatcttctgctgtccacgagccatatccgggccgggacggagtggcgtccgagagacggcgcagcgcgagaagagctgagcaggacgagcagggaaggaagggtcgagccccgcacc

SEQ ID NO: 2513 - DNA, 632 bp, Rattus norvegicus
  Genbank Accession No. BF394161
  misc_feature (1)..(632): n = a or c or g or t
tttttttttttttttgtatttcaatatattttattaatatattttatatattaaatatatatatttccagctataggagaaatgactgagcacttaagagcatgaactgtttttccagaggactgactggagtttggtttctgacacccaaatcaggtggccgacaacctcttgtaactctagctccaaggaccccacccccacccccatttgtggttgccatggtcatctgtatatgtggcccatacacaaatacctaagtaaaactaaaatttaaaaagattatttctctgtgggtgcatgtgcatttgcacacatgcacatgcaaatatgtgtggctgccaggggaaaccagaagttcacaagtgctctcaactgctaaaccatctctctgtccccacttaggagactttacacgtctggtatttctgggatagtttcagaactaaaacattctcttcagattttaagcacagggttgggagtgtggaccagcagttgaatattcagtttgtatgaagtctggatttgatttccaggaccacaaaacagacaaatggaggacaggtacaaagtagtagcttctaggaaactcaggctgtctccaggatgntacagtgaacctcgtgccg

SEQ ID NO: 2514 - DNA, 532 bp, Rattus norvegicus
  Genbank Accession No. BF522916
cacgaggtcttctctgagtattacacaccaagtactacctaatcatgagttcccaccagcagaagcagccttgcactgtaccccctcagctgcaccagcagcaggtgaaacagccttgccagccaccaccccaggaaccttgtgctcccaaaactaaggagccctgtcaccctattcctgagccctgcaaccccaaggtgccagagccctgccagcctaaggtgccagagccttgtcaacctaaggtgccagagccttgccagcctaaggtgccagagccttgccagcctaaggtgccagagccttgccagcctaaggtgccagagccctgccagcctaaggtgccagagccctgccatcccaaggcacctgagccctgccaccctgttgttcccgagccctgccagcctgttgctcctgagccctgccagcctgttgttcctgagccctgccccccaactgtcactccatcaccataccagcagaagacaaagcagaagtaatattgtccatagccaagcctgaagatctg

SEQ ID NO: 2515 - DNA, 399 bp, Rattus norvegicus
  Genbank Accession No. BF563744
  misc_feature (1)..(399): n = a or c or g or t
cacgagggtgggcattgttcgctgtgctcacctggctgcaatggatgttaacggctactctgacccttatgtgaagacgtacttgagaccagacgtggataagaaatccaagcataagacgtgtgtaaagaagaagacgctgaacccggaatttaatgaggaattcttttatgagatggaactctccactctggctaccaagaccctggnaagtcacagtctgggactacgacattggcaaatccaatgacttcataggtggtgtgtctctggggccaggagcccggggagaggcccagaaacactggagagactgtctacatcagccggacacagcagtggagcgctggcataccctgaccagcgagctgcccccagcagcaggggcgttgccgttgg

SEQ ID NO: 2516 - DNA, 474 bp, Rattus norvegicus
  Genbank Accession No. BG371593
ttttttttttttttttttaaagctttaaagagctcgttatagtacagtgcagtggttacaagttaaagacacaacacggtgctgcagagtctgtctctcacgaaccctgtgcaggaccctgagcactgttctttgaagccagcgactttgggctaccacccacgttcagtgccttctcactggacagcaagcctactcaaataagcttcccaggcagcttttctgtacatctcagctgcttccaggcggtttgctgctgcgagtattccccggcccacaatgatgacatcagaacctcgtttaccaaccacttcttggggactattgtactgctggccaaggtgatcccctcctgtctctaactgaactcctggggtcaagtgaagaaactccggtttcatgcttactcgggagccagaaataaagccaatgacaaattcacagtgctcctcggccatcccaactgctgctttg

SEQ ID NO: 2517 - DNA, 531 bp, Rattus norvegicus
  Genbank Accession No. BG374322
ttttttttttttttttgtgccactgcttcctctctagccgtgagactccagctacttcactatgcgacttctcaccctctccggtttgttcttcatgctgttcctctgtctctgcgttctctcctcagaagggagaaagcgtcctgccaagttcccgaaactcaggccctgctgtcatctatctcctagatccaaaccaataacctggaaaggaaaccacacaagaccctgcagaccatgcagaaagctagaatccaattcatgggtggtgcctggggctctcccacagatatagggcctcccgaagctggcctccaccgagatgaaacgttgatgtccagttatggagacaaccttgtggcccctaccaaccttcatggccagaaagctgtgacaccagaatgtttcacttcagacagctggaaggattacagaattccaagccctcattccataggtgcaaccaaccttcagagtcactatgatccagggtcagcccacaagtcttcatggctcctgcagagtaaaagt

SEQ ID NO: 2518 - DNA, 544 bp, Rattus norvegicus
  Genbank Accession No. BG375811
ttttttttttttttttttccagactcgcagaagcttttttagtttattttaccctcagaaatttgcatatcacagcagaacatcaagtcaccgtagaactactcctttggctgtatccagtctccactcactgctagatatttcatttcttctttttgccagcaccaacattggcctttgcagtccccctgaccttcttcattctgttctttcgttcttttcgctgtttgcgggaggtctttttcttctcataaaggccatgtctcgcaagtctgtgtttaggctcattcttctttgcataatctaaagaatcatagatcatgccaaagccagttgtcttgcctccaccaaagtgggttctgaatccaaatacaaagatgacatctggtgtggttttgtacatcttggccagcttttcccgaatttctgtctttggtactgtggccttcccaggatgaaggacatcaatgaccatctgtttcctctgaagcagacagtttgtcatgaacttcctggtccggatggttaccgtgtcattcatgat

SEQ ID NO: 2519 - DNA, 677 bp, Rattus norvegicus
  Genbank Accession No. BG378096
ttttttttttttttttgtaatgtaaaaccatttaattctaaatcaaatcactttcacaacagtgaaaatcaatggctggtcaaggtatgctgccttctgtgttcccattttctgactgtccttgtccatgggggaggcggaaaggtggagctgaggacacagagagcccagaagggaaagctgcctgggccatgaggtgagtggtgagcctgtggaggaacggcccatggcatccaagctgctctcttgcctcagctgctggcagatgtacagccctgcaatgctcacaaagggcacaggccgccacagctgtgctactgcatgccttgggatgactgctggtgcacgcctgggttggccatttcaccagcttacaaatggtttactccactactcacaacttttctctcttttgtgttcattggcttacgttttccctctactacttagggccacactacacagaaggatcctaccaactctctctagaacagagacactccagggccctctgacaggatttccaagcgacaaagaatatttaaaatctgtcaggcacaccatgaagttggtggcttattcttaccagctacagttgccaaaccaccctcctacacaatacttcatactgtgctcatttcaacactaacactggcatcggcaggtgaggactgtgc

SEQ ID NO: 2520 - DNA, 596 bp, Rattus norvegicus
  Genbank Accession No. BG378740
  misc_feature (1)..(596): n = a or c or g or t
ttttttttttttttttttaagagcaataatctttattgagtttttttaaaaaaagacaaaataatattaaaactcaactgtcacaagtaaacaaaacagtgacttaggttagacaacgttataatgtacgcccaaaccatgtttgggtgtaataccccatgatacagtacagtgtttggacccattcccactcaggagcaatgagaactggacactgtagatgtcagcactgaacacagaaccgttatggagtctacggccgagcctctgctcttcgcacctattggtgtctcctttaacgtcgtagtgcacatctgcgtttgctaacggagtccagaggtccaactccaggttagccagtttccactgatcaggatttctatagcttctgctgggacacggtccttcagaatgaacctacctcactttccacttctaactctatggcctcctcctttcctcctctctccagggcacagctctctcaccttcaaatgctgctcacacagtgctgaacgtgaggcggtaacttctgacaaagttgcagtttattacccaaaccacgacaaaacagaaacattttctttanaaatctc

SEQ ID NO: 2521 - DNA, 612 bp, Rattus norvegicus
  Genbank Accession No. BG381710
ttttttttttttttttttgaaatttgaagtctttattgaaccaattgcatgttaggttacaaagctatttcacttttccaaaatgctgtttctctttgtagaccaatctggccacaaaaggctacctggctaagtattagccagaaacttctaaatcccagtgtgatcttcttgtggcatttttccaacaaataatgcagaccaaatcacaagatggccacctcactggtcacatggtccttaggttaatgagcagaggctgacaggctgtctcctcactcttccaagaaccgcccccaagtgcacacaggccctgcttcgtctcctcatcggcccatcttctggtctccttcctcaccacaatcttcacctgaacagcagtcaaaaggcgcggtcggtaggccgcggaattatcactgcgcatgcgaccattagggtccgtgcttctactgccgaaatggagaatcccggttccttagcagcaggctccgtatcccgcggccactgaggaaccatccggggatgcagaccgagtacggtgggctggagaactgggagaatggggggcggggggcaagactggaaagaaataaaggcgccatatcaaaaaaa

SEQ ID NO: 2522 - DNA, 745 bp, Rattus norvegicus
  Genbank Accession No. BG665124
  misc_feature (1)..(745): n = a or c or g or t
caagattttattaaacgtctttacaagacaacatccagcctccagatgcagctgccaagaccctgttatgctgtaggcactggctgaggcatggcgggtggctctggcttcccacccttctgttctgagatgggggtggtgggcaagatttcatctttaggttccacaatgctcacatgatcaggcagaggcttcttgggaccaatcttaccacttgggtcccagggcagcatgatcttcactttgatgcccagcacgccctgtctgaggagcacatggcgcacagcagtgtcaacatagtagttaacagggtctccgctgtgaatcatcagaccatccacaaacttcatggacttggccctctgtcctcggagcttcccagagaccacaacctcacagaccttgggcccactttccataatgaaccgaagcacaccatatcaggcccttcgaactgcaagccctcctaagagtttgtagcgtagagactctgcctgtgcaatggcacacagacctcttgtggccactntttctgcatacagctctacgctgccttcaggagagccaaaccgcttctggacaactgcagtcagctctctgatgcgacgacccttctcctcagaacattctgtgttctgtggctaaaatatgatttctgttctggtcggcgaactccgacttcacttcagagtagncatctcagccagctcccgagtgagaactcatcagttcagctttgagatgn

SEQ ID NO: 2523 - DNA, 771 bp, Rattus norvegicus
  Genbank Accession No. BG668376
  misc_feature (1)..(771): n = a or c or g or t
taactaacgggccccgcgcccataaactaaaacatttaactcaaaaagtattggagaaagaaatttacttaccaggagctatagagaaagtaccgcaagggaatggtgaaagactaatttaaagtaaaaataagcaaagattaaaccttgtaccttttgcataatgaatgggctagaaaatccttaacacaaagaatttaagctaagaaccccgaaaccaaacgagctacctataaacaatttcatgaatcaacccgtctatgtagcanaatagtgtgaagatttttaggtagaggtgaaaagcctatcgagcttggtgatagctggttgcccaaaaaagaatttcagttcaactttaagcttaccatcagaacaacanatcanaatgtaaacttaaaatataaccaaaagagggacagctctttaggaaaaggaaaaaanttatatagtgaataaacaactacaaccacttaaccattgtaggcttaaaagcagccatcaataaagaaaagcgtcaagctcaacatacatacttacacacactaattgcaccaacctcaataaatcgctatattaccaaattgggctaatctatagacccatagatgaaatactgttaatatgaggaacangaaccaattcttctaccacaggtgtatgacaacccggataccattgtcattatcggatctaggactaacccacatanantacctatcctaactcgttacccacacaaggcgggcttaaggaagatagnaaaaaaaaaaa

SEQ ID NO: 2524 - DNA, 745 bp, Rattus norvegicus
  Genbank Accession No. BG671986
  misc_feature (1)..(745): n = a or c or g or t
tttttttttttttttttggtcttttttttttccttttgtctttctatcttgctttttttctatcttctagttttcttcctacctgtgtgtttaaataccttttctgtcttctaatgattcttcggtcttctattttcctatcttctctacagcttttcttcaccttcctgaacttgtcttcatttttccacttccattttctaatcttctttctcaaaatactaaccctaccacttccattccccgtttccaactcatgccttcgtacatgcgacagtcgactcttataacggcccttcaacttacttttttcaatctttttaaactacatctcattttcaaactattatctacaactttacaattttaaaaagccatttagattctgtttaggtaaccttcgtttaaaagtacacctaacaaggctgaccctcaagctagaacctttgaaactccacaattgctcccttttacaatcttctaaactactctgaataaacgcctcaggtcagcctccatctggtggtacaaaaatttttctcttttcctttttcaaattgtttaaataaacctccatacttttcttttaaaatcttaatattaaaatattattatctcagtaagctactctattaagttttagggcaatgtttaagggatttacacccgtttatggatgtttggaagttacgcttgcacttnctagtagggtcatggcccagagtgggagtagtcgcccagcctg

SEQ ID NO: 2525 - DNA, 727 bp, Rattus norvegicus
  Genbank Accession No. BI275917
ttttttttttttttttttacattcataagcacaaagtttattccaaataaatcgttctataattactgaaagatgttgtatggcttggccatgtatctcataaagcctctaaaacatcagtgtacaaagctatacaaataaattaaaatctagactgatacagtctgtaaaatttctttcagagcaccatatttataaatcatgtatgctttttaagcgggtaaaagaaaggatgctttagggcttctttgagagtgattcttttggctggatcatactccaacattttcccaatgaggtcaaagagaagctcatgctcggcatcctgagacagcataaactccttcagaggcttacagcgccgagaaacatatctgccagcagaactgtgctcatcccaatccaatcgatcgtgatggaagtatgtgcgtttcctggttttctcaatcatgtgctttggcagtggtccaagaatcctttccatcattgctaaatgttccctgctatcatgagtcggaaaaactgtaaatccaagataatactcgataagaatacatcctatactccagacatcacatggttgtgaccaccctagggctagaatgacttctggtgctctgtaatgtcttgtagatacaatgtgctgtgatgttcgtcatcatatgttgcactcccaaagtcaccactttaatatcgggatttactatagtgcgttcatcacgtttca

SEQ ID NO: 2526 - DNA, 530 bp, Rattus norvegicus
  Genbank Accession No. BI276778
gcggccgctccaacatcagaatgcccagtcagggttgctaggcttaaggttcccagagcctgagctaggtctggagcttcctgcaccccaggttccagtgtcatcagaccccgttgtcccagagccccaatttccatcacttccagatccggagctcccaggacgccaatacccagacccaccatgtccaggggtcatggggttttctatcttcgaccctggtccacgtgttgcagagtctcctcgcgaatctcctggtaaatctcctcgcgaagccccatccttcccgggcctctccagctccattctcatctgcctcatttctgttaatgccttccactctgggggcccctcctgaagctggctcttaaaacttccgggaaccaagtcgggaactggagacatttttattgctggcaagtactgcctgtcttttgccggaagcaactctttagcaatgacctgttcaagttgcttttgctgaccttcgtagtcctttagatttatctcacggcttacagacctgctgc

SEQ ID NO: 2527 - DNA, 773 bp, Rattus norvegicus
  Genbank Accession No. BI277603
  misc_feature (1)..(773): n = a or c or g or t
ttttttttttttttttttccacagcgaagttttgtttatttgtttgttttcttttgtggaggaagttgcaagggtggagggcagatatggagggacgaagaagatggaggcagaagatgaatgggactgggggtcatgatgtgaaattcatgaagaatcaataagaagaagaaaaaaaaagatcagcatgccatgtattttttaattgctactataatagttgcatagttcacttgtgctcagcctcatcagatccaacaggatgagaagctcatcccacacactcaactacctcaaccttttcctggggtgaggggtcaaaagcaagagctacacagagcatgctctctgaggaaggtaagagaaacaccagctgttcagacatccgcacgtgacaggtgcctttgattccgtgtccgtttagtaaccttgtgaggtaaatacagcgtccctgctttatacatgaaagagtaactgtgaccccaggcactaaaggacatcccagggatgggatgtgaactctggccgcttgctattacctctgccttctactgatacttgctgcctgtgaacctcaaactgctaagacatggaagagaagttgggaatcacaacagacatcttaaaggtgagcctgcagccaagtccacagatgcgctcagagggaggtgggggacacccagggacaggagccgcttcgcatcacctgngtccaggtctcttcctggtctggngctgatgcacgctgggtctcatcgtcttcctctcgtgta

SEQ ID NO: 2528 - DNA, 679 bp, Rattus norvegicus
  Genbank Accession No. BI277609
  misc_feature (1)..(679): n = a or c or g or t
ttttttttttttttttttaaaattagaaacaatatttattgtttcctgttaaaactgagtgctctcatgggggaagaatgtgcaaaaagagccttcctacattgtggctttcacacttatcccaggaggctggggctgtcttcactgtgtaggagggaaaattctccaccttctccagggggtttagacaattgtcattttattattagtatttcttgtgtaaaaatatcaaaaaccagtggataacaggtgggctaaccttaggtattgtctgcctagtcctttgggcagacagatgtgtgcttcacatccacatccctgtgtatggccaggagtagatggtactgtggacatctcttgggttttcatggctagcaattaaagattccagctcctgggttagctggttgagaataggcaaggggcatccagagagtcagccatcaactctttggtaaggagtatttgagtatagtaagtagggccttcagtcaaccagtaggtggcaatttggtcaaaggtagcgagtctataaactatttattccatctccaattctctggaaaccttctatattcaagtttcaaaatggcaccaagttacataaggtagaggatgtcattaaggcaacagtttcaccatcacagtcatgcctgnggctctgatcaaccacttccct

SEQ ID NO: 2529 - DNA, 602 bp, Rattus norvegicus
  Genbank Accession No. BI278814
  misc_feature (1)..(602): n = a or c or g or t
ttttttttttttttttttcaggagatggtgagtttattttgtcttgtctggatagaggtttgatttgctcttgaatgttccagggtggagacaaggagaaagcacaggtgtggaggtctactcagtgcagtcgtctccctcatcctcatcctcaccgtccacagacagagcagcgtacttgcttgcagaactgaacttagaggctcggttctcctcagatttctttggctcaggtgcagatctggagtcttgatcttttttgccgtccttcctatccaactccttccagtggtctctgctccctccatccccaggaccacggctggagtgtccagtctggcctttggtggtgctcaccccatccactttagtttcatctttccttgatggtccttcctcagagggctgagctggagcaactttccctccaccacttgtaggggacggctgctctgtgtctgagctctgagatcgagcaggagggttagagcttcgcttcacccacgcattctcctttggtggaggggctggcattacctttagaggctggtcaggtttaggaggcttanaggttggagagtgacagtcttcttctttattga

SEQ ID NO: 2530 - DNA, 515 bp, Rattus norvegicus
  Genbank Accession No. BI278908
ttttttttttttttttctgggcaaagtggctttattagtgtggcaggatcacaacaggacttaggaattagcattggggcccttcttcttgccaaaggtgggcacaacattgacaaagcgtcggttgtactgcattcgcctcttggcccgaccagtcttcttcttcttcttttcctgtttggccaccttgggagtctgacctctcactttcccagcacgagccagagaaccatgaactttacctcccagcatgcggccagctacctccagagtggtcagggcctctacaccacactggcctagggtggcctcatcctccagcggcgagcctgccagaagcacgacttgatcttcgggggcaatgccttccagtgaggccacatgagctttgatctgggcgaccgtctcctggccggtcacctcgagggtgtgtagttcctgggcgcggacaaagagctgcatgttggctacttacccgcggacgccgctgctgcaaccgcgaagatcctcgtgcc

SEQ ID NO: 2531 - DNA, 728 bp, Rattus norvegicus
  Genbank Accession No. BI280270
tttttttttttttcttttaacatttttaatggacaggaaacgtacagagtaactgccaagccacataaattaactttttcgttaacgtctgtgatccaggaaagaacactaggtcggcatgggtgttttcgttgtctgttgtctgggtgcatgaccgaggtaaccgagtatgggccgtggatccatctttacacgttccagaagaaaaagcggctgccgtgcttggcaggcttcagatccccttcgatcacggggctgggctctggccttggtcttgagtgataaggattctctggcaaagggcgatctgttttcactttggtgaccttagacaactccccaaggtcaggcctcacccagcccagtttgtccaacacacattcgtcaaactttgcctgctgtttgcggcagtgacgaaacagctgcatgctggaataatcaaggcaagtccagtactctgtgaaaggctccgcacagtgactcttgatctgccggaagaagttcagtgcgcagccgttgaccagcttgccctccttcaggcagcgcctagggtccttctcttcccagcggcacagcatgaactccttattggtcttatcgcactgagccccatagtgatgggcggcagctttaagcacggctgagctgactttcacctcctctactttcagctcttccagagttggcagctccactatcccgggcatgacggcggcagccgcgacccc

SEQ ID NO: 2532 - DNA, 636 bp, Rattus norvegicus
  Genbank Accession No. BI280274
tttttttttttttttgtgtagtccttttcacttctacttggttgatttcagccctgagtttgattatatccagtcttctactcctcttgagtttatttatttcttttttttcctttttcctttttcttttttctttttttttttttttttttttttttttgagctgaggaccaaacccagggccttgcgcttgctaggcaagcgctttaccactgagctaaatccccaacccctagttatttctttttgttctagagcttttaggtgtgctgtcaagctgctgacatatgctctctcctgtttctttctgcaggcagtcagcgctatgagttttccccttaacacagctttcattgtgtcccatacgtttgggaatgttgtatcttcattttcattaaattctaagaagccctgcacagttagagacactccagtaccttagatggtacttggtcagtgatgctttcccaggcctctgagtgtaagcgcttcgtggcatttaagttcaacatacaaatgtgttcgttcttaccgctttgagttgccatcctgaattttagcaacttgtaacaggatggatgttctctggcatttcgtctgtaggttaggaatctagaagccatctggctatatgag

SEQ ID NO: 2533 - DNA, 668 bp, Rattus norvegicus
  Genbank Accession No. BI280304
ttttttttttttttttttcaggttgcaaagacagtactttttcattgagaaccgacggaggagtagggaagggaaatttacatttggctagttgcccctgacagccatggagaaacaagcagcttctgttctagggagggcagggctatgaagctgctcttcaggccagtacagcccctctctactacacttcattcaggcagggccaagtttgtagactgcagccgctctgtctcttggcagatgtactgctccactgtatcacactctgctaggaacacctgaacctttttcaccaaattcttcctttttagcctgctgtctttaaagttttctggtaggaccattgtgtcaatctcctccaagatcttcatgaattgctcaattgtggcctttattttcctatcaagtctgcagagagcctccgcttgtaattccttagccagaaaaccctgctggatgtcagaaagctctttattcaactcttccaggtggttagctgtcttctccacagatacctccaagtccttcagctttttcaactcagcctcttcttctggattgctcttttcaccaattaacatgactcggcaaccattttgcattccaagtgctgacaagggtgtttccatttctttcagagatttgcccttaaatatgagcttctg

SEQ ID NO: 2534 - DNA, 662 bp, Rattus norvegicus
  Genbank Accession No. BI281721
  misc_feature (1)..(662): n = a or c or g or t
ttttttttttttttttttgcttttcagttgctttattgactttacattttttccatgcaaatgggcaacactgtactgttgacagaaactcacactgagtgggaaggcaatttccaattataagttggcaacacaagccccgcctggcacatggaaataacacaaggctcaccacaaacgggtcatttaaaggcatgtcaggaaaatgcaagggctaggaatacagcgggaatcacagtatgaatctcaggggaaatgaccgaagtcaaggcataaggcagaattcatcgtgatggtcgtggtgattagagagctcccccataagaatacgcagacaatttctcaactgcagctccctaagctttctccggatctctctcatctcctccatgaacatttccatatcatctccatctccacccaacccatcattcatctgcctgttgggaatggcccatcgaaagttaggggcaagtcggcgggcctgtcctctccggtgatgattgtggttgtggttgtggttgtggttgtggttatggttgtgggtgttgttgtttgcagcaggctggtggccctcacctcctcncacggtgcggtcttcctgtccattctgcaggggctgctccatttcttcgttttcctgngcctatccttgccgcgta

SEQ ID NO: 2535 - DNA, 602 bp, Rattus norvegicus
  Genbank Accession No. BI281817
ttttttttttttttttttatatgtgactttttaataaaagtttctgccatcatattattcacatccaggtttccacaggtctggactcttcttcctacagatggagatgagactacttcattgaaaaaccagaacgagacaaaacctgagcacagtcaggttgtcttaggcttaagagtttctgggtttcgtccttggaggagttgaggatcttcccaaggcctcggaccacgaatattcttccagttttcaaaagtggagtcctttattttctcatactctgactctaaagttattttattcactttcaattttttctccaattcaggatcaatcttaattgtcacagcatcatatcggatttgtgaaaattcgcgaagaccaaaagaaccaccaacaaccagcaacaacatgggaactccatagcgaagggtcttgttcttacgcagagcgcgcaacacagcgggcgcaaccatggcagaaactgcggccgatttagccgcctccgcagagaccccaacgccggccggaacacctcttaggagaagttgtagactcagcgctggctttgggagctaggtcctcacctcgtgccgaattct

SEQ ID NO: 2536 - DNA, 755 bp, Rattus norvegicus
  Genbank Accession No. BI281876
  misc_feature (1)..(755): n = a or c or g or t
ttttttttttttttttttgaccagaacagtttattgacaagatagcatataaagacactacagagcatcaagcagggagccttttctagagatggttaatcaggggcaccccatgggaaggcagctcctggtgcagctgccggaagaccatggcacagtggttcctctcctgggtcttgccgagggcgtggtacagcctggcctggaagtacgacacatccctgatgcgctctctacagtcgacttttgcaaagtagttcttggcttcagtgaggttctgaatggctgcttccagagcttctgctttcttcactgggtcataggaagctgctgaagccacttggcacttggacactaagaacatggcacggcctttgtccaggatggccccatcggccaggatgggctcaatagccatgtggagaagggttaaggcctgttctgggatccccaggatgagctgggcataagccaagttgagcacagtttcagaggccaagtactgtaaccggtattctttggagagggccagagcttccaggagcacaggcattgcgatggtcggggaggaagatcgccagtacagctctgccaccgacaggaggacgctgatgaccatctctgtgttcttcaacttctgacagtatgtcagcagcttctgcanaagcttgtgtgcctctgtcatctggttttgggcttgcagcaccactgcttttctgtatactccttctatggcattangtgctgtgattcct

SEQ ID NO: 2537 - DNA, 713 bp, Rattus norvegicus
  Genbank Accession No. BI282045
  misc_feature (1)..(713): n = a or c or g or t
ttttttttttttttttttatgattcaacactttatatcagaaaaaaagatcagttttccaacaataattccactgaatgagtgcacagcatttgcatgaactacctcagggcaatatcagtacaaaacagttcaaatttgtaaaaaggtcatttcaaaaggaaacctcctgattacttcagggtgagtgccaacaccactgggaaccgaggacataaggcaggaacatggctaccacatggtgtgggaatgggctggcctgaataacagtattgctcttctacagcaggagaccccaaattaccctccaagacacaaatgggtggcagaaaatgtcaccttcatttgttgggataacacatacactttagtcacagtaaaattttctgttggctgaccagtgagacccagccatcagtcctacatgtatctatccaaagaaatacagagtagagagagagagaaagagccctatgggatagtgtccgaaagataaggaagagccaaacagataagcctatgtagcaactgcaggtgaaaccctctacttgggagctaagacagcttccatttggtctgtgtttttcctgtccaagagactcctgttaacctttaagtgacagacactacaattggagggctgccagtgtanagagtgaactggaaagcatgaaatggatttatagggacggtgacagggggtggctgttgcac

SEQ ID NO: 2538 - DNA, 734 bp, Rattus norvegicus
  Genbank Accession No. BI282838
  misc_feature (1)..(734): n = a or c or g or t
ttttttttttttttttttcaatgttcagtttcctttaatgacccccatctcccttgaaggataggtgcaggcagctaggtgactggcaagacatgttcacttgaagatcttgccttgattgacggctttgccaacgtgctggaaggccccctcccaggaaaagtactctcgaacgagggtctgggtctcctcgctaccaggatccagtttccgccatgtatatgactcatagtccacctgccaatctggactcagcggaaaggcaagatcttggcctcggaagacccaaaccccagaaatggagctgctgttgttggttccaaacaggataacactagcaaaggcattctttctcagtttgtccaatcgctgaaacatcccagtgatgaggttacagctcatgaaggtctgggtgagctcttcagggaagcggtactcagcataccacagggaccagccatccttatcaaaatgctcccaaaaatatggcagcgccacagagagggtgtcctcattggagtactttcgcttaaactcatccaacacaaaggtactcttgggcaggtgagcgaaagggtccttggccttgggctcagcagccaatgcctgctcacactcatccatctcttcctcaggagctggggcagctgcctttttttcctctttccgctcagtctggggcttctgcttctcttctcgtgagccttttctttcctcggngtatcttttttggc

SEQ ID NO: 2539 - DNA, 669 bp, Rattus norvegicus
  Genbank Accession No. BI283750
ttttttttttttttttttattatgaatgacattttattcagtcattttctttacaactgaaactctgggaattcaaagttaacatccttgcctgtgagcttcttgtacacgccagaaaaagtttcgaccttatgctccacgttgttctgctgtgctttgtctaaatgaacttttatgagccggctgccatccagtttcacacggatcctcttgcccacaatttcacttgggaagaccaaatcctcaaggatggcgtcgtgcactgctgtcagggtgcggcttctggggcgcttttgcttatttttcgtacggctttttcgggttggcttgggcagaatcctcctctgagcaatgaagactacgtgtttcccactgaactttttctccaattcacgaactagccggacttggattttctggaaagatttcagctgaggaactggtacaaaaattatgatggcttttcgaccaccaccgacttcgatttcctttgccgcggtgatgttgagttcccgcagctgcgccttcagatccgagttcatctacagctcgagcagcgcctgagagatgccagactcgaactcgtccggcttctcgccattgggcttcacaatcttggcgctcgagctgaacatggcttcgtccttacggagtgcccctcgtgccgat

SEQ ID NO: 2540 - DNA, 669 bp, Rattus norvegicus
  Genbank Accession No. BI284252
ttttttttttttttttttgcatttctgagaaaactttattggcctttggataaagtttatttgccaggaaggatgatgccatcatacttctgctggaaccagcgcatggcctcctctttgctgattctgtgtttggccccaatgcagcctgttctgcgcttcttgtctgcgatgctgaaacctggcctacccagcaccacatagaaatccaggccatagatgccaatgcttgggtcatatttgatgcctaggtcaatgtgttcctgaatcccaaagccaaagttgccggtatctgagaagttattcttccgtaattcgtactctcgcaccttcaggcctttctccagaatctcctctgccttggctccacggacagtgcagtgaacagcgattttctcatttctccggatgccaaaggacctgacggtgtatctagctttggaaaacacaggggtctggcctgtgagctgctccaacaccttggctgctcgggtcagtctgtctccactctcccccacgcagatattgaggcagagcttgcggatacgaagttcccgcatggggttctccttttcaccctgatcttgcgccatggtggagaacacatagaaatccaggccatagatgccaatgcttgggtcatatttgatgcctaggtcaatgtgttcc

SEQ ID NO: 2541 - DNA, 747 bp, Rattus norvegicus
  Genbank Accession No. BI284268
  misc_feature (1)..(747): n = a or c or g or t
ttttttttttttttttttagccaaagcacatactttattagctcctgaactctagttctccttctcctgtacagttttggttccacgtagccgtccagtccggcgagcagcaatgagacccactttgcgcccagctggggcatctcttcggatagtggaaggcttgccaatgtgctggtggttaccaccgccaaagggatgctccacaggattcatggcaacaccccgcacacgtggccagcagttcctctttgccttgtacttatggtaggcacggccagcctttaagataggcttgtcaattctgcccccgccagccacgacaccaacaacagctcggttagcagaggaaatgaccttcttggaccctgaaggcagcttcactcgggtcttcttggtctctgggttgtgggagatgactgtagcatagttcccggaggctcgtgccagcttgcccctgtccccaggcttctcctccagacaacacacgatagtaccctcaggcatggtgcccacgggcaaaacattgccaatattcagctgggccttcttgccgcagtacacaaactgtccagtgtggattccctctgcggcgatgaacagctctgtccgcttcttgaatcgatagggatcacganagactactttcgcgaggggagcgccgcggncagggtcatgaatgatgtcctttacgatgcctttaatgtagccgtgtcgctccgcgaagtcacagcacgcagacgcgcg

SEQ ID NO: 2542 - DNA, 734 bp, Rattus norvegicus
  Genbank Accession No. BI284446
  misc_feature (1)..(734): n = a or c or g or t
ttttttttttttttttttggctgtttaagtcagtgtcttgattcccccacactctgttaaaagaaatcttatgtcatccaagagcatgaaacaggtaattaaactaagtagtacctctttggaataaaagatgtactgttttaaattgtgttgctgtgtgtctatgtgtgggtgtgtgtattccagtgcaggtgaccttggaggctagaggtatttgatctcctggagctggagttctgggcatatgtgcctgtctgaccccttgcgggtactgaacttgggtcctctgctagagcagtcatcttacaagctgagccatcctctggtgcagagacatgttttgttgttgttgtagtttgtttttatgccacagtaccgtggtacatcccacagaggacgcaggcagcagcaccaggagcttcaagatacagaatgccggaggagggcttggattgcggctggcacagggttaagtcttacgaaaaagagcccaacatatgcgaaatcctttttcttctgaggttgctttttcatgcacataaagatgtcgtctgtggctggctggttgtttcgacgttatggtccattcatgcttggcaagctctgtgccaagaaagctgcgccccagctcaggcgtgcacattccanaggatgaggagtgagtgcacagtctacttagatggagaatggatgcaggaaaatctttctgatttattttgttctgggtacgatga

SEQ ID NO: 2543 - DNA, 632 bp, Rattus norvegicus
  Genbank Accession No. BI284849
ttttttttttttttttttcagggtttggctgtttattgacacagacacaaaggcagctgtggtaatggggtgggggacacaaaagcaaaaatcacacttcctacatggaggcctcaattagacaagagagaggctgggtccctcccctcacactccttctgacagtggctggagtaacagctctctctaatccaagctcagaagcagcaggtgacccccacctagcctcaaaggtccccactttggctccagaagcccctgtccttttaaccagcccagtaattcccctacccgagctccttctcccccaccagtgtaaacagagtttggggctgaacaacagagctctgggaaggcaggagcctcctagatagcaaagggaatgtgcttggagtttcacttcggtcccagaatgagacccagcagtgtctcccagaactcgggctgatccagtatactgcctcttcattctccaccactgacagagataggccaggccccagaccacagtaaaaacaattgatccccagaggttagagctactccctacccccgacccctggcacatacacagatttttggcagtgttggactggggaggagtaggcctcagctccaccaggacgaggaag

SEQ ID NO: 2544 - DNA, 723 bp, Rattus norvegicus
  Genbank Accession No. BI285636
  misc_feature (1)..(723): n = a or c or g or t
ttttttttttttttttctatttagaatatttatttatcttttacatgacaagacacaaaaagttacaacttcttaaaactcttcaaaagaaaaaaatataattctgtaagcagcagcagcagctttcaaggtacagacataataggaggggtggctcccaggagcaaccgtgaactaggggcagcccagacttgagccccaggtagtgtcactgggaagggcctccatggagggggttgggcttgagggacacagcaccagcacttcagtcaatcaccaaacacaatcacatggccagggcaggggaggactgctttgattcagaacagaggatccagggctggaagggtggggctttccaaacatggatagaggcccagagagctgggaggcccaggctccatagtgtccttcatgcctgcccttccccccaagcaatctctgtctgggagtagggctctgtcagaagagttaccaggctggagaactaaattatcggatggggtcagcagagtcctgaggcacaaaacagcacacacgcacagggtgcctgactccatggggaaaggcaactgtgcccttaggggcccatccccaagcagcttggccagctgactgctgggggtagggggacanactgcctgccacaggcacacanagacctcaagcaatctgggtcccacatagtgggggtccaaaggctccccaggaggagtatgtgtg

SEQ ID NO: 2545 - DNA, 562 bp, Rattus norvegicus
  Genbank Accession No. BI285681
ttttttttttttttttttctgtaagttggaaaataacttttatttgttctagagcattggctacagtcccccctcagaacttctggaactgcttcttggtgccagcagccttggtgaccttgagcacattgaatcgaacagtcttgctcagaggcctgcactctccaacagtgacaatgtcgccaatctggacgtccctgaaacagggggacaggtgcacagacatgttcttgtgacgcttctcaaagcggttgtactttcggatataatggagatagtcccggcggatgacaatggtcctctgcatcttcatcttcgtcacaacaccagacaggatccgtcctcggatggagacattaccagtgaaggggcatttcttgtctatgtaggtgccctcgatggcctccttgggcgtcttgaagcctagaccgatgtttttgtagtaccgagggagtttttccttgccagtttctcccagcaaaacacgtttcttgttttgaaagattgtaggctgcttttggtaagcacgctccgtctgaatgtccgccatcttcctcgtgcc

SEQ ID NO: 2546 - DNA, 721 bp, Rattus norvegicus
  Genbank Accession No. BI285902
ttttttttttttttttttcgatggaaagttgttttattggggggttgtggacaaaaagtaaaatcaacaattatggaaagtgtattttgtcttaagccgtacaaatcttcacagatgattagaatggaggaaggctaggtggcctttgagaagaggaggctctagctcagtgagcagagagctctgccctccaacagccaccaccttgccactaccctctgtgacaagcagtctgtcactgcctggagaagcttgtccaaggtattaaatcaatggtccctggggactggagctaaagccacataaagatgtggccttaatctcaagccgcaaacaagaatgtgtcccactgctctgatgccaatcagcaccacagcttctgggggcccaacttcctgtattcagtagacggagctaaggcagaccccagtttttctggccataaagagcctgccactgttgagtcctgctgtggtatagtgctccatggctgcccgcagctcagttatctaatggtgactaaaaatggaaccggaggcggggtcagagcacatacgtcagctgtcaggtggaacgctaatgccaccgtctcagagcagagcaggactgcactgcaatccagaggcgaagtacaaggcagttagttctgtgagtgtgaaaaccttctagaagcaacaaatatgcaggcacatgggcatctagtgcctagaaatcatctggt

SEQ ID NO: 2547 - DNA, 478 bp, Rattus norvegicus
  Genbank Accession No. BI288519
ttttttttttttttttttaaagaagaaaaaagtggacgagtccagcagattaaagaattgtgctattcaacaaacgaacttcctcttctgtctcctctctctcctcatctacaggactcagttgaacattattgaagcggggtcttggtttgccgtctgggccatatgacggaggatatctttttttgttataatgccaaggaggcgcccattgtgagtgacaaggcactgcctcagaccaagctttcggaagatgtctaccacaatctccattggggtgtggtctgtcactgtaaaaggactcatgtcaaggatgcttctcagttttaatggccgaggactttctgctggaagagatggagtgtgttgggcaaagcacacccgagaactgccaacaacaccttcttgtttttttctgggactttctattgcaattgtcaggtctcttctgagggcaaatcccactaatctctgagat

SEQ ID NO: 2548 - DNA, 650 bp, Rattus norvegicus
  Genbank Accession No. BI289441
ttttttttttttttttttgcctttaaaattctgtttacttagcatatgtacacgtaaaagagaaatcacccttagatcccacccagcagaaaacatgcacaaacccaaggtatatgtgaaagggagggccccagccccaagttagcagttgggatggtgcaatcctgtgagtcacaagcccatggcaagagggctggactaaagtttcaacacagccagaacccctgctgctggccctaaaataagcgtgcaccatagccaaaggtctgtttgatgccctcaaagtagtaccgctgccagccttgccgtgtccgctcttcctcgggagcagggatgccgcggccctccatgcacagctctgtctctccattcttatcaatgaaggtcaaggtgatggtcgcgaagtgcccctctggccatgacttaaacctccacttcatagcaatatgtttctcaggaaccaagtcagtaaactccccagtgacgttaccatcgaccatgtgaaacttccctcctctgtctgcttccaaggccgcaggagcatgggtaaaggcctggaccagctcctgcgtggtgaacactctgtagagctcctctggagaggtcaggaaggtttctttgagggtgatcttacaagtgggtattttgac

SEQ ID NO: 2549 - DNA, 656 bp, Rattus norvegicus
  Genbank Accession No. BI289516
  misc_feature (1)..(656): n = a or c or g or t
ttttttttttttttttttgtttttacaacaaacatttaatatttaactgttttacaggaaacaaatttaaataacatatacttattttcattactgatcgttgcacaaagctgacaaaatacggagagcattctgtgattaaacaagtttgacattaggaaatttcttcaggcttccacttccacagcagctgagaccacgcagacttgtgcaatgtcatcatattcatatgttctttttaaaaatgtgtccgtgagtcttaagccagacacgctttggagcccctgtactgaggacaggagagtcagggccaggcagagcgaggagctggggtgcagcttccccagctgtcttcctgaaatcccacaccagtggatagaggtggtgttgcacatctccagcactaggtccatcgtcctctcactgctgcagtttgtgattttacaggtaatgtggaaaggttcttctaggtttacggtatctgggatggcctctaaagacagcctaacatctccataacctggagccatcctttgaagctggctggtctgtantcggcccctttcacccagatttgttttccacactatatccagtttcccgattactgtcactcccttaatgatgccggtttttctgcaattctcctcgtgccg

SEQ ID NO: 2550 - DNA, 536 bp, Rattus norvegicus
  Genbank Accession No. BI290754
tttttttttttttttccagtgcctatgtgttccagatgcttccctagtttttcttctattagtttgagcgtgtctggtttgatgtggaggtccttgatccacttggacttaagctttgtacagggtgataaggatggatcgatctgcattcttctacatgttgccctccagttgaaccagcaccatttgctgaaaatgctatcttttttccattggatggttttggctcctttgtcaaaaatcaagtgaccataggtgtgtgggttcatttctgggtcttcaattctattccattggtctatctgtctgtctctgtaccaataccacacagtttttatcactattgctctgtaatactgcttgagttcagggatagtgattccccctgaagtccttttattgttgaggatagctttagctaccaaggattagtttttaaacagtgagccttccagttcatgaacatgggatgctcggggatttattgagaagatctttcatttctttcaacaatgtcttgtattttcagggtgtaa

SEQ ID NO: 2551 - DNA, 606 bp, Rattus norvegicus
  Genbank Accession No. BI291621
ttttttttttttttttttactatttaatcaaaggtttttattactacacagaggagtcaccgagatgctgtccctcatttcactcggtaacaatccattctaaataaagtactttaatgctggtcatacatttatataattatcttgacagagtaagaattagaaatacccaatacatttttgttagactgttgttttaaaattaacactggctttgacaaaagcagttggggcttaagggggacacgaaggtaaatagcagccggctcgtattaatactgctatttccctcccttatcacactccacagttcaatttatttatgctcctctctgggataccacgctctgtccagtaataaagcagtaaccttattgcacacacagttggggaagcctcaggagccagtcaggagctgggcagcggcacaagccctccatgtgtggtggcgagcagctagcatggagtgactcagtgcttggggttttgaagtgtgtactgcaaagagccagagaggccccagaagaaacttgggctgtgccaggtaagaaccctacagaatatcatgcccagcagttttattttgaaaataagctaaactgtttt

SEQ ID NO: 2552 - DNA, 707 bp, Rattus norvegicus
  Genbank Accession No. BI295783
  misc_feature (1)..(707): n = a or c or g or t
ttttttttttttttttttcttgtacaaaacactttattatagagaagagttggcttatgggctcaaacatctagatctgggtgtctattctctttcctgttttgtctccagcactgggagctagggtccctcctcatctataagttatctctgtgaacagagggggtcttccccaacaccctgcagttccagaataagtctacaggctgaagtggtctgaccatacaagaaaagctctttacaaaaggttctgtggggcagaaaattccagaggccatcctgccagcagaactgggctgccagctcagtggtgggcagggctcactggcaggtcaaccatgtgtcacccaaagtctagccatagcagaatgaaagccgagctgtaccgatcactgggaacagtggggtgacaaagttgtcagtcacaaggtgcctttctgggtcatggcaaatgtgggtttggacttctggtccttaggccacaagagagccactgggcggtaagccaagcctggtgtgggggaaaggccacctttggccaagtagggggaaaaaaaatccatcagtagctcaacaacaaagatggtcacacgagggtnnggtggcgggaagccagctacacaagtcnctaacaagtgtatccacatatgttttggtgtgttctcatgcatgtggaaaccagaaagcacctgttttcaccatttctt

SEQ ID NO: 2553 - DNA, 631 bp, Rattus norvegicus
  Genbank Accession No. BM384565
ttttttttttttttttttgcttcaaacaattttttattaaaattaagtacacttcacagtaagtttctcaagtctcagtggctgtgcagcctgatgttggtgcagacacgacgtccccacgccgagctccacattctctagtgggaggcgagggacagacagctggggtagggcaggcgaggcaagcctcactctcctcctaaccacacagagcttcaggggcgcatgcagcaacacaatgggaaagctcaaaggtgtgtcaggagagcaggacgcaggtcctcacaggagccaccagccagagcgagctcaaactcgcatggcctctaggggggcctctgtaaagtctcctaggaccaatcgatttgaaaccgctctcccatcagcagtgagacagggatggacaggctcttgtcgtccgggctgtaggtgaaattggagacagagatgccattggaaaggacctgggtgggagctgtggtcactcccaagatggtcacctccctcagttgcagttcacctccctccttggtcacgtgcactaacttgtttacaatggtattattcttggctgagaaggtgaccagtgtgtaggccccacgctccagaaccccgaggctctccccgtcgt

SEQ ID NO: 2554 - DNA, 727 bp, Rattus norvegicus
  Genbank Accession No. BM384667
  misc_feature (1)..(727): n = a or c or g or t
ttttttttttttttttttgggaattctcaaattttatttccaactactgtagtaacaaaataccagtgataattctgcaggaagagtagcaaccttttaaataaacaaggtcgtaagttagtattgcaacagtactttggcctatggagtttgataggattattgcgatcagtcttatagtattgtagactgtgtgtcctctatgtctagtaataaaaatattcctctgacctcagtgactcaccacacacacatatttctaccctatgttgagcactgcccttttaggttgtactaaatgagagaaaaagtttttgctcctgggttttccaagagtatacagagatagcagtcacttccacagtgaggtacaatattaaactttgagttgaaaaataaaacagtatcctatttatgccctttctctaggagtaaaaagacacacacaattacaaacataaaatgaatcaaagttctattttattgacaggagtccaaatgagtataaacctgcctcctttgtatgctgtttactgcctttaaaaggctgctgacagagtcaggtagattaaaagctacgaatgtattcagcttttatagtgaaccttttccaaaaggttgacgacacaaagcaaacatcagagaacttgtggtcncacaatcaatcaatctggccctgaagcctatcggatgacctagaccctgcactgacaccaccggaggctgt

SEQ ID NO: 2555 - DNA, 642 bp, Rattus norvegicus
  Genbank Accession No. BM385646
ttttttttttttttttttcaagttgcacattttaatttacaatgtttaccagtaaaaaggattagttacaaaaaggaaagctgtctgtacaaaataagggtttttttttttcacattcataaagagaacccactgtgaattcttaccttgtgaagtcaatactcaaacagctcactttggtaaaactatcttggaaggactagtaatccaggcaagataataaaattatcagcttcccaatcatgtccaggagaaagaattttctgaacattttccctgtacagaaaagctctctgtacttgcagatccttagaaaagccagtgctctcaggagacagcctggtaccaggacgaagcataatctcctgctcactcaaatggcaatccttcctgaatctgacagacacacatttatcatagcctcaggtcagcaggagaaccagatggttcaggatcagcctctctccactcaatagtttatcatataaattaaatatggagaggtacacatgagaaagggggagctctttttcaaactcccacttcctaatataatacacatcacagttttaatgagcagagaagggtaagtcaccctgtttgggcacatttcctcaagggaaaaaccaaagtatcaaaagc

SEQ ID NO: 2556 - DNA, 690 bp, Rattus norvegicus
  Genbank Accession No. BM385717
ttttttttttagaactccattttgtggaatcagaaatagataaaaatcaacatcaaaccattcggtttcattttcagaagcactggcgtttgcttttgatgatgattcgtaacataagcagaatcaggtcatttggaaggcatttctctattgggcaatatttaaaatacaacaacaggctttacgttctactcagatctagatagcaagattgcagcttctttctgtcagagagcttgcctgccaaattgaagactgcctttcaggtaatagagaagaagctgacattaggctgactttaaatgacttttctgggttcttttactgtacctgtcactttcccaggaacaatgacttcacactgggggaggggtcttgatagagctggtgaagttccgtacattgcaacagaatgacacccgatttcatcttatcctttttgtattgtgaactggaactttacgacattgtaaattatcagctggtttttctgaatataaagtgtgaaaacacagaacagtattttgatctatttgataattttgtgggtttttgaagaattactgagcatgtacatagaaatagtgactgcttgaatactgtatttacttgcactctttcagtacatcaagattcctgtatattttagagtataataaaacacagacgtgagttgtatttacaaaaaaa

SEQ ID NO: 2557 - DNA, 603 bp, Rattus norvegicus
  Genbank Accession No. BM385982
ttttttttttttttttgtacataatttattaaaaatgtctctgacacaaataatgactccactgcatacatagttggtgttcaaaaatttccccaatgtttgttctggacacaattgttattagccaactcggtgaattcaagacattgttccacacaatgaacaatcgcacacatgagaactgcacctagaatgtccatcctagaatctccatccatccagtcaaagtgctgagctcactgactgaaggaaacatgacctgtgttctagaacgtagctggctatgaagtttactcatgtgtaaattccttaaaaagattaaattgtttggcccatttctatatttcataaaataactataattacaaactttctaaaaataattttacaaccatgtaattatgactaaccatatcatctaaaaagtaagtgaagtcattgtcctagagattgtctgagattattctgctgagaagcttacttcaaactcttatcactacttcctacttccagtgtccttgaattaagaacagaaattgtaactatgctattctacatcagattgacacaacctacttctaagtacactattgcttctgttac

SEQ ID NO: 2558 - DNA, 731 bp, Rattus norvegicus
  Genbank Accession No. BM386781
  misc_feature (1)..(731): n = a or c or g or t
ttttttttttttttttttacatgaaagagtatttattgaaaacactgtgactgacaggaagcccctggctgctctctggttacactcagctcatgactgagagcacagcagctttgctctcaactttatttctcttaaacatcctatcctaggataggaagatcttatataaatatatatacatgtctgcataagtatggcctatagtaaagaaaatatatagtacactcttcattgggcagtacccgccacgctaggctgccagtgctgaataccaccatttaacatgcgtccaaggaaggaggctgtgcgcgtgcttcaagtgctgcagcaccaatgaaggcccatggcacagctgtggccccggtacttcttgaaatcatggctaatggcagaaaccacagtgccaggaaggagagagggaaggcaacgcccctcgtctgcggcaagaggggcacaaatagaagggcctgtaactaagggggatgggagcattcttcctcagcaaggacaagacagaactgaaggggtgagctagaggtctcacctcgcctttccttgcagcattcctagagcccgagagagcaagactcaagctggaggcctctgcctgggcaggatgagactgagtgcttgggggaaagtactacctgtcctgatnactgcatggacaagagagacgggtatctctagagagtagaggtggntaacccagaggcagcagcatcttg

SEQ ID NO: 2559 - DNA, 644 bp, Rattus norvegicus
  Genbank Accession No. BM387215
ttttttttttttttttttcaagtttccaaacaagaatttattctttattttttttcccttaaaaaatgtaccaggtacaatttttcctgttttttgttttgttttgtttttcaagtttcagcaaatgcttgttcccctcagccaagccccaagagttaagggttgaggctgggtcagagtcttaagtggggagtggagtaactgggaaccatatgactgaatgaggggcacccctcatcccagctgaggtaggtgggtcagagtctggtcaggtaagaggaggttccccagtccttaggcctgactctgtccctggacaccttcctcagtcaggacaccaaagcaaggagacaaaggcaggaggagagggacaactgagtctgagccctaggtaagaggtggttaaacccctgtgttacacatacactcaattctctctcgcgcaacacaccctacacaaacccaagtttgggtgcacacacacagttgtacacacacacactacacacacaccacacacacacatacacacactggctttcgaagatgggttgaagggcagggaagggaaaaggaatagggaaaaacgagggaagctgagtctttggctaagtgactcagttcctctggaataaacctctgcc

SEQ ID NO: 2560 - DNA, 646 bp, Rattus norvegicus
  Genbank Accession No. BM388792
ttttttttttttttttttataaaaagattggaacccagtcccttatcgtgactgagtccattttcccaagatgtcactgttggagataataatttaagtgtttctggagtggaggaagcctctcttttcctagtgggaggtcttctttgttcctttcccaaacttggcatcaagacccagacccaggaaaaccagcacggtgcccacccactgcatggagctgatgggattggcaaagaggatcacagaagccaagatggtgaagaacttccgagtcgtggtgatgatggagcaggtcagggggccgaagtacacgactgtcatgaagataaagctctgacccaaggcactggtcaagccaaagagcaggatgttatagatgatggtcgggtacctctcggcgaaactcaagaactcccagagctccccagtaaacaggatcccagcaccgagcaagaccgtggaccaaaggttgatgttcaacatcatgtgattggaacctgtttggtaatgagcccgcatatggtcctgggaaacacctgtcagtccatccagggtcagagacaagagcagaaggagctctccaaagccgaccgtgtgctcttctatcccaaccaccttcttgggcttatacatgaaaagagca

SEQ ID NO: 2561 - DNA, 680 bp, Rattus norvegicus
  Genbank Accession No. BM388944
  misc_feature (1)..(680): n = a or c or g or t
cttgttttttttttttttgtttttcctaccctgccctttttctacctcaatggtgttcctacaggaaatggataaccattttaactgtatttttttcagcccgtaccttcttgggaatacaattgtctaactttttatttttggtctggctgttgtggtgtgcaaaactccgtacattgctattttgccacactgcaacaccttacagatgtggaagatgtgaaatttgtcatcaattatgactaccctaactcctcagaggattatattcatcgaattggaagaactgctcgcagtaccaaaacaggcacagcatacactttctttactcccaataacataaagcaagtgagcgacctcatctctgtgcttcgggaagccaatcaagcaattaatcccaagttgcttcagttggtcgaagacagaggttcaggtcgttccaggggtagaggaggcatgaaggatgatcgtcgtgacagatactctgcagggaaaaggggtggatttaatacctttagagacagggaaaactatgacagaggctactctagtctgcttaagagagattttggggctaaaactcagaatggtgtttacagtgctgcanattacaccaatgggagctttggaagtaattttgtatctgctggcatacagaccagttttaggactggtaaccc

SEQ ID NO: 2562 - DNA, 639 bp, Rattus norvegicus
  Genbank Accession No. BM389010
  misc_feature (1)..(639): n = a or c or g or t
ttttttttttttttttttactttanccgcatttatttatgctgaatttattcccgtgccatgagcttttgtttcttcaatttcttctgggatatctttttcttctgtgcaacctcctcttctggctttggaacaatctgttccttctcagtgaggatcatctcgatgtggcagggggagctcatgtatgggttaatccggccgtgagctctgtaggtccgtctgcgcatcttaggagccttgttcacctggatgtgttcaatgaccagagagtctacatccaaacccttaagttcagcattactctctgcatttttaagcatgtgcagcaaaaattcagcactcttttttggccaccgtccctgtgtccagccccactgtttggcctgggcgcacctaccaactccaccattataccgccggaatggcacacactgcttctttaaagtgacatccttcagatacttggtggctttgcggatatgcatacccttgatggcctgggcagtttcccgggtgttcttaaagtgaacacgaaggtttgagcctcttgacttgcatgatttcgtggggttttctgggtcaagggagtagcgaaccatcttcacaggtcacctctggncgctaacaggaatggcgt

SEQ ID NO: 2563 - DNA, 682 bp, Rattus norvegicus
  Genbank Accession No. BM389226
  misc_feature (1)..(682): n = a or c or g or t
ttttttttttttttttttggatccaatctctttattgtcagccctccctaccccccgtgccgcccttcacaaccccctttactttcaaacctatagaaaaaccccaagcctgggaatgtcctgggaaaaaaagagcagagtgcttctgccccttggcccaggcagtgcagacaggaagagtgcgtgggataagggtaggccagtaactccacttgcaaaggatgtagcactcactggctgggatgcaatggggagagaagttactgctgccagccttcctctggtactctctctagactggcatccagagatgggtgcctggcttgaggcctgagacagtgatgcccttctgctgatggccaatgctcctgcttactgcaaggccccatcttctgcatctgtgtcctggctgtgctccagctcctcctcgctatgtgtgagcagtccctcctcatcaccatcatctcgagtttggacttctccttggggtgtgcctgcctcagaagctgtgtcttcttggggtgctggtggccggctgctgctgctcccactgccaccgctgccgccactaccaacattgccactgccgcctccaccactgctgctngcccctcctccaccactgctgctgtcacccttcttcnntgcatctggattggcttctgttcctcagcaatctgct

SEQ ID NO: 2564 - DNA, 698 bp, Rattus norvegicus
  Genbank Accession No. BM390150
  misc_feature (1)..(698): n = a or c or g or t
ttttttttttttttttttacaggttcaaggagacatttttattttctgatgaatggcacctggatgcagagtgcctgtacctttgatcttaaggaaatatgcagataggtgattatagagtcttaataagtgacttcaaatcctgtcagcatctggtggctgtggcaccacctgtctcctgctgaccaggtgtggctggacacgtgacccgctggcgctgtggttaggaggtggcacttggctctgtcccacttcaggggctgatgaggttctcatcatgtgactgacgagaattacaaaactctcggatcctctgaattatacttttgtaggctgctgtggctggtgaatctggggcttcaacaaaaaaagactggcctttgtcacagctcttgcctatgtgtggatccagcggcactttgcccagaagagggatcttcagggcctggcacatggcctctgcacccccagtggtgggagggaagatctgagactctctcttgcacttggggcagatgaaaccactcatgttctctaccacaccaatgatgggcagcttcaccttgtgacagaaactgatctctttccgaacatcctgnagggccacctcctgaggggtggtgaggatcaccgccccatcaatgtgtgcggcagccagatactggaccaacgagaggtgctcatcggacgtgccgggt

SEQ ID NO: 2565 - DNA, 700 bp, Rattus norvegicus
  Genbank Accession No. BM390478
ttttttttttttttttttaattttagaagattttattagaggaaatatctaatggctgtcttatacaaatatcagtttcccaggggcagaacaagatttatctgtgttcgaagttccaggatagatagcaagaggcactgtgctcaaaagtatttgtagtatgaaagggccatcataaatacaaaactgttatcttcggtttctactcacagttgacttaacaattctccgtcccgatgaaaggaaaacagtgtatgaagaatccccaagtagattccaaccgaagccacctggtatttttggagctggtgctcaatgcctcagcttatgcagcacactcagggtatggcagaggcagttaagaaaatgagtcaaatttagcatctcagtactacagtgcgctttgcagaccttcggactatttttcctagccaaagtacaggggaattcagacaagagccaccgctgcagaccactatcccattagtgcaaactctggttcagatactgaagaaacatgttggccaattgaggcaggttctcattgttgggatgcattttagtgtaggaaataaactggcgacggaggcgactcaattctgccaaggtcaagggacgggtaaatcggaggtgctccgtggtgccaggaagcgttagtaagtctccgggtacagcgctcttctgcctcgtgccgaattct

SEQ ID NO: 2566 - DNA, 728 bp, Rattus norvegicus
  Genbank Accession No. BM391581
ttttttttttttttttttaaaaaacgtagtagtttattggactccgacaaatggccacaaggcccacagcacccgtttgctcggatggaggctcaaagctgctctgaccgctgccctcaagatgctttcttctgcttcttcttttcattttcttctttctccttctcgatttcagcaacatacttctcaatttcttcaggacttagaatcttgaggggctgatcccgcctcatgacagcaagttcaatgtttttgccacctgactggaccacttccagcagcgccttgatcaccagtttgatggtcagatcgtctgtttcaatggcatcatctgtgtagttcttctccagaaattcacgcaccgacttggcaccccggcctatggcattggccttccaagcatggtatgtgcctgaggggtcagtctgatagagtctgggggtgccatcgaagtcgaaacccacaattagggcagagataccaaatggcctgcgcccattgctctgtgtgtaacgctgcttcagactggcaatgtagcgggtgatgtactccacagtcactgggtcctccacggtcagccggtggctctggcactctaccctggctctgttgatgactatccttgcatcggcagtgagacctgcaaaggccatgcagacattatcgtccagagcacagattttccggaccgttctttcatcttgtagcttggccacgacttcttttcc

SEQ ID NO: 2567 - DNA, 669 bp, Rattus norvegicus
  Genbank Accession No. BM392174
ttttttttttttttttttaaacgttaaaggtactttttattttcattccgcatgtgtcttacaaatttaaaaatttcataaaatgaaagatcacagagaagtcatcaaggtcaatttaagtatggtcacatttcttggattatgtcattgctatcagagacacattgaattcaaaatattttagatgcaatttgacaaacaaaacaagcaacgccaaaaaccttatggtgagattttaaaacagaacattctttaatttcctcccaagttactaagcagtctgatgacttcattttaggaccacaacgtgatcactgcctctagtctgcaggggagatggatttcctcattgaaacaagaaaaacagctcctttccatgtgtgaaaaactgttttctgtttgtttgttttgtccattttgtttacttactttttaagattctttctactggaaaataactatgcttacttgctgatgtgtccgttcaggtctgagaaagaagaaaatctacaaatggtccaaagatgaaaactttactcaagtcttagatctgcttgagtttcttctaacttgcaaatatcaaaatgaaaaatttagttaaagcacctgattcatgtggagaaagtaatgaactgtattttgatgctaacatattaaaaatcattgatt

SEQ ID NO: 2568 - DNA, 557 bp, Rattus norvegicus
  Genbank Accession No. BQ079169
ctctctttatatatttattctttttccaaaaatgttttggtctcctgctatatctcagaaatgtactactagctgcttttaagttataaagtacaaaataatttatttcttggagaaaatcttggggggttaccattacaaaaatgaaattttgagttcctgtagactttgttagtctttgaactttctcatggcacatatctagggctgcctgggacacgtggtaccctgcctctaaatggacacgacgcatccatcacttagagaaaatacaaagaccagttctgaagtagccttaagagagtgccctttgctttagcaaggggactgtgcaatcggagccatgagttctctgaaaatgactttcttgtcacataatttgtcagagaatgccacacccatgatcatgtaacattacaattgtggtacaacattactacattcgagaattaacattacccaataaaaggcacatcttcaaatattgaatcaagatctgaaaatcaaaacagtagcgagaatacattaaaaatcaagcacttaatttgtaaaccttg

SEQ ID NO: 2569 - DNA, 705 bp, Rattus norvegicus
  Genbank Accession No. BQ190016
  misc_feature (1)..(705): n = a or c or g or t
ttttttttttttttttttaattctgaataatttattattctaacaaaagtataaagtgtggaaaattagtgtatctgaatcatttcagaaagtagagaagtttccactagcagacttgagatcttagcacctttgagaagacagttaagacaactggtactgcctgccttggatgacaggtggctgctcatctgcctagtgtccgtcgtgtggttcctgtggccagggtcatttggtttatttctctacattttgggagtgcctcagaacaacttaaagaggaggaaggtatccgcccaacatagctggtggtaagatggactagaaacgctggaaccggaggctgaggcagtcaggcggtcagatggacagtccgaaggcactgacgatgcagtacatggtcttgttctcccatcggactgtgcagctcccgtccgtggagctgtcccagaagcaggaacttgcggtgtgtaacccagcaccattcttctgcatgatcacacaggtcacaatgtatttaaatggtttccccagtttggtgagttggctcaaagtctgttctacaacattagtggtccactggttgactttgctgtgctggtaggcgttaccgccgatggcactttctatagcctcctttacaatgttgctcacttcatccaacaacanatgcagtctcctcggagggctggaagtcctcgtgcc

SEQ ID NO: 2570 - DNA, 644 bp, Rattus norvegicus
  Genbank Accession No. BQ190368
  misc_feature (1)..(644): n = a or c or g or t
ttttttttttttttttttagcacagagagcaagttttatttggtgaaggcaaacatcatccaaaagaaaccagacaggcaaggtgctgtgattagggagcctctggggccacacaggaatctcacactgggcaaggagcaggctcgagacacgtaaatgtcctcagccattcagcaccatccggacaagctcttcatagttaatgcaaccgttgctgtcctcatgccccgccactagcatctcgacttcttcctctgtcatcttctcccccagtgtgactaggacatgacggatttcagcacccatgacagtgccattcccttctttgtcaaacacacgaaggccttcaacataatcctcgtaggttccttggtccttgttcttggncacagtctgcagcatgggcaggaagtgctcaaagtccagcaccttcacattcatctcatcgctcttggggttccccaggaccttgagcacctcggcgttggtagggttctggcccagggcccgcatcacatccccacactggctgtacaggatcttgccatcgcctgttcggtcaaacagctggaaagcctccttgaattctgcggtctggtcctcggtgaagtcacacatcttggctgctgagctatgcgggacct

SEQ ID NO: 2571 - DNA, 611 bp, Rattus norvegicus
  Genbank Accession No. BQ190671
  misc_feature (1)..(611): n = a or c or g or t
ttttttttttttttttttgaggcagttagttatgactgtatatttttatgtagccccaagaacaatgtttttcacagcaaatcccagtagttctgcaaaaacatataatcactgctggttctggtttctatgcctgacagatagtgcaggaaaaagaaagtatcttttaaatcttggacggcctgaagctccagaggtccagcttagctcttggttttcaacaagcgcctttcttagaagccaccaaaggttattatcaaatagtttctggccactagagatagtgtccctcctaaatgtccttccagtgcatagcacagtcacacactccacattacaccctggtagagattcttcaccgacttctcactgttagtcaggctgaaatatagggcttttctcttcacgtcatctgcttccccttggcagaatcccaccttagcaggaagctgcagctggacactgtaggattctttggggtgagttccaaaaactgaagaccattggcaggatagagaaagagggcataggaatcacattcatcggatgccagaacggcctggaaagtgttcacctctccagaccatgtgtcnccaggcctgtcctcctcc

SEQ ID NO: 2572 - DNA, 736 bp, Rattus norvegicus
  Genbank Accession No. BQ190717
  misc_feature (1)..(736): n = a or c or g or t
ttttttttttttttttttgttttctgtgtgtgctgacaatttattgaagcttatctgatcagagcttgcatgaatggacatacaacatcaaggcttttgtaataaaagacaatttgaaataaatatgtgtttaaaaaaacctatgtcaaacactaatgaataatcgacatttacaaattttaagaaaatcatttaggttaataatttttatttcccccacagttaaatagctctctttaagcaggagggagagagacagacagaaatgaagtcatgcccacagcacagtcatgatgttactcttagtgagggactctttaccaagattaagacctagaggagtatctgaggagaatggttaccgagtcgtctggaacctgggagagcattaggagagcgaaaacaagtggcaaagcagagagaatccttagatggaaagtccgttccccttgagaaaaattaatgaatacccacaaacttccatttttagggtttcaatattttcatatcagtttaacctctacccccaaatccaaccaaacaccataaaaactaagttgtcggataggcttagctggctgtactccctgtttagccttccatgcctttacagccaatgacaggaatgtctgtnggtgtggatggaaccggcgggaaaggaggattgtgcctcttctctgtgtgcagcactgcgtccacgctgtcctgtgggcggatctcagtgcttatgtgagct

SEQ ID NO: 2573 - DNA, 751 bp, Rattus norvegicus
  Genbank Accession No. BQ190922
ttttttttttttttttttaaaagtatccgatctctttattctcaaaacattataatactacataaaatccaagaggtatggggttggtctttggtctttgtggctttagggaaagcagaggagcccagaacgtgtctgtcatcctcgggatgtagaaagatactgattgaaggcatacatagatcccaagtgtgctgggaaatgggctccagctcttccagaggaatgaaagttaatttgagaaggcaactaagtaagaggaccaggcatcggagcagtagaaggatatctatcgggaaggtgaagggtaggcacctcctctttcctttctgctagactctaagaacagggactagcgacccagcaagtgaccaaagtagacagctacttggacccccctgggggagcaccagatcactccgcggccagtcagttggcacgctcacggggtggaatgctctccataagaatggagacaaactgctccaatttctgtgcagctgctttcccggcctccagaacttcctggtgactggccttctccaagttgttgtaatccatgacaaccttgttagtaatgagtgagaaaccaaagacacggagcccacagtgtctcgcaacgataacttctgggactgtgctcatgccaacagcatctgctcccagcatccttagcagacagctctccgccacagtctcaaaggtgggacctgctgacattatgtaggtgccttcttgtagttctcgttgc

SEQ ID NO: 2574 - DNA, 747 bp, Rattus norvegicus
  Genbank Accession No. BQ191054
tttttttttttttcttttcttcagcctcatcatcactgacttccttgtcacgttccttctccacaaagagagtaatggggtagccaataaactgagaatgtttcttcacaatttcttttattctcctttcctccaaatactcagtttggtcttcttttagatgcaagataacctttgttccacgacccattggttcacctgtgtctgtcctcacagtgaaggatcctccagctgaggactcccaggcgtactgctcgtcatcattatgcttggtgatgacagtcactttctcagcaaccaaatacgcagagtaaaaaccaacaccaaactggccaatcatagagatatctgcaccagcctgcaaagcctccatgaaggctttggtgcctgacttggcaatagtgccaaggttattgatcaagtcagccttggtcattccaatgccagtatccacaatagtgagggttcggtcttgcttgttgggaatgagattaatgtgcagctccttccccgagtccagtttactagggtcggtcaagctctcgtatctgatcttatccagagcgtctgaggagttggaaatgagctccctcagaaagatctctttgttcgagtagaaagtgttgatgatcaaggacattaactgggcaatttctgcctgaaaggcaaaggttcgacctcctcttcctccattggttggtcttgggtctgggtttcctcaggcatcttggcagaatgagcacgcac

SEQ ID NO: 2575 - DNA, 748 bp, Rattus norvegicus
  Genbank Accession No. BQ191086
  misc_feature (1)..(748): n = a or c or g or t
ttttttttttttttttttaacttgaagagtcatttatttctgctcctttcaaacaccacgttgtccaggaaacaagtcccccatgtgcatctgaagtggcagagtagcccacacgccgtttcaaggcaaagcaccgctgcagaactggccagtcgtccaaattatctcagctctcatgatacacttctcgatttgcattaatttctgaaaatcagaaatatcatgtccaaaaactatgatgggtttataaaaaaataatcattgtattcaataccaaagttttaggaggagtatattttctttaagaaataaaaaactaagaaaaaatgccatttaacacagctggtacactgggataggtcatcaggaaaaatactgtagtgcacttgtctctgacaccacgacttccagcctagctgtgctgtgcttgctagggtgtcactcactccatgcaatggttacgccactctccaatcttttccacattgcacagggagtggttcagcctttacaacttaattaacaggagcaaagccgggatccactgatttcttctcaaaaggtactagcccatcaggtagcccggcaatttcattctcatgaatactctagccatgaagaaactcagtagaacacagacgaagccaataaaaagaagaagaacctattgagttttggtatatttggtgcgttggatcggtccaggattatganacctaagctcccattgtgaagagaagctaacgca

SEQ ID NO: 2576 - DNA, 678 bp, Rattus norvegicus
  Genbank Accession No. BQ191104
  misc_feature (1)..(678): n = a or c or g or t
ttttttttttttttttttggtgactatacgtttaataaatcaagtttggaatcccaagcctcaaacgtctctcggggaacttctcagtaagatacacgtttgtgtgaatggattcaggcattcccatgtatttggacgatggttttaatgtccacctagagaagggaggggaggtggggaaactaaacttctaagataaatagagatgaagactggatgagagctaatcagaagttttccaactttatacatccttgacgttgctacaaactgtttcttgagggtctgctttgacagtaaccattgtgctcgatccatctgtactgcctctctaggcacagctcctcctgtcgctgcctcaccagcctccgtgtctccggggtcaggccattggggtcacgagaaaacacaaaggagtagctgtctgcacaggtgccatccagattctgcaggcggcaggaatactgcagagcgaaggtgtcgtagtccgtatcgatgatccagtggtcatcgtttcctcgctggagaaaggaggctacaccccagtacttcatcttgaacttggcaggatcttctgtgtctgtgaaagtgcccaccatgtctgcacacacttcccagttgctcagaagacggactcgtcncttggctgtagcgctcatatgaccctcgtgccgaatt

SEQ ID NO: 2577 - DNA, 717 bp, Rattus norvegicus
  Genbank Accession No. BQ191212
ttttttttttttttttttatacaaacactttttattttgtttttaatttagaacatgatacatattcacaagatttacactttatatcataccaaagcaatctagaaacactgtacagagcacacttgaacatttagaaggctatatataatctgtggtaaagtcataggcatcgtcttcttcactcattttatccaagataaaggatctgtcagatggtttacttgctgttgattgcccaggtgacatctccctggtctcttctacaggagtcacatctgagatctctgcatttttttcaccagtaacatgttcttgatcatcaccatcctgttggtcttctgtctgttttggtgactcttcggggatgtccttttcttctagtattccatttgtcaggcccgaagaccggaaaaggattttattagttaaatgagggcccttgaggacttgtatgctgtgtgcattattcttttctagttcttctagattaaagcccctcttcatgattgctgtaatattctcattaaaatgaggagaatgattccaggatgcagggggatggcagtagtaacctaatgaggcacctgtccactcagaccatagcagcttagcagcactttcgacatttgggcttccacctttttggtgcagacctcttctctgagcaagtttagtaaaaaaatccagagaatccttataccccgggacagtata

SEQ ID NO: 2578 - DNA, 733 bp, Rattus norvegicus
  Genbank Accession No. BQ191228
  misc_feature (1)..(733): n = a or c or g or t
ttttttttttttttttaatgcaaacaccaaacttctcttcctttggatacagcagagaaattcaaaaaaggaacgaacaagaagcacgtgttggagaaggtgctgtggggagcaccaggggaactgttcacactgagtaacgccttagctgagctgtgctcacagggagaaaggacattataaacacaaagaaatgttacaaaccagacaagcttccctgtggaggagcaagcagtaattcatacttgaacatctgagtaacagtaaaaactggagttaaacagctattgaacttaagggtgtggcagaaaaggcccctcctccattggccccggttggtgaagtgctttgggagtgaggtaaaagatcaagagagaagctgtgtgagggacagtgcagagccaggcccagagaggctgcgagcagagagaaggggccaggcgcagctcgcaaaggctctggtctgactgtcaatggcagaaccggtcagcttctgcagttgggacgtcactgggtggatgtcatgcacctgctttccccacagagtggatggacagggcactgggctcgagccctcaatcttctcgtaggtaggctcctcttcctggtccgctgctcatcgctncttcctgtgttttctggcgcactcttgtgtctgcactctgccagcttggttccgcttctgggagagctgggcactcctgcactgcgacttcacactggatgtgatcct

SEQ ID NO: 2579 - DNA, 737 bp, Rattus norvegicus
  Genbank Accession No. BQ191779
ttttttttttttttttttgcagtgaaagtaaatgcctttaattagtaggacagattttcaaaggtctttgtcattttgacaacaactgacagaagctctcttgggaacaattgaccattgcacaaagacaagagcaggaaaagaggtttagtggtacttgtgagccagggcactggccactccagccaccaccttctggaaggcagcctgtgcactcggggtgaattccttgcccaggtggtggcccatcataatcacaatcatattgcccaggagcctgaagttctcaggatccacatgcagcttgtcacagtggagttcactgaggctggcaaaggtgcccttgaggttgtccaagtgtttcaggccatcatcgaaggcgtttatcaccttttcgccatgggccttcacctgggggttacccatgatagcagagacagaggacaggtccccaaatttagaaaagtacctctgggtccaagggtagacaatcagcagactggcaagggactcagcgccaatttcaacagggttcacctttccccacaggccattaacagtagccttctcagcatcagttaggtgcaccatggtgtctgttcctgaggttgcgagtcaacacaacagtatcagaagcaaatataagaagcaactggttctgtgttaccattctgatgttggagcggccgctaatggacgttttttttttttttttttttctaagtcattacttttta

SEQ ID NO: 2580 - DNA, 772 bp, Rattus norvegicus
  Genbank Accession No. BQ191841
  misc_feature (1)..(772): n = a or c or g or t
ttttttttttttttttttgcattaagaatgctttatttacattaaaatatgagttacatttccaataaaacaggaacaatttatattgtatctacaaaatttctacaatatatgctgtactttaagtgtgccaaaaaagctgaggaatgtcctatcaaccctgcgtagtctgaggcactggccctgaagatgctggtgtttaaattgggcagtcatagacatggatctcctggtcatctccaacagacacaatttttgatccatttccattatattttactccccaaacctgatcctggtggtcaaagaaggtgtgaatacaggtccttgttccaacatcccagacctttacacttttgtcggatgaactggaaacaaagtgagtgtcatctggacagaacgcaacattcaatacccaggatgcatggccactcagtgtgccagccaaattggcatgttgcacatcatagatcttgatgtagccatcatctgaagccgtgacgaggagctgggagtcaggggaaaaggtcaaggatcgaatgggcatcgcatggccttccagcgtgtgcagaagctttccagttgcaatatcaaaaatattgatgatcccgtctatggctccgctggccaggtattttccatcaggactatatgcaatgctaaggatgaattttcctctagtgtccanagagtattctttttttccactttccacaccanaaatgttcactttccccatgtgagttccctgttgcagatgctgggagtccgg

SEQ ID NO: 2581 - DNA, 792 bp, Rattus norvegicus
  Genbank Accession No. BQ191931
  misc_feature (1)..(792): n = a or c or g or t
ttttttttttttttttttgaaaaggctattttttttttattcaagtaactgcaaataggaaaccagagggggagccccaggctgggacaaatactggccacccctcccccacaacaaggggaggtggtcctatacccttttcccatccaagtgggccccccctcctcactctgctgcagcatccacggggcgggggccccatcttccctagcgtggggtactcggtaaccagcctgctgctgcacaccagcccccccttcccctagagtgtattgtgtggggggtacaggcaaaatcgggaggatggacatctggcgctggtagcagcaatggtgggtgtctaagaatgaacattgaacaaaaaacacaacacaactgtccagaggtagtttgtgaacagaggaaaaggtggaaccagaaccttggggggcagggaggagcaaaaggagagggggggcaaggcgagctccttggtgccctgctanaggaagagtgtantgggggaggcgcctgttggagccccgtctgccttaggtggaagtgctcaggacctcactcgagatgggtggtagcgcccatctgtcttgtcccagggaagagcagcaaagtgggtggagccaacaccatcctacttcctgttgtccagccaaggggctcagccaacctggtgcaggattctcagtagggtggggcaggagggactgagaaacacccggtgacgcttgatgggggaatacatgctgggacctaagcttccctgcactgacacactgctngcgccagtcagcatcg

SEQ ID NO: 2582 - DNA, 702 bp, Rattus norvegicus
  Genbank Accession No. BQ192325
  misc_feature (1)..(702): n = a or c or g or t
ttttttttttttttttttggagggacgagaatgtttatttgtcggcaacgtttctgatattacgaccatcttaatttttcaggtcagctagagcactaagcttgattgacagcacttccaagagttcacaatttcatggctaaggttccgttcaaggtaatatggttattaacttaatataaatgaagctttagaagaggatagaaaacgcaacttagagatactagactgagagacgtgggaaggtctgtcagacagaacagcagaacactgctttcattcgagacagctttggtcattagcacacactcgtgtgagtaaggcagcgtggcaggcaggcaggcattgaacgtaagtaggcgtggtgctgaaggaagctgatggtgggcagcaggcgggcccagggcactccaggcagctcctcagtcatcctcgcctccacagaggagcagcagggccttcttatagtctccagatgtgtcgcccttgatcatagagtacagggacgtggcgaagttcttcctaaactccttcctgatgttaaacagatcaatctcactcctcgacactatgactctgatgagggtgtgatcgtccgtcccagcacccttcatagcatagtanagggtctctgcaaggtaggcaggtatgctccgaatanacttcacgacagccaggagtangttctccaagttccctgag

SEQ ID NO: 2583 - DNA, 681 bp, Rattus norvegicus
  Genbank Accession No. BQ192419
ttttttttttttttttttgagttttaatcaagtttaattcttcaaaagaattattctcaaggaacaaattttaaataactggatcagcatggcaaaaaatcttacatcatacaaagtgcagctctgaggacagtaaaacagtaagaaaagggggcacgggtgagccttagtggcagagtgtgtggcatgcttgatattcatggggttctacttcaaccctatccttgaaaaacaaactatcagaaccatgggtaataaatgtaacggggcacagaacttgagcacgtattcattctgccttgcacatctggcttcatcatggaattcgctgagagtgagcagatcaaaatgagagtgcattcatctggatgagatcccttctgagtcactgtcaaataaaaagacgccatctttgtcaggtactccagctctggcctgagtagccatgatggactaaagacactgcccgggtacagacatgggaaagaagagcagatcaggaaacagggatctgctctgcggaggccctgggagggccctggagcagagcacaggatgtggagcaggcagccacctccaggacccgggagcactctctcccccgagatcaagcacacaacctccaagttctgctgttttgcatccaggacaagcttgatagttcttaggtaactctaaaca

SEQ ID NO: 2584 - DNA, 687 bp, Rattus norvegicus
  Genbank Accession No. BQ192465
ttttttttttttttttttaaaaacaagctttttaatcaaagtattctcataactgaacttggataggcccacttgcccagcaggttgcaggtgatgggttcacattttctaggctcaaggatgggcggcctctgcataccacaggtgtctgagtggcagcatggagcttgctgggcaggaggtaggcgcagatcaactgggtcagctatttaaaggtggtctccagcactggccaaaggggcacttgaatgaagcactgtcacataggtgccccacaagcaagcccagaaaagcagctcagcctggggagcctggcgcctctcccacagtgagggccaggccaggcagagggtgctccacgtttgtcaggaagggctcccttgttcaaatcacattcataggcacagcttcagacgtcagcaggacatggagaaagcaggctgacccggccacagccccacatgacccacccatcctctttaggtgctggtgtttcaatgaggccctgaggggaatggccagctgtcttccacccaggaccacgcataggcctcccagcttctctctccccaacagggcactgtgcaggaagtccagaaaaataactcataaaataaaaaacgaggcactgatgtccaggcaaactctggctcaggggacccacctgaagcacatggtccttctttt

SEQ ID NO: 2585 - DNA, 665 bp, Rattus norvegicus
  Genbank Accession No. BQ192633
ttttttttttttttttttcgggtcaaactcatttccctttattaaagtccaagttacatggtttgatactcaaaggaaaatttgttcaaataaaacatttccaggcaactgtttcaatcaagtagcaatagcagttaagtccttgggaagcccatcgaagggagtttacactttgtcaaggcccagttcctctggagtggagattcccaattcatttaaagttggtctaagttcctggatgacataggggtagatttccttatgaggtcctgctttgtccttaacaacctccaagatgcgaacagcactagcaaaatcatttaaccgtctacatgccctcaaagcagcatcaatgattttgggctcaggaaccagatcatagccaacaagtgtattcatccctttacgcaactcccaggcatcaatgtctggcttgttgaagtatgtcacccagcgagcatcaaactcctcatctgtctcatgtgacccatgagaatagcagcgaatggaacagacagcggcagcggggctgggagccgagacggggtgcagaaggcctcgggcggccgcggctgcggtacagcgacggagggcagcggcgagcatgacggcgaccacagcgcactggctggggctgaagagaagccggcctcgtgccgaattct

SEQ ID NO: 2586 - DNA, 742 bp, Rattus norvegicus
  Genbank Accession No. BQ192724
ttttttttttttttttttaactttgtaattatatttatgtacagaaaacttaagtgtacatttaacccagcttagtggcgagttctttagcctttgccttttccagcttggcaatgcgagccacagacttaggacccaggacgttgcctccccagtggcggcggatctcgtcatatctgtcattataattggtcctaatagcttccaccagcttagccagagcacccttgtcttccgagttcacctgtgtgaaggcaacagtggtgcatgtcttcctgtggaccaggcgccccagcctggcctttcccttgatgatgcagtagggcacccccatctttcgacacagggcaggcaggaaaaccaccagctcaatggggtctacatcatgggcaatcaccaccagctgagccttcttgttctccaccaaagtggtgactgtattgacccctgctcggaggacaggtggtctcttagttgggacgtcccctttgccagcagctttcttctcagcgcgggccagcagcctctgcttcttctcctgctttgtctctggcctgtacttgtgggcaagcttaagcagctgagtcgctgtttgcctgtccagggcctgggtgaactggttgatggcaggaggtactttgagccgcttatagaggatggctctttgccgctgcagcctgatgtagcggggcatttgacgaagcgcgtgagatctcttttgggctggatgtcctgcccaatg

SEQ ID NO: 2587 - DNA, 661 bp, Rattus norvegicus
  Genbank Accession No. BQ192757
  misc_feature (1)..(661): n = a or c or g or t
ttttttttttttttttttccagcggctcagaactttaatgagttttacttatttaataaaagtgtcaatgtgatgggaaaaacaaaacacccagcaaagctccagtcctcgtttccacctcgtctcagccaaacagaaagcatccttgtccccagcacagaatggggtccctgggcacccctgagctgtgtggaggggactcgggatgccctatctggggaagggaaaggtggggctgagcctggcacagcgctgggagaagggagtgggcacggcaggcttcactctttgaacttccactcctgtcgacacatggggcagtgctgctgcacctgctgtgcgttcagccacttgaggatgcagtgcatatggaagcagtgagagcactgtccccacaccaggggacagtcgtcaccaggcaccttacagtctggacagcagccattgaacgccatcctgcagatgccgcagttctcatcattggctacccagagccaagtggccacaccattccaacacttaattttcaccttcatgacagcagagtctgtgaccagggcctcgcttttanaaggaattggaagagtgacagtcactaatcctcgaagttacagctggattgcagacgccagctccttaggagacagccttcctcgtgccg

SEQ ID NO: 2588 - DNA, 774 bp, Rattus norvegicus
  Genbank Accession No. BQ192877
  misc_feature (1)..(774): n = a or c or g or t
ttttttttttttttttttaacataaataaaggctttattgttcagttcggatgaatgacagactggcataagctcgattaattgttccacacatttaagaccccaggatgacagcaaaagctatgcttattggcaatgggcaacagggagggagggggtgggaaggacctgaaggcctctgaagttcaagaaagctatcgggaccgaaaccaacgtcctagaagcaggtccaggatggaaaagggatcatccaaagctgaagatcttggaggatctggatcacttctggaactgtcatgggcttcttgatgggtcactgtggtctctctccggccctcactgtccaccacagtgcggtgttcctccactgtcccatctggcttagtgatcttggtcacagagatgcttttgaaataggatttaggctggggttgaagaagtggacccagaccttcctgggaaacctgggagtcaagatccttgtcctctctggctctagaatggggactcacaggccatgtatcatccaacctatgaaaaggtccctgggacccccaatctggagctggtttggaggattcaggttttgcatgactctccaagaccccctcaaagatcctgggttggtgactatctgggtacttaagcattgagtcacgaagtgtctgcccctctcgcaatctcacaccaggtgtttctgactcaggacctggaagttcactgtcttcctcctcttcgtcgtcntcatcatcgtcatcatctcgagtcatccct

SEQ ID NO: 2589 - DNA, 706 bp, Rattus norvegicus
  Genbank Accession No. BQ192942
  misc_feature (1)..(706): n = a or c or g or t
ttttttttttttttttttggaacaccagcaaatccggtactttattaagacatcttaggcttccctgcattttcaaaaacaggaatgctctattgactgaacacatcaaagggtctctgcagagtccttgggggccagccacaggaggtgtcatgtgattctgcagtcccagagcatggcagctagtgcttgcaatcacaggaagcaggcagtcggttctccatctgcctaggggagggtatccttcattcttttgaaggactgccttcaagtcacagctcaattccagtgtgtagactcggtctctaggactggggacaaaggcagctgccaggtgcaacagtttatgaggctccgccttttatatatgccacgggagcccgggctctgggagccagaagcccaagctggaccaaccgctgctgtgggctgatggccttagcagccacataatcttccctttgatgtccagggtcaatgcagtcctggccccaccagggctaggagaaggtgtatgaaagagaatctcactgtgatctgtcctgtgaaggaaacagcaataaaatttattacccagtcaccacagtcattctgacaggagttctcctagcctctgacctccacttgagagggaactttcagggaggacagggacaagactgaagccacgcctcacaatcctcgacctgnggtgcacagtcacagc

SEQ ID NO: 2590 - DNA, 740 bp, Rattus norvegicus
  Genbank Accession No. BQ193155
  misc_feature (1)..(740): n = a or c or g or t
ttttttttttttttttttaacggttgggtaaaaatatatttccccgctttaagtcttggcactagtgatatatgcataggtccctggcaccacactacattaacagacaccaagttgctcggcaggatgctgagcccgcacttccatacttgtcggaacagtatgcttcacatcaatacaattattttagttcataaaaaaaagacacgtgtctaacatgcagcttacatacatgacaatctgcattaacactgaaagattacacaacagtttagaaaacattggttatcttcaaacagcaaaaaaaaatgacaattctacaactacagtttaaggcattatcagcatattttaaaatcaagaaatagacaaaagttctaatgctgttcacagcttaattttcaatttatttttaaaaattcccttcatacctacgtacaaactagactctgaaggtcatgattcagctaacgactccataataaatgttctgtcaatagaactaggactttttggaaccggacaactccagacacttgtgaatggcaaaggagagggattcagatggacagttctggtaggaccacacagagacagtactatgtgggtaggggacgcccgaataccaactctgcagaacacttaggggtgtcagaaaagtgagaggacaggatggagaggaagcgagagctgttgctggtgagttgcanaataaaagaggaggaaaacaagaacccaca

SEQ ID NO: 2591 - DNA, 747 bp, Rattus norvegicus
  Genbank Accession No. BQ193323
  misc_feature (1)..(747): n = a or c or g or t
ttttttttttttttttgtgtctcagaacattttactggcaacactgactgtatcaaacagacattcctgggaatggtggattctcttcctatccccagagaagcataacaggaaacagacacagaacagaggggggtactgtcttaccacgggatcagcacagcctcatgggggtgaatgcctgcgccgggggagaggtgcaaggtgcccttgactgtactccccaggggttggtctgttacgcaataggtatttacaggagggttagacaaaatagttacctactaaaggtatccaaaagcggcctgagaaagtctggttaaaatgcataaccttgtattgctactaatgggagtagtcagttttatatcttttaaaaataataaaaagattctgttaaaaaatatattttttccagaaagatgttgatttgaactctaaaaagcagtgtggagtcgtcatttttcccttttggatgaagagcctcttctccatgttcgctccctttctggcttcaggtctatcctgtcccctctgtgaagccaggccgtgcagctggctctccccactggaagtccggcctggagcaggcacagaacacactagcccggctcgtccagtggtttggccagcttgcgcgttctgagaacccagccacgggtctccctagctgctcctccaaggacaggattagctagctgcctttggtttaanctggaggatgctgctcccaaaggaactgccttt

SEQ ID NO: 2592 - DNA, 690 bp, Rattus norvegicus
  Genbank Accession No. BQ193368
  misc_feature (1)..(690): n = a or c or g or t
ttttttttttttttttttgaccaacatagaaaaatttattgttcaaaatccttctctttgaccaatagcagaaagcagcccaatggggacagaacctagaggcacatttggtcatttttctgtgtgtggttatagaggggtgtttgaatgagggtgatagggccttttagggacccacacacgatacacttgggcaaggctcatgtgctaaggcaaagcaagtcatgtcagcctggcatgaggtgggacctcagggctttttgaccttgtgttctggcaccttctggaagctaagcaacatcaggcccgcattgatggcataggtggtgatgcaaacaatgcagaaatcatacaggacaaagaacaggatccaggccaggtacagagaaccagcgacagacaccagggaactcaggatcagtaggatagaggcccaacgtcccctcaagcaacctaacaacagctgtatggtgtagaacatgcaaccaaatatgctgttggattggttgaggatgctgtcagctcctaacacatgctccaccagcccaaagccccggccccaccgagaggagaagacgcgggaacagctgatggccgtgcccacgtcgcagagcgcgcggtaatcctcattgcgggcgcgcgccgccttcacgtgcagtgcgtacagtgagagggctangccagcgaggc

SEQ ID NO: 2593 - DNA, 735 bp, Rattus norvegicus
  Genbank Accession No. BQ193427
ttttttttttttttttttgataacagcagttgtggttttattgtgtccaacaaacacatcaataaatgaacttcaagcctgagcctgtaggtgccctgattctccttgcccaggcctaggcaccagcccccttctcacctgttccggggaggagtgggtataggaggtggcctggctgtagtgtctaactcacgtgaggtgtgcatatcagaagcacaaagtgggcaccggatgttgtgggttataagctcacttgatagcacaagcctctgatgaaaggcctgtcagctcctaggaagctgctactggtttgcctggttctgttcaggcatctgaggtaagaaggaagggctaggggcgtggcttagcccaccttcaccgggcagcaggcatataaatacagagtataaatatagttgggctactagccgaaaaacaaccaagaaacaaccaggagagacggacactagccatgtgggcaggtcaagactgtgccacttgcaccactgagcagggtgcactcctgccccctggtgggtatgagaggcttgtccagcctccagggctggtaggggtagcaccttgaagaggttggagcaggggcagagatacacaggaggcccgagccaccagctttagaaaaatcacatagtcacccgcagctctaggtaatcatccaagctctgtcaactcacagatgaagactgacgctcagagaacagcccctcgtgccga

SEQ ID NO: 2594 - DNA, 751 bp, Rattus norvegicus
  Genbank Accession No. BQ193435
  misc_feature (1)..(751): n = a or c or g or t
ttttttttttttttttttaaggactaagtaactgattttttattttaatacacagtatgagaaatgaacctgtaaatcaactgaactgtatggaaaatgaaatagcaaataaattagacccatgtttaacacagaaggtcagctaaatgttcaaacttaaggctgtcatggacacagcaattccatagtcttctttaaagggtgaagtctttcaaatacagctttgctatgaactggtccagagttcaacagcaaatgggaatgcttaacaggggtggtgatcagggacacgtttccttggtgccgctttgatgatgttgtccactcgtagaatcacctctgctgcttccgccgcactcaaaagaacctgccgcttcacttgaaagctctcggttatacccagtactgccatatcaccaatgctgccttccttcatatccagtccagcagttatacggccttcactgtgagcagctcggagctgtgccaccagatctgcactgtcatagcctgcattgtcagctatgatcgttggcaacattctcagggccttagcaaatgactccattgctacggcttcttttcctggggttctactggcaagcattgtcacagcatgagccatcagcatctcagaacaacctcctccataaactgttctaggatcttttacagtttgggcaagacacanagggcatcatgcagagatctttcagcctcatccanaatttgctgagtggcacacgaagta

SEQ ID NO: 2595 - DNA, 708 bp, Rattus norvegicus
  Genbank Accession No. BQ194980
ttttttttttttttttttcaactttaaagaatttattttcccatttttagaataacattattgtaaagtccacagttattgcaacatctgcattgcttaaaagtattcctaagaattttgttaaagcatatttttaaaaaacagaaccaaaataatgtacatttttatctctaaacattgtgtcattaaagtccatatactgtcttttgtataaatcaatgtgatgttacaataatatacatgatctgattcttatcttaaaggctgctgaccatgtatgatatccaagatagactcaatgcctttaatgccagactcagaaactgttatgaccctagagaacgagggaaggctgtatgcacaggtgggagtctgatggcttagctatttgcagcatcggcttggcgaggccatccgtcctcctccactccagagtcatagtcctcttccgaggactctttcgatggagcccgaatgtatcctggttcctttttgccttctactacttctttgtcaacctccacacatacaatgtcagaattaggaacttcaaacattggttctagtaacagcttttccattatcgaccgaagacctcgtgcacctgtttttctttccagtgccaatctagctatggctttcaaagcatcctcagtaacattcaattcacacttatccatgctgaataaggcctgatattgaggaatc

SEQ ID NO: 2596 - DNA, 627 bp, Rattus norvegicus
  Genbank Accession No. BQ195809
  misc_feature (1)..(627): n = a or c or g or t
ttttttttttttttttttaaaataaaagcatgctattcaatcgatgaaggaaaacatcattcgctgagggctcttgcccctcagagcccataatcacaggcctcggggctgtcctgtaggtagagacttaagtaatcacggtaggtcttggcatcaatgaagtgggatgatgccacagggtcttcctgcatggttgccatccagagcttgagttttggggtgtggtctatacactcattgagctccagtgcttccagtcgctgaaaccacggccaaataagataatcgatcattgagagcgaattcccaccgaagaaggctgtcctcttattagccatagcctcttctagcttgctgaactctttcttcagttcttcctttatgcccggatggtcttcctttctcttcgccctaataaaactcgtaaccagagacggcacctttgagaataactcaaaggtcatcttctggcaagctttctcgtacgggtcatctgggaataacttcttctccgggtatgcttcatccaggtactcgcaagtgatgacagattcagtgatcaagtgaccctgagtgttctccagaaccggcaccagcccaaagggattcttctcanagcctcgtgcc

SEQ ID NO: 2597 - DNA, 775 bp, Rattus norvegicus
  Genbank Accession No. BQ195918
  misc_feature (1)..(775): n = a or c or g or t
ttttttttttttttttttgatgtcaagtatcttaatgtttatttttattctttacatccagcacttgaagaaaagaaaatgacatagtgttttagaaacatagtccttcatgattataactcatcaataccttagaacacacaaggacactgtgagttaatgactacactaaaaaataatgggaaattcagcataattaacaaaaatccaagaggaaatttcaggaccttgatcagaagctttcactaagtgctggcactatatgctacttcatttcactaagtgctggcgctatgtgctacttcatttcactaagtactggtgctatgtgctacttcactgtagaccaagcttcagggcaggctaagaaatcttaaccctctgaagacatgatctaagaaatggggaccaagcacttgtagagaattggtagccatcaagaagtccctagtaaggacagctatggaaggagctggccacctttaacctgaacctgtcttaaaattacaaagcccatggagcagtacttataaacacaagcatggtgaggttttgccattctataaataatcttcaggattccagctggggctctcttttggcatgagaagcttcaggtaaacagcagacataggatgacctattattgatggaccttctcanagtactcttttgaagctgttggacttggcttgatcgtaggggactctggtgtccagttggctgggcagactctccatgggtctcacanactggaacgctttacanacggagt

SEQ ID NO: 2598 - DNA, 779 bp, Rattus norvegicus
  Genbank Accession No. BQ196576
  misc_feature (1)..(779): n = a or c or g or t
ttttttttttttttttttgatacagccagctgaggctttattttggaaaatacaattgagttgggcattggcatatcccagataggaaattcctcccaaggttggccagaggtttagggctggtactctggctggtccctagttccctgcactctgccatacagctgtctccccttgacccctgagcagctgcaggacctcaggctggcaatgacttcagtggccattcacttggacatgatgtcagaagactcagacaccagtttcccatctcgggtttcaatcttcttcacgaccacagccttggtgcggctataagtgctggatcccccaacagaaccgaagccgggctggaaagagctcattccatagctgaagccggggctagtgagtcccccgtaggatgaactcagtcctcctgcgtagccactggtggtcttcgtgtggatgctcatgttctgcatcccagactccagcctgctctcctcgccctccagcagcttgcggtaggtggcgatctcgatgtcaagcgccagcttcacgttcatcagctcctggtactcgcgcagctgccgggccatgtcctgcttggccttctgcagggcattcttcagatcctccagcttggcattggcatccttcacggncagttccccacgctgctctgcatcagcaatggccgcctccagggttgccctctggcctttgagggcgtcatctccngctgcaggcggctgatgttacggttcatctcagagatctccgtcttcgagcgacgt

SEQ ID NO: 2599 - DNA, 673 bp, Rattus norvegicus
  Genbank Accession No. BQ196657
ttttttttttttttttttccattctgtattttattactgaaatacgttgtcttacccaacccacccaaaaataaaaatcttacccttgtcctctaatctttcccttatccccagtcccatccccggccctgcacaagtgccccggatttcctgcccattggctatatcggagtgtgtccattatgtagcaacgtggaagcctctgtggagagcacagagtgggtgaaggacccttaaaaaggtgctcatttgagagccctggccacttgctcataggccagctctatctcttcatcgtcaggacaggtggaggcgaattcttcccgagcgtaagcgttgctcaagtaccgatgcactccacggaacgcctccgggatggtgaatcctctgtactttttgcacaccacctggactatgtgaagctttggcagcaggttgcagtcagccagggtgagctcattgccatccagaaacttcctctgagagatgccctcatcctcggcgctggtttcatccacttcttccgggaggggggatgtcaagtaattgtctagaaccttcagggctttcaggagtcccttctctaggttgtcattgagggccgggtttgagttcttgatgtaggcagaaaacttggcaaatatgtccagccccgaggtgttggattcggggt

SEQ ID NO: 2600 - DNA, 762 bp, Rattus norvegicus
  Genbank Accession No. BQ196676
  misc_feature (1)..(762): n = a or c or g or t
ttttttttttttttttttggggttttgtttaatttttatttcaaaagcttggatagcttcaatatccaggtcgtggcaaaatcaggacacgtgtaaaataccttacaatacattagattcccaaaaggtaccaaaaagtacagtaaaattaacacttccattactggaaatgtatgacacaaataatataaaattaaaaggtgaaaaaggtgacactggtttcctaagatacagtttactctttacaaccagggtccacaggtccaggctgcagagcggcagcaggaagcagaccctccaatctagaacagggtaacctggtaataaaatcagccccctaatgccgctctgacctctgagacgccacacgctgcctacaacaactagagctctggaatagtaaacaggagagtgatttccgggggaaattttaaataagatgcacatgggacaggccataaaagtttgccaagttaaatttggtacataattgtgttcactccgcgtccaaacaaagcgtgtgcggtcgtcactcggccgctcctgctgcctctcagtatggcttgtagttattctgatgaccaccacgtcgctggctcttcccgtaatttgtactaccctgactgtagtcgtagccggggccgtagccgtaatagccatagggcgagtagtcgtagccgccatagcccgngccgtagccctgctggtnagccgtagcctggttccagtagttgccgtagccctgattccaactctgactct

SEQ ID NO: 2601 - DNA, 677 bp, Rattus norvegicus
  Genbank Accession No. BQ198735
ttttttttttttttttttgaatatactttctgatcggtccctgggtacaaggaagatagcagactcatgtcctcccaggagagcgtcatggatgtccaagggccttacacggagctggagaatggaacgacctgctttccacccacataaacctcctcaatgtttcggtcatctcctagatagaggaacttctggataacagcctcagaaatatcaccaacgaaatccccacaaaacagatcaatgggagagtccgatgctctggggttgatcaagagggcatcaaaatccttgccgacctcaaagtttccaatttcacgatcaagccccagggcttggcttcctccaagagtggctagtctgaagacttctttgagggtgaggcttttctcattcaccttattaattaagaggacgttggaaaccatcactgctcttcggatggcgtcaagcatggaataggagtaaccaccagccacatctgtcccaagccctatcttcactttatgcttcaggacatcgagcacgttcagtaagccactgctcagcgacagattagagttgggacaatgtgcaatggatgctcctcgttcactgaagacgttcagctcttcttcagaaaggtagcagccatgagccatcactgttttgtttgtcagaagattgtttttatcata

SEQ ID NO: 2602 - DNA, 863 bp, Rattus norvegicus
  Genbank Accession No. BQ198880
  misc_feature (1)..(863): n = a or c or g or t
tttttttttttttttcttcaatttttaaaaattgttgttttcaaaatttttgcaaacagggcatgatggttaaaaaaatattttgtacgaacaggagtgttattttagaaaaatgcaccacatggctgcaaataaaaacagtcagagcagctcttttcttcggctgtggttagatgattttttgttttctgcttattttggtacctcttactcccaagaaaaagggctgactcctggttacttatttttatccatgacattcaggacttcatccaaaagtgagggccccagatccaactgcagggagagcagggagccggtcaggtcggaaagggattcttctgatttagtctttgacttccccagctcgcaggaggcaggatgctcaaacatgtcgtccgcgggccagtcggagtactgttcagacaggctggaggagtggctgtccctgccctggctggactgagacgcggaaccactggagccccacgaggtgtctccctggtggactgtcccgttctctaacagactacctttctcctcaactttctcttccatgacaggctcacagctgagtcttggcaacttaggacgcccaaaggactcctgcttggaattaacctcgtgccgaattcttggnctcgagggccanattccctatagtgagtcgtattaaattcgtaatcatgtcatagctgtttcctgtgtgaaattgtatccgctcacattccacacaacatacgagccggaagcatnnaagtgtaagcctggggtgcctaatgagtgagctactcacattattgcgttgcgccatgccgcttcagtcgggaactgtcggcagctgatatgatcggcacggcggg

SEQ ID NO: 2603 - DNA, 653 bp, Rattus norvegicus
  Genbank Accession No. BQ198890
ttttttttttttttttttctcttcaagttttattgtgcctcttgcatggtgcagatagttttacagttcttttactataggaactgagctgtgatccaaacaatcaatgaacttattccaacctcagtaaatattcataaccatggaagatggcatagcacttagcctacagcgatgacagcatagacctgggcaggttttcagttatgtccagaagatcatcccaagtgattactgaaagccaacattaaacaaaaagcaacttgtttaaaattcctgattcagtatgaaactctgaaatcctccaaatgttgtaattcccactaaggcatgggatgtattcggaaagaggaacattaaaccgtcttaacacctagtaacaattttgcccttcaccccagccttcaaaaccaaacttgattttaagttttccaatacatcctatcaaaggtttgtaccctaatgaggtggcttatttcaacacacacccgggcttctggtgcaagtcactgggtccactataaagagtgctaaacgtaaaaatatatcacaagctcacactggagttctataaaagaaaatgtttcaagcttccttttctctctccctcctcagctcaaaagttcaaaagctaatggtaaactggaggaaag

SEQ ID NO: 2604 - DNA, 783 bp, Rattus norvegicus
  Genbank Accession No. BQ199059
ttttttttttttttttttcagttactgcagcacttttatttctctttacacaatgacgtgttgctggggcctaatgttctcactgaacagtagaaaaccaaaatttgtcatttcttaaagaattgagtacaaaaaccttacataaattaaaaggatgaatacatttacaggtgtcgatgcaaacgttcccaactcaaggcaagtaacaacccatggaggtcaggagggaaaaaaccagaacagaaactgggtcctaaggctcggactttcccaccctgttagactggcaagaaaagaagtggtaactagttcaggaacccttgccagcctcgggaaatcctggaagtctgctgttggttaataccctgcacagatcactacatggtgctcacagagatccactaggctggggactgactgacttttccacagatctccccagccaccaagtgaccgagccacatgaactaaggactaaatcaagatatgcacagggtattaaacatataccaagggaacagttaacttgaatacaaggtcaaaaatcagcaacaagttctacgatccagtgctgatatcagatacaagcttcaaggacaaatttcttttcaaaggcttattccagtttcatgaggctagcatgaggtgtgtacatttgccagggcaaatcgatacttcagaatcagctcatgcagcagatgcctggcacctgctcagtccatctagaagcatttgcggtggacaatggaggggcctgactcgtcatactcctgcttgctgatc

SEQ ID NO: 2605 - DNA, 724 bp, Rattus norvegicus
  Genbank Accession No. BQ199143
ttttttttttttttttttcagaggtaaaactttaatctcagagcgcccttcccgatccccatcccactctcccgcacccaagtccagggccagaaaatgaggccccctggcccccccaccttgggtgggagagggccttttaaggcacctgttagggtcgggggacaggaagctggtactgtcctgggtacaggacaagttttgatggacaggctgtcgtgcggtgaaacctataggggcgttagacgcagaggaggactggactgtcccctaggggaccggatgtcaggactcaggcaaaggaaaaaagaaaaaaacaaaaacaaaaacaaaaaaaagattcattaacagccctagtagtgtaagaaatataaggcctccggccaattctgggttagggagggcttggccacactcccaggaggccgggaccaatcggacaagggaactctggaacggaagctggcaactcttcggacactggctgagcagagccagctcccgcagctgggctccgccctggggccgcgagtcaaggctgtgcgggcaaagcttctgttgctaggcaagaaacggagttgaccctctgagagtttagaactagccccgcccaatcggagcgagccaatcccgtaaagaattgttctgttgctgggcagagcagacagtggcctcgcgtgtgccgaggcattctgcacgcttaatattttcgcttcagcttctg

SEQ ID NO: 2606 - DNA, 617 bp, Rattus norvegicus
  Genbank Accession No. BQ199398
ttttttttttttttttttgaggacagatttgacttttagttggtggcacccaaccactgtcctgcttctgcaccccttcccgcgtaaaactcggctatttatgtgtacaaaagtggagtgcagggagggaggagttgcgggaatcaagatactacagaccaatgacatcatccagctggaagtcagcattggagcagcagtgggcattgggatgctgcattccagtgagggcatccccactgggcttggtggccgtcgtctcgccgcgctccgcgtccatgacgcctaacactgcgtccagcatagaggggcccaggtccaggtggaaggacagtagcgggtctgcaggtgaaggaactcggagaccaggcacagaggcctgtggaactgcaggtggagggacagaatgtggggccacaactggtggggctccagcctccggaggtggaccacccccgtgcctattcaggaatgaggtgtctccgaaggcatcgccactgcttcccacgtgcaatgtgtgcctgaagtctccaaggggtgctgagatagagagtgctccacgctccagtcgcttctttggctgtgcagggcccactgcttcaacaacgccatctggt

SEQ ID NO: 2607 - DNA, 673 bp, Rattus norvegicus
  Genbank Accession No. BQ199445
ttttttttttttttttttcatattaaacttgtagttttattcaggtttgatttttaacaaatgtgtcagggagaaagcccacaggaaagggtaaagcccatgggggcaaggccttcccagatgcctgaggagggatcgtgtcccctccccccctcctcttcttgtcacccctatagaggggtttgggaagagacacaggcagggaagggggctggtccccagtctgtcagtggtgcttgggggtgaaggactatggagaacaggggaccagatgggtttgagtgggataaaggacacaagaccatttgccagaatccacagctttctgattccaaattgaattaaaaagaaaaagggagaggggaacctaaaccacaggcagtacccactccctttcccccatcagggctgcgagagaagaggcaggtagcttcaccaaggccatggctccctcatgcctggccaagggagctaggtgaagggcagggtctccccgacagtttgaaggggtgaggaaaaccaaaataaaacgtcaaataaattggataggagtccagccaagggcccagccagagctgggggaggggcctctgtaggctcatggatcactgctgccaccaccgccaccctgggaagccagttattttgccatgggcttgattgcaacagctgc

SEQ ID NO: 2608 - DNA, 769 bp, Rattus norvegicus
  Genbank Accession No. BQ199571
  misc_feature (1)..(769): n = a or c or g or t
ttttttttttttttttttgatttcatcatgctgtttaatctagcatgttgcttagaaaggcttgttgtgttgagtacaaatactcctccagcatgtctcctagagaccatttcacccactgctctgtttggctgctagcctcttgtctctctcttcagcaatggtaaggcggattccttttcctcggggaagagaaatccacggtttgttgcccttgccaataacaaaaatgttggaaagacgagtggcaaagctgttgccgttggcatctttcacatgaaccacatcaaaagagccaggatgtctctccctattggtgattacaccaattctccccaagttagcacctccagtcaccatacacaggttcccagtgtcgaacttgatgaaatcagttatcttgcctgtttccaaatcaatctgaatggtgtcattcaccttgatgaggggatcagggtatcgaatagtacgggcatcatgggtcaccagatgtgggattccttttgtgcccacaaagatctttctcactttgcacaacttgtacttggcctcctcaggtgtaattcgatgaacagcaaagcgacccttggtgtcatagatcagacggaagttctctccagtcttgtcaatgctgatgacatccataaacccagcagggtaggttatatcggtcctgactttcccatcaatcttaatgaatcgctgcatgcanatcctttttacttcatctccagtcagggcatacttaagtctgttccttaggaaatga

SEQ ID NO: 2609 - DNA, 709 bp, Rattus norvegicus
  Genbank Accession No. BQ199703
  misc_feature (1)..(709): n = a or c or g or t
ttttttttttttttttttatttaaaaaaaacttcctttaatcaaggcttgtaacatggaagagatttgtcagttaaaatggaaagtttccaatacattgaaacataaatccacaagtcatcataaatacaatacccaatagtaaaaaccacaatagcaaattcacaccatccctgtaatagccatgatctgatttcacatgcttctgacggatggcaaaatggcctgctggataccgagcacactggggctttgaggtcacactcatctgacagggctgtggcattggtggctcaactccagaagcaaagcaggtaccagcacattcaaacagtgtatcctttacatatcaaagtgagaagtaagaaagcaacacggtcacgctatcagaaagatggtggggagtaaggacagctgtgtaaagctcgaggcccaaagtcagttggttgctggcttcatttctttggcttcttgggcagtggccgccggaacagtaagatgtgaggttctggttcatggatcatatagtgaacccatccctgactctgctgaacaccgagatttctccattcagattcagacatcaaatgggttttagggaccagcttggctatgtccttgggcaacatgacatgccggtactcgaattcctcgtcgtcgtatttgtccgaatagtanatttgtttgtgagacatgactgctctgcccgt

SEQ ID NO: 2610 - DNA, 788 bp, Rattus norvegicus
  Genbank Accession No. BQ199766
  misc_feature (1)..(788): n = a or c or g or t
ttttttttttttttttttagaataaacaggcttttattattcacatgctcggtagaaaacggggtttagtaaactgggtggaggtgtacggcaagactctgagttggtccggaaattatttacacctngagggcagcagcactgttcgtcacttcaggcacagcacgtgcacttgtccgaggcacctttgcagacacagccctgggcacatttggagcagcccacggggcagcaggagcagcagcctggaaagaaagatagaggaagatgtcagagtaggcttcctagtccctccggtcgcacaggtctggcagaagacctgcttcttgccccaaaccgaatggcctcagacgtttctcagagccagctctgtaggagttcccccaccaccacccgagggtcccaactcactcttcttgcaggaggtgcatttgcagttcttgcagccgcaggagctggagcaggtgcaggagccgcctgtggaggagaaggaagacagcggtcagtaagaggcaggattacagcagtggccaacaccatgtgccctgctcaattcaaagtgctattcagaactccagggagcctagcccctcttctctcctcacagggtagggtaaggcttgggtctttgatctcaagacacaacggtctctcacctctcttgtagatcaggcaattcacaataaggttagtaacaactgggtctcaactcagatgtccccactacgtgggtgatcgggaaattatttgcgcgtctaaatctaccccaacccgacaggagcgttcgg

SEQ ID NO: 2611 - DNA, 500 bp, Rattus norvegicus
  Genbank Accession No. BQ199996
ttttttttttttttttttggggggagcatcctttattcataacaagggacaccattcacagagcagtgacctcacaccagaacactaagcatgagatgctccacaggtgtcagaggaccaggacacagcccacactagtgatgctgctgcttgaactgcaggccgcagtagccacacgtacccgtttttgtttctttgtccaggtttatatacaccttggggtggcccaaggctccaccccctccatcacaggctatgatacgatggtccacctcattcacaggttgttgtgctatcaaatcaatggcaaagttctcattcacctctttctgacgatctacaaaacgaatcctcctgtagtctttttcatcatacacctggccggtatgcgtgatcttctccccgctccgcgacactcgcaccccgaagccccgggcagccctagggagagccaacagccggcggaaggtcagcgccgccgccatcttgcccctcgtgcc

SEQ ID NO: 2612 - DNA, 701 bp, Rattus norvegicus
  Genbank Accession No. BQ200010
ttttttttttttttttttaaaatacaacgagagctaaaattttgtatttcttaataggttcgattttttttcttaaaaaaaggaattttctgaaatcagcaacactcagttccttaatccactttcagatctttccccaccagcatggcggtcacgggatgcatacaggctttatgttcctggtaggtgcggacagcttgatcgtgggatttgtcgaaggcagcgaggtccttgaatagaggtcgtgtaaatttcatccttccttgttcagttgccatctttagggccaaaggaattgcttcttcccacttcgattgaatgcagagccgtaaccatctgaatcgtatttcagaattgttaatggcattgaagttgtacacctcttgcattcgctttatgtgccccaagggaagaggtgccttctgaagcacctgtgccaggaactcattcagctgatgggatgagaggtccttcaggtcttcgatgctgaatgaatttaaatcttcctctttggcagtgacccatctttgacttaaggcgatgcaggcattcgtgagagtcacatcgtaattgggtttgacaggaggcaggccaggagcatagagccaggcattccaatcaacttgattgagaagatccaccttatctttaaagtgagcatacaggaaactcttccagtcatcagtggttacgctctggta

SEQ ID NO: 2613 - DNA, 658 bp, Rattus norvegicus
  Genbank Accession No. BQ200116
ttttttttttttttttttccaagtgtaaaagctggaggtttattgttatttggtgattaataaatcaaactgcttttgacactgccccaccagtatattaccattcacccgtacaaagtctttcaaccagacagactgaggcgtgaggcagagagcagacatgtgcacactgtgccgacctcctcagtcacgcctccaccccgacctttatccatgttttcttcctggagaaagtgtcagaaaagtgtacagcctggggccaacctgcctctcaaccttttagtatcaagcgacttacagaagttacagaattcaccttctatttcccttgattttacttgtctgaactcattctagattatttaacattataatttcgggcaaccatacaagagagaacacagtgacctaagagaatactgaaccagagtcagtcacatacatcactgaccctaacgttgtattttaactggtcccaaaggaatgtatcaccccaagagtgtgagagtcaggcaagcagaacgtctctggggaaggaagaaaggggctatagaacagccaaacttactgaaaattgttaaaacggctcttttccacccgaccgacactaccgtatgcatagaatcttcacagaatcagagttgccggtattacctag

SEQ ID NO: 2614 - DNA, 787 bp, Rattus norvegicus
  Genbank Accession No. BQ200444
ttttttttttttttttttctgttcaggaagcattttattgtgctccaaagacaagcgctcacacaggtgacagtctctcagagcagatcccgcatggccttgctgagcttctgaatcttgctctttgcagacatatcaacgtatttctctccaattcggacaatcatcccacccatgattgatgggtcagtcttgacctccaggttcagtatctggcctttactcaggaagctattcagcactgtctttaactcagagagaacagcttcatctaaaggaaacgctgtggtcactgtgcacggcacttctccacggtggacactcatgatggtggagaaggcagagatgacgccctgggtgttgcctaggcgaccattttcagcaagtaaattcatgaggttggccgtcagcggagagaatttttcctttgtagtgatgtccttcaggcttttcactttgatggagcgcttaatgtaggggttcagaacagcaagggacaccttggggtccttcaagagttgccccactcgcagcaactccttttccacctggtccagccttttctgcttagacgcagcagagtacagggcggttgcatagcggccttcgatgccgtagacctggacagggggccttacaagcttcgaaaagggcctgaccacagatgtgctgaaactccgcacctgtcgggacagcacggatgttgctggtgcggcatctcctcgttccgaatcttgggctcgaggggcaattcctatagtgagtcgtattaattcgtatcatgtca

SEQ ID NO: 2615 - DNA, 740 bp, Rattus norvegicus
  Genbank Accession No. BQ200506
  misc_feature (1)..(740): n = a or c or g or t
ttttttttttttttttttgttaaggacttctgtcttaaagctttattctttatcaaggaattcataatatagctaagggtgctcctgtggtactgtcagctcccaccatgacacttgatttcacagggtcattattgttgaagctattcgatgcacaacagcaacttacaatggttagattccataattcaatgtttggttttatataaatttaactgttcattcaaatacctattaagttcatcacaaattatataatttaaaagtctaactaagagatgctgtcaagccaaatgcttctatgatcaattatccttttaaatttcaaaattagaagatacatatgattctgtgaattttaatttttccaaatgctcctgaaaagaattagcagacttatcctccagttttgctgtttttgttttaaagcacagtccatttgtcacagaggtactctcttctggtgaggcagcagtcaccacggtgtgacctgtggtgtggtaccctccactcaaaggcattctctcttcccatgaaaaaatgaacaggaagggacaagcgtcaaggttccctgttccgctgattctcggtgcttccattgtgctgtgaatgcctgatttcaattgtacagcaacaacanatcccagtgttcattctgagaggctgtgcattccangaagcatacattagcagctcccaactcggtctcgaggaatgagcgcagctctgagccgtgcttc

SEQ ID NO: 2616 - DNA, 697 bp, Rattus norvegicus
  Genbank Accession No. BQ200772
ttttttttttttttttttaaataaaaagccacaaatttattgtaaatctagaagtaccagaacgtcactcatacagatcagcgatcctgtggtggttttcgtttttgttttccccacccttcccaacattggcacccctgattgttgacagactgaaaaggacacacgttttcctgtctcatgcagtagacgagagcagacccctcagaaaccagttataaatattaaaccatctcgaacattcgtagtacaaaatcgcttgtaaagtgctaaagtcagataacacctgcaaaccgaccctcgagcctagagcatttatttctcgggggcagccccacagagcttgccacatccatctcatttcactcgagtctgctctttcggacagacacgttgtcttccagtcactcgccctcccccaagttttacagattgtcctactagttctatggctgataagatgctgtattaaacgtggcgggtggtgacgcacctcaccacttccgtctcagtgcagagaagagattcaagcttgtgtgtacctgtaaccggactaggcttgttctacgtttccccctgagttgtccttaacaggaaagatgaggaaaggtcaagaagcgagcgtcgaccaccctgtcggggagacgctgtcacacaggtgaggaagcagccccctcatcctcaccctacccccttt

SEQ ID NO: 2617 - DNA, 761 bp, Rattus norvegicus
  Genbank Accession No. BQ201315
ttttttttttttttttttctcagaaagctattttatttggatttcacacacaccaaaagcagagaggagactgtggggctggccctctttgggctggagtctctggctcccctgggcagtcggttcccagcctcccaggcttgtcatcctctgaaggctgagtggggtgtctgccctgcaccacagctcttctccaaagccgaggaaaacccatggggaatacagggtaagaggacctaaggatcatgggatgggagcccacattgaacctcggtgaggtagtctgtcgcctgaggcccacacgggtcctgctgaggtaaaatttgtaagtttatttcagggacgtgggtcaggactcctcggtgccagagtcatcctcttcatccccaaagcagctgtcggcctcctccacttcaccgtcctcatagtagtcgtcgtagaagaggtctgagccctcgtcgggcgccggcgccttggtcttcacgcagtactcggccagcgtggtgggcaccttcacgccatcgcgctctgcgtccaccttggtccccaggacctgcttccggatgatgtccgtgtactcgcggtccttccccttgctctccttccattttctgtacatcaccgaggcgtccacgttggcaggcgagaaggtgttgggctcattcagcagggagatcacactcaggaggatggtctgacattctgcgtggggttcaccgctctgagggtagctcccactctgtgggtctcaactgggggat

SEQ ID NO: 2618 - DNA, 558 bp, Rattus norvegicus
  Genbank Accession No. BQ201317
ttttttttttttttttttacttaagcagtctttaatgaaaactgggcatgacatttctactcctgcatcttctcgatagtttcttccttgtatttgcccttctcctttcctacttgccgggacttggctttcctctccaggatcttcttgcggtccttgtccagctttagcctggtgataaccaccttgctggggtggatgcccacatggacagttgtgccgttagccttctctcgctggactcgctcaatgtagatgacgtatttcttcctgtacacttggaccactttgccaatctgctggcctttgtagtgtcctcgaacaacctgaacttcgtcgtcctttcgaatgggcatagaccgaacattatacttctgtctcagttctttggaaagcggagaagacatgatcttcctccgaatgtgagatggtgcattgaaatgccgtttgcggttcttgcttcggtcagaagtcacgaagggattgaacttcattttggcggctgcaatccagcgatggccgcaaaaaaaaaaaaaaagatctagtccgcctcgtgcc

SEQ ID NO: 2619 - DNA, 690 bp, Rattus norvegicus
  Genbank Accession No. BQ201484
ttttttttttttttttttaattttaaaatggtttcttaaatttatttattttttctttaaacataacacgaggaaggtgttaaaactggtgtaatagctcaatagaataagtattccagattttgggagggatgaagaggaagatattcagaacccttcaccagaatccccccaacttgaccatagtggattaatgatgtgctttgtggacgtggttagtcaatgacaccagcttgacggatctttctttctgcaccaaatcccattgagttatctggtccccttggctgacgaagaaccattagacgtggagcactggcatcatccagggtgatgttctttaagcgattaaccaaccgatcaggtcgaggagctgcaacagctttggggccttcacagactcgccaaacattacaggcgctacatttcccagtgcgctgattaaggatcactgagaattccacctcatctcctgcctgtagctcaatgccatcctgaacttccttcacatggaaaaagagcttcttgctatctcctacttcatagttaataaagccaaactgatctttcacacactccacagtagccctacgaaggggtgtgatgttgtaggccatagtttgtgcattttggccaagtacacacaactggaacttaacactctcccctttctgtaggcaatccctttgt

SEQ ID NO: 2620 - DNA, 726 bp, Rattus norvegicus
  Genbank Accession No. BQ201539
  misc_feature (1)..(726): n = a or c or g or t
ttttttttttttttttttagcagtgtaaaactgtttgttttttaatggcaggtcaacaaatatcctgaaacatacatagattctgatagtcttctaaccccagttgaattcaaacttgaaagtaacacacgcgagctaagggaagtcaatgttgttccaaggcacttactgaatctccatgactagacgaaaacaagaaccattagggtgaacaattagacagtatataatataaaaataactttttgcttacaatttacaaaaggtattattattacactctttgatctctgataacctgcaatgctggctacacgaatccagcaagtttaaaattcagaaacagttttctaaaatttcagggcaaataatttacaagtaagatacacaaagacttaaaccatgcagaaattcttacatcttctgttaataatattttaggacttcaactttatcaaattatatacctacttgccctgtacatatacaaaataatgcatacatgataaaacagcaaaagagtagtcctttaactcagtttatcataaaagtattactatattaacaggtctacaagcagcttgtaacagggttaagagacattaaggcaataatacttgaagttacaaaataaacaatatgtaatactttctcctaagtgtagtataaggcaggtagatggtcncagcanaaaatattaagggtacaatctacactgctatcagt

SEQ ID NO: 2621 - DNA, 701 bp, Rattus norvegicus
  Genbank Accession No. BQ201785
ttttttttttttttttttactgttcgtaagtaatttatttttaaattataagatttacaatgccttgattatgcaaaatatcataatagaaattaaactaaatcaataaaccaagagaaagaaaactttttccttaaatatcagtatttaagccatccttgtcccaacctcatcttataaagtatgctaatttcaaaggtttcacttgcaggtttaattgtcattttcagcgttttatggaactgtaattttttccattgctatcatagctagcgtttatgctgcaacagcagcagaatctcacaagtgcgatcaaatgtggaggtggggcccagccttcggttttatccacagacagaaatcatccacaggcatcaggagagcgagatattctcgagtggccagagtgtggcttagagcgtggtggcagccgctgtcctgtcgctctgatctgaaccagcagcgcgtggtggcattactgctgtggatagtatgactgctgcgggggctgagggaaggggtaggtaggctgctggggtcctgggtacggagcctgtccagggctctggtgatacaccggtgggtacggcatattgtactggccatatgtgtaggggttgtagcccatgggcatgggcatttggcaatacccgggatatcctggataggtgggatacgggtggtcctgagcctgtggaggg

SEQ ID NO: 2622 - DNA, 734 bp, Rattus norvegicus
  Genbank Accession No. BQ201911
ttttttttttttttttttggtcaggaaattttatttgaacattctaaagcaagaatgcttcagatgttacttaaatgtcccagacaggattaacaaaattaaatgtttctaaattacaaatttagctccagtaggagtttcataaaagaagaaaacaaccccctcccaaaagaagtatgacacacacattctgaagaaaccccaatgtttcatgcaatggtaggcaagatgtagaaggccacccaaacccatctgtttctacaccagtcatcaccccgaagagtcctccagtcaatctgtacatccaaatgcatccgggaacctacacctacaagacattattaatgttatatacatttattgccccccttggtttttttaataatttcttatgtaaagccttcattgaaacccaaaaaaaaaaaaaaaaggatgtaagactaacttgggggtagggaggggaagataatcactttagacattcagttaaaatgtaaattatctaaatctccaaatgtttaataaaaacaagcatcttctccatttaacaccttgcttgttaactgtacagtaaattgtattatagagagtacatctctattttcatactgtatcttctttggatggaattgagaaagctggttaattttaagataaataaatgagattgatccaactaagattaagatgacagcagatatattccatgcagaatttaatagtttttaatttgt

SEQ ID NO: 2623 - DNA, 722 bp, Rattus norvegicus
  Genbank Accession No. BQ201952
ttttttttttttttttttggcatttcaaatgctactgctgtgagtaggatttattttaagaaatgaacgacagctgatacaaaatgtttgcctccaagaagtatgtcatacttacaagggaaaaggtaattaatattgaacattttccttgttcaacggttctaatttttataagggttttataagtctcatagtcactaagcaggttctttttgaaaggtaggcttcatgacccatttgacttcgtgcctttacatgacatgacaaattattttattcaaattatgttttccaaaagagagggttctgtgctagtcgtctttgaaagttttcataccatttcagaaccacatttgctgggatgaacatttccgatggatttggtgtcatctgggcctgagagagagcaaatgatgaagcaaaattgtagaagttgtccaacatcttctgtgtgaactgtgtgaaggagtcaaccgaggacacagcggcactgcctacgggagtctgctgagccaaactgtccaacaactccaccgagattccaatctgggcaacagatggggttcgcacaatattcatggctccaaatgggtgctggcttccttctccagatttaagacctgatattttgaagatggcacttggcttcccattcgtgacaaatcctaggagctgccatactggcaccccatttgaatcaggataggaaaagtagacagatc

SEQ ID NO: 2624 - DNA, 714 bp, Rattus norvegicus
  Genbank Accession No. BQ202073
ttttttttttttttttttcactcaatagtattttatttaaaagttcacaattaaggcacagtaataaacaaaacacttaaaagcaacaaaagctaccttgaaagaaaaacatctagcatgtcaagggatggaggccatatgcgtaatatgtgtggaatgcagaatgcaagtgagactcagaatccatcatacaaaaggaacaggaacttctaaagtgttccaaaattttagccaaaggcaaatatcatgagtctatatgtttcacttggcttatgttaaaatctaaaaagaatatcaagaatataaccacttctgtgttctctgacatctgctgacatcctccaaaacctcaagcaaggatctatcaaagaaatccaatctcacattgtatattatgggaagaagaaatgctatttctaggttggctatgtaaatgagaatcatttcccaaaaaataccaatacacaaacatcataatgccattcataaattaaatccacattttattttaatgaaatttcatggtaatctgtccagttagtggactctgggtgtggcagaagctactttaaaaatgagagtatgtttagagtatagaatttaggagatagggcagcaactatttttacttcaattgttgttaaccagcaccatgaaatgttacaagtcggtctacaaaagataatgtatgaatggttggattccttgtgaaga

SEQ ID NO: 2625 - DNA, 720 bp, Rattus norvegicus
  Genbank Accession No. BQ202162
ttttttttttttttttttccccaacacaaaattgtaatttattcttgtcattattaggaggtcaaaaaaaatgtacagttacgaggatcgttttttcccaaacagaggttaaatatgagctgaaagtgtaaaaaggaagaggaatgtcactttacaaattattaaattaaaccaaccaaccaacgaaaccaaagaaccaaccccgccatgctgagttctctccttgtacaactctgtgaaatgagaacagaaaatgagatagaccgtggaggtggggaccctgggtagaggcaggacctggggccagggacagtgagggtggggactgctgggatgtcatggaccctggtcctcccacttagacctggttgtacctggtggccctatcaaggctggggaaaaggaggctcctgctggcctgcgtattcagcctctccactgggagacagagacactttacaggacatggggacaaccaccggtggccaggctggtgcccgccccgagagccagcctccactcttttgcgtctgaatttgcccccacatggaccctgcatctctttctgtctttccaatttgcccctcccaggtcccacttggcccctgcagcatcaaatggttgatcttagtcttcgcttaaattaaaaaattaaaatatatatacatatatatactgtacacacaggacaataacagagtgttgaaaagcctcgtgccg

SEQ ID NO: 2626 - DNA, 769 bp, Rattus norvegicus
  Genbank Accession No. BQ202840
  misc_feature (1)..(769): n = a or c or g or t
ttttttttttttttttttagtgtctgagaacatctttattaaggacagagtagggtcacagcatcttagaaagccttctctgccactgtggaaagagcagggtgagaccagggcacttcaaggaaccaggggggtgtgaattccttagccaacttgggtcaggggtgggtggctggctgttccacaggtctccctgccagcttggtcaaagcctgctccagggcagggttggaaaggacaaggcatgcaagcccagagggacaccactgactccaagccaggcctctgcttccagggcaggccatggttgtcaacagtggggctgagagtccctgagaggggctgctggcataagagtactcccatatgagcagagaacagtgagggtaacaggcaggtagagctaagcaatgagatagctggactatctttagattcagaaaagcaacatcaacaaaatggtggttggtttggacaattctgacagagtttggcattttattacaaatctgaatgtgagtgaaataaaatccattgtcacttttctgccaatgaagagacagacatagaaacacaggcccagggctctgaccatcctgggcatatggaaatctccagaaacctgccccatgcatacctagaactaaagcatagttcatttatgcaccacaggagccanacacttggnaaactaaagttacactgcctgagaggacatgtctcacttctttataggcaaactcaagagctgttttccaagtctgtgagc

SEQ ID NO: 2627 - DNA, 797 bp, Rattus norvegicus
  Genbank Accession No. BQ203188
  misc_feature (1)..(797): n = a or c or g or t
ttttttttttttttttttaacacttcaaaggactgatttatttttacaaaagtctgcctttgagccagctacagtcacgttcacaagggccaagcttcaactctggacacttcatctggatttcattcaaagccactgatcatgtgagcaatgtcccagttggtctgtgctgacagtggtccttctatctccacacctttttcagttacagtagcaacttgaaaccggttatacgaacgagcgtctcggtagtacagcactcgcatgcagcgctccacaagctctcgggcctctgtctgactcagcaccggttgcttctctagaacttctcgaagcagaggctgagccaagtatgcaccataaccagtggctagtgaaggggcttcataagctacaccaagcatgtccacataaccaagaaagctttctccaccagcatagcctccaatgaccatggtgttccacagagggttcatcttggagcggcgactgtacatggcccttgtcaaccatgaatggatagctctaggactatagctatgtccatctcccaacagctcctcatcaatcaccatctggccgagaacttgcttcaaatactggaaatcagcatagtctcctgaagcacctagcatagtgctgtcgttgactcgcataatacgagagatattgcggaaacgagccagggagccgtaggagcccagcatgtctgcagcaatcaccactccgcagtcgaacttcacccctagtacggatgtccagtcaccatggnngtctgggtcgagtgatgggacctc

SEQ ID NO: 2628 - DNA, 764 bp, Rattus norvegicus
  Genbank Accession No. BQ203253
  misc_feature (1)..(764): n = a or c or g or t
ttttttttttttttttttaattgtaaaaatgtttattcacaatccttgaaaggttaccattccttcagaaaattctttatgaacaaaaagccaagaaaattacaacagtagcttatgccaaaccaaaaatatacatctgatgtaatataaaccttagaaagcatgaacacaggcaatgtgaacagagtgcctttaaattatttccatgacacacctacaatttaaatcttaagatagatataaataatagcataacctaatgcatatttacatatcaaagtatatttatttgtatgagatttaaaaatgacaaaattatagatgtcatcgtatagcagttcaaatattgaaagggccacataagttttcacgcacagcaagaacttgactatttctacctgaccgccctgtactgctgaaagcatgcaccatcgctgctgaggagaggaaaacagcaagggagacagaatgccgtgtgcttcccaaagtgacactcagtcctcagccaaagcaaggaacgcagttaggaaacacttcccagccctggccttctctacagattcagacatgggtctttaatacgccgccattttagttccatcccacacagcgccttgcactacaaggcgaaggaaagggtaatacaatgggacctttcatatcagaaaggaggttatatactttgaaatacccgtattttaatgtcttcttaaatcactcacagaatatgttctgtgntaaaatctttcaaagatcactcactg

SEQ ID NO: 2629 - DNA, 559 bp, Rattus norvegicus
  Genbank Accession No. BQ203513
  misc_feature (1)..(559): n = a or c or g or t
ttttttttttttttttttgcctcagacgctagctgtagctggcaggcggttgtacgtgctccagagtcttcattacccgccgatccagtcgtcttcgcgtgggttccgctaagctcttctgagctgctcgctctctacacacgccgtcgccgtaatccgccatcatggtgaaactcgcaaaggccggcaaaacccacggagagtccaagaaaatggctcctcctccaaaggaggtggaagaagatagtgaggatgaagaaatgtcagaagatgaagatgacagcagtggagaagaggaggttgtcatccctcagaagaaaggcaaaaaggctaccacaactccagcaaagaaggtggttgtttcacaaacaaaaaaggctgcagttcccacaccagctaagaaagcagctgttaccccaggcaaaaaggcagcagccacaccagccaagaaagctgttacaccagccaaagtagttccaacacctgggtaaaaagggagctgcacaagcanaagcattggtaccaactcctgggtaaaaagggagctgtcactccagcc

SEQ ID NO: 2630 - DNA, 572 bp, Rattus norvegicus
  Genbank Accession No. BQ203545
ttttttttttttttttttctttcctacttctgctttattcaaagactggttcaggggacggaagaagggcctggtcagaaggcaagcccgacaggaggtggcttaacggtacttggaggtcagcacggtgctcacagaggcaaggaatttgtccagagaggcgtgcatggcaggtgtgaaatccccagggtggtggcaagccaaggtcaccagcaggcagtggctcaggaacttgaagttgacaggatccacacgcagtttgtgggcatgcaggtcgctcagagtggacagggcaccaggcaggtcttcgacgtggtctgcagctttggccagggcatcagcaaccttcttgccgtgagccttgacctgggcagagccggggcttacatcaatgtgagagaagtaggtcttggtggtggggaaggcagcgaacatcctctgtagggcctcctcgccatattcaccaccatggccaccaatcttcccccagcagttcttgatgttggttttgtcagctgcagagagcaccatgattgcttcctgagtctatcagaatggtaaccctcgtgccc

SEQ ID NO: 2631 - DNA, 694 bp, Rattus norvegicus
  Genbank Accession No. BQ203723
  misc_feature (1)..(694): n = a or c or g or t
ttttttttttttttttttccttctgccaaaacaaactttattgcaccaaaaaggaaaaaaaaagaaaacttcatttatgtacagtcagatataaagacatctctttgactcctgtgcatatatttcctcaacttaaaattagggcataaaagtcaggctgctgtgccagacatgctctgccccatggcagggccaaggagaagattgtcacttgaaagtgggaacacttaatggatgacagacaacactggacccacagaccaaaggcattctcagccctggactagctctgggaatggaagagggaaattggaagcagggtcccttctgaaatctccacatatgacccagcctccatgtaggcaaaacaaaactgctccccaagtgacctgtccctgtccagttctctgctttctgcccttccaagaggtccctctttgtgccctattttctccctctctctccaagggagtcccatgatccacaaggcagagacctttatagcagcgggcagggcaggtagttctccattcctcagggttggacactgaccagaaggcctgcatcccgtnggatcactaaccacccactgggagtcagaacagcaaacctgaaagtgtgaactgtactaaactgaccccgagccactgaaaacacttcttactcaaccagctgaagatcactgtagctaaat

SEQ ID NO: 2632 - DNA, 712 bp, Rattus norvegicus
  Genbank Accession No. BQ203955
  misc_feature (1)..(712): n = a or c or g or t
ttttttttttttttttttaacaccaagaaaacactttaatcaaactacagaaacaatggttatagtacagaatattcataagcaaaagatacaccatgttttaagtacttacaaagttacaaaccatttgcttccttaacattttctgttttttttttaagttcacaacacaagtatcagatttaccattttgcgctttttttttttgagggaaggggggtgtatttatcatcagctagatgtgctcactgtatgctccattatttatatgcaaggcccgggtgactggaagtgcagttgtcaggcattttaataaactggacagccatttgtttctgcacgacaaggcatctttacacaggagcaatcaggagaaaacaggaaacagccaagcactctgcactgcaacacgccaccttaacagctaaccagcattactcaactgctacacaactgcgcctagtgcacaaaaatacataagagaagagattagaattgtgtcgggtaaacaatcctttaaaaaaaaaataagtcttttcacctgaaaagtctttatacaaatttgggttcagattatcatttagacctgaaggtanataacatatatgagcaaattacaccaactttcataggtttctaatttttaaggagtgaaggcaatgttgagtcaatctgctgacagctttaggctgtatgtaatggctgcacacgt

SEQ ID NO: 2633 - DNA, 738 bp, Rattus norvegicus
  Genbank Accession No. BQ203970
  misc_feature (1)..(738): n = a or c or g or t
ttttttttttttttttttcaacatacagttctttattataataaaatattgaaaatctttcggagaagggtaaaccaatcttagtgatgttctacatttttcatatagttaaaaaaatcttagtagccacaaaccaaaataatgccaagtagctctcattttgccgatgttttacttccaaactccttattttaattttatgtgcattggtgttctgccgacatgtctatctgtgtggggtgtcaaaccacctagagctggatacagaccgttgtgagctgctgtgagggtactgggaattgaacctgggtcctctagtggagcagccagtgctcttgaccacagaggtatctctccagtccctatttccaaactccgagtggcttccctaacgatgacatttagggataacagaagtaggtgagtaacctttgtgagtagcccgttcagttgatttttgtctgagatcctccaccgtttgtatggtcgtcaaatcctttaactctgagcttctaagtaaagtggcagtattggcatcaaggtgtgttagagggttggaatgagacaccttggacanaaaaagctctttatatanttnaaatactatctaaatacatgtgatgcatatggtccaggcgatagaatctgggagaacaaggccatcagtgctgtgaaaagaggcttctttcttctcttggatgaaaatacttaacaccatgggttacgttggatatatgt

SEQ ID NO: 2634 - DNA, 762 bp, Rattus norvegicus
  Genbank Accession No. BQ204077
  misc_feature (1)..(762): n = a or c or g or t
ttttttttttttttttatatttttagttgtatttgataacatcccagtttaattcacaatcttttctgacatatatccacataaatttgaggtcccttttctgaaaatacactaaaattactcatgcttgcctgtaactttgtaaaatgttgatgagagaacacttacaaacgcacaccactatttaagcacacttactttctctttaaagaagcaaagtggctcaaataggaaccaagctcaagaaactacacaaaaaccaagtgagattaaaggtgttaacttcaccaacctgttgctcccatctgttagcatttttatctttcagacagggagtcactgtacagcccaggatggcctgctggagttccaggcccatcatcacatccaggttctcctctctcaaatatctgaaccctcggtgtgtctgggtttaaactctcccagtgttaaatggaaggctgccatggatggagatattgtcacaataagagacaatatagaatagagagtgtaaggcaagcaaacagcacactgggtgctggccatgctcacactccagttagaccagactacccaggctcgctgggctcaaaggctgatctggaccttgtgggtcattcttactttattgggttttcttttgttccacagttgctcgttccactatttttgtattatggcgaggccagagcttttgttagtctaagatactgagcacactcanatgtctgctcaatgttttatcttctgacaatgctg

SEQ ID NO: 2635 - DNA, 707 bp, Rattus norvegicus
  Genbank Accession No. BQ204208
ttttttttttttttttgtgaagggttttgtttgtttaatacatctgaaaagaattcatatacaaagagttgagacacaagaaagcattggttcggcactaacgaatctacaagatcaggactggggaaggagattacctaaacatttttaaaaactggaacttgcaaacaaaataatctgataaagtctctattaacacttataaagagtcatgaatctctcgccatttttgagagagcttcagccagttgttcaaggattcctcataggcatggaagaaaaaaaggggtacagccctgactggtccccatgttggttaaaagtatgctccccaccccacatgctcatagcttcttaatgaagcaggcctgtaacctcatcacctgaaggagatggcaatcaccagtgcggctgtgtttcccaacaccagcccttaaggaaccctgtgtatctcgtcttcagctgaatctaggaacactacacagtgagttgtaaatctatgctaagcatataagaaaatgactgacaggggcaaaagaactcttttaattaggaactcaatccatttggtgtatttcaaaaggtgcaatactttttttcatttagcaatgaaagaagttagaagttatccccccccccccaaatcagcaaatggcaaacaaatacccttgaaagtcacagtcacaggtagagtgcatcctagagag

SEQ ID NO: 2636 - DNA, 690 bp, Rattus norvegicus
  Genbank Accession No. BQ205182
ttttttttttttttttttgatgtgcagactttatttgaaatcttttctaagaaccatttctactcttcaggacagggacaaagatcgccctgtgcagaaagttgggaactgcacacaaaactgcagaagcaacatttcagctgaagctggggcctggtgggagggagggtcaggcaaggagagggagtcaactttagctgccactcgggtagtgtcttgtggtggtcacagacagtaggctgtctttgggaagtgtgaatacacaggaggtccattctctgcctacacccctggctgaggtgccatcaaatcaatgtcactcaagttcctggccagccaaactccagcagcaaagagtcccaaattgaggatcaagttcctccggaagtcgttccgatcggtggcgaagcggtagacgccgcgaagccagtctcccacgttgtctggaacctcggagttctcaccggccgagccggcggcgctcaccgtcacaccgctggaagccataacagcaccgagcacgtccgtaccggcagcgcgtcgcaccgagtcggcgcaggccgatcgcgcaacttccgaccccgcacttccgccgatcagagtaataagtgaacgagaaggcccgcccggaccgcctccaggagtccatcgagctggaaagcttggtcggaggtggagccccagctcgcg

SEQ ID NO: 2637 - DNA, 664 bp, Rattus norvegicus
  Genbank Accession No. BQ205235
ttttttttttttttttttcattttaacatcttctttaataagacattacagcacagtgaggtcccaagtgtgtcagctaaacatgggggtgagaatggaaacaggcttaatgtgaaccccattcctttccacaactaacgtaaatacagaatacaatcagatcagtcccttgctattttatatcacctttgaagacaccaacacagtttctaaacaaacttgtctgttaagataatctccaaattaaattacagagatgtttgagctgtcatttttctccttacaacagatttaactgaaacacaaaataggaccatgctggcaatccccatgctaagaatgaagatccatcaactattccctatcactgagatacagaatgaaatgtgtcttcagctgctcataaaacagttaaatacaagattgaaaatgttttattttgaattacaacagtgaaacgaacaaaaagaattaaactgaaaattgtgaacaggttctaaataaccagtttgttactaaaggaaacatacatctgtgtaaagcacttttgaaagctctaaaattgccttttaactagaatgtcactaagatccacagaaaaacaggtaaaactagtcagcaacattttagcagaggataaccattatgaaaggcaggaaattaa

SEQ ID NO: 2638 - DNA, 789 bp, Rattus norvegicus
  Genbank Accession No. BQ205260
  misc_feature (1)..(789): n = a or c or g or t
ttttttttttttttttttgaaaggcaagacaaagttttacttttaaatgattacaagcacaccaaataacatgtaacaagctgagtcctagcatctagtgacttgggttaggatgtactaacagcaacctggacaagcatatcattgtcctaaatgatccaggatagagcactatatggctggctgcttcttaggaattacaaatggctacttactactttttcatagataacgcccctgacctttaagaaagtagaagggagcaattcactccctttctttcttcaaagaatttttttttttactagactaataaaagaaaagtcaacattgataaccattacttgcacgaacacacaggaaggtgacatatacttcttatagatacacaaggtaagaagatgaaacttcaggtacgtagtaaatctgtacaaaaagctagatttgatactctcaaaaagtgaagggtcctacaacagtatagagacataatttaatgtcttccagaatacaattcgagctctgcaggtttcctattccacggggacagatcccatgccaacccacagagcaggcgcgtctgcctcctatccatttatgcggtagttttcatggatttctggccggatgtcacacacaaaggccaagaggttatccaggacttcatctctgttctgctcaaagtagttctggaggatggtcatcttctcctgngtctccttttccacctcactgctacaactgccatgggaccccaatgccgcagcttccttggncttgaactccttc

SEQ ID NO: 2639 - DNA, 704 bp, Rattus norvegicus
  Genbank Accession No. BQ205345
ttttttttttttttttttatattaatcaatcatgtttatttaaagtattcttaacatcaaatctttaatgggaatttaaaaaaaaatcagtaaacaaccaattcgattttcctattctagccatataagccagctggactttgtaaggaaaatgttctgaagcgtcaccgtcaaggactacagaaaactgccacccacagataaactgccacagtaagtgactacagcgtggctctgtcactcataccagacaaccccaaataaatactttatgaaaagaattaaagtctatcaaaaccacttaaaatagaatcttaaatgcagaaatcttaattttccttcagttgggccagaaaccaccacagaccctacggtcagggttccagggagaatgaatggaatgtttaagctcaggccaaccaacacagccctcaacttttcaataaaatcatttactcaggtatactgtaaataagaactgtggcaacacaggaagcaaaaggcagttggcaagtgaaatttctacaagctcatgaaaacaataccatccaaacggcagatggaaaaggagagacagttagtgcctggtcatcttcagtcgttcggtcgtgcagggtgtcaatcactgcttcccacaccaggatgttagtccacaggaggggccggcgggtcctgtccactgtgaggactggagggctttccag

SEQ ID NO: 2640 - DNA, 749 bp, Rattus norvegicus
  Genbank Accession No. BQ205364
  misc_feature (1)..(749): n = a or c or g or t
ttttttttttttttttttaaataatttcactttttaattttctgtacaaaatttctcaacctatgaaaataaagtttgtaaaagtagtacatgagcccgcccaggagctgggctcagcggatctacactatgtacagcctccccggggtgagagccttgagacagtatggcccccagcaagggaaaggtcaggaaaagccactaagatgcctacagagcaagagggtggcactggccccgtgcagcctctgcaatctccagatctgccactagaggtcggcacgatcctgactgcttgtcaggctcagcctctggaagaccacagccagggacaaaggtcctcaagggtactgggggaagctttggggtctagctggaagtgacagtggtcccgccacccaggcgcaggagcatctgctggcagtcaagcaggagccggtgatcgccaagcttctccacggtgcgcgctgcctcagccagcatgctcactcgctgcccgggggccgacaggaaggcagggggcagatagcaggaggccaacagcaaggcctctgtgtgctcccgccatgtgggtcgaggctccagctcagctgcagcgcctcctttgccactggaacctgcccgcctccgcagactgcggtccaggagctggtgtgtccgggcaggacttgctcctgccatcagccgagctgtggcctcatgtaggaagacctcctcatagcanngcggaagctctgtgccaagcgcct

SEQ ID NO: 2641 - DNA, 715 bp, Rattus norvegicus
  Genbank Accession No. BQ206026
ttttttttttttttttttcaaatgcagcatattttaatttgtttcaaataaagcaatatatgtttatatatatatttatataatatttcagaaaaacaccagatgttaaattctacaaaagcacatgtgtcttcagcagatcacgtttgtctgatcaagaatttcttgtttcaacattaactctctaaagacaaccaatgggtcgacatcacagctacaacgtaggttgctaactgagcctctgatcttcagccacatctcgattttcctaacaatgggtaaatactggctggctaacatgatgcaaagtcttgatgaggagaagcgacaacagatcaagcaaagccatgggagttatgaagcaagctagagcagagtactaggattagtaaaaatgattgcgagagaacgacacaaacatacaggtttgtatattctgattgactctcttttggcagcgaattgggtcagcaccttgggcagggaaccaaaaccaggcaaaacctgctctcttccttcccagctcaggccaccagcgtcacagctgggactgagagaaccgtggcctctgtggaaacttctattctagtgggacaaagattgcactgtgaaaccctaccaacattaccccggaaaggcctggtctctaagttgtctgcagcgtgctgccttcgacgggccttttcagaatgtggtgggggctctggggcctttg

SEQ ID NO: 2642 - DNA, 663 bp, Rattus norvegicus
  Genbank Accession No. BQ206933
  misc_feature (1)..(663): n = a or c or g or t
ttttttttttttttttttgaatataaattaagggtttattacaaaataaaaagtgttaagtttctccttgtcagtgattcaagaaaacaaagccagaagccttttgtggagccgaagccaggacctctgtgtgcaggctggtggtcaaaagccaggctcatgagcgggcagacagacactgattaacgacctctagcaggtgggtattctccagggcagctgccactcgctccttatctgcaagttgtttgttcactgcatgctctgaggcgtgggtgcccggcgtaatgtgcacatccatcttgaaccgctggggaagggatcgcagaagcttgactttgatagaaaggcctataagtgtggccatgctgcagtgagggatggtgggtgtgaaggccactgctactgtgctctccgggtcgctaacctgaattcgaacctgctctactacgttcaattcctccagtgtcagtggatgctccgggtcattaatggagcgaataagatcgaagatctcccgggcatcgatgctgtccggcacttcctcatcttcttcacccgccgtcaccggccgctcccccgatcgctcatagatgagggggttagcattctctaggagcccgcccgcgccgccgccaccaccgcccaccatcncctcgtgnc

SEQ ID NO: 2643 - DNA, 739 bp, Rattus norvegicus
  Genbank Accession No. BQ207075
ttttttttttttttttttcctactaatttcattgttttgttttgttttttaaataactaagtttggaggctgggagggggcaggcagagtatatacaggagaagtttaaattaaaacacaaataataattaagacacactgaatgaaggctaaggcagaagatggggaagaggcctcctgacccacagcagaagaaggcgagcctcccgtgggcacttcagggctttctcttgcagaagaccaatcggcgcttggagtgatagaaatctgttaggctggtctgcctccgttttcggccctgagatgtcccggtcccgcccggggagtcttcaggcctctcaggggcgtgagacaccagagtgcaagacagcgacaaggccacgtggtcctccggagctggccctggcccctgcagcagggccgaggaggtactgggcctcttgtcccctcccaggtcatcacggcggcgggacccagggctcaggtagatcttgggcagccctgggctccgaacacgctcccagacgtagttgccctccagtggcgtctcagtggcgaagtcaaagttccaccgttctcgggcctcctggagacagctcgccatgagcgcatcgcaatcgcggctcaactgctcactgtccacgggaccgaacagacgacggcatactttgctcctgtgtggaacaggtcggacatcaccaggatcggacatggtgcctgtggctctgagtgtctcgat

SEQ ID NO: 2644 - DNA, 696 bp, Rattus norvegicus
  Genbank Accession No. BQ207491
ttttttttttttttttttagaaaaataaaactctatttgtacaaatatacaagtccacgttcctttggccactttcctcttataacgtcagacgctggcctccaaacacacagtcatcgtagggcaactcatcttccgtgaattctgactccgtgtcatagctctcctcatcctcactctcgggcagcgtctgaagattttccagggtcagctggcccagctgctgctgtatccgggtacttgggcggccccacgtaagctggtagggggagtagccctggtaggttactctgttgacatcagccccacacttcaacaggagcgagaccaggtcaggattctgcaggtccactgcaaggtggagggctgtccggccattacagggctcctgagcgttgacatcagcacccaaagtcaccaagtgctccacgatgcccaggtagccatggatagaggctaagtgtagacacgtgtggccgttgtagttggtggcctgcaggacggagtggagatgctggggcgtacaggtctgagtcaagactgctacactggccaggcagccctgctcacaggcaagatggagaggggtatttcctcgaaagtctcggagctcaggatcacagccagctttcagaagtgcctcagcaattcctggctggttggtgatcacagccaagtggagtggagtctgctgca

SEQ ID NO: 2645 - DNA, 688 bp, Rattus norvegicus
  Genbank Accession No. BQ207778
  misc_feature (1)..(688): n = a or c or g or t
ttttttttttttttttttaagagagataaatctttaataaaactataaaccaaaacaagactgggaaatgtgtctaaagaatgacaccacaaacggcaggcagcttgttctttacaaactgtcaatgttaacaaacccagtctatgtgactgttaatgcagtaaccttgctaatcagactgaagaggggccaagtggctcacttgtgcccttggtggacacaggagcttgctctcatgactaagcacagggaacgacatcccactcctggttctattactgatctggtcaccaaagtacgcggagcacagaggcctgcagcaccagcgcatcaggcaaaggtgatggaaggttcgctgggctgccacacgctctcatcgtacagatcttctggaagttcttcttcgtctccatcaggaaagtaggtagggaacggcaggctcttacagaaatccttgtatgcaggcagcgtanagtccttgatcttcactaagcaatttctatgtccaggcacagagccattgacatagattatattgtgcttggtgttcactctccacaccttcagcccatacactgtcctgttttggtttcccatttgcccgggcattttagttccaggccagactctggcaatatccccagttgagatggcgccaggtctcctgtgggtctttgtttgaccgtga

SEQ ID NO: 2646 - DNA, 687 bp, Rattus norvegicus
  Genbank Accession No. BQ208594
ttttttttttttttttttgagaaaaccatttttattatcactgcccagcttgtgtgcaggattatgtaccaaatggccagatcttctaaagaacatctacataacatttctttcatgtttcaagagatgaaaataactgtacaaggttaagtacaaaagtacacaagacagcggacacgagaaaatctatgtatgagattttatcccacccgaagctttaatatatttgaaaagtagaattcatgaactaaaaaatattgtccttctatagtcctgtcaagtttaatggaagtgggtttaacctgattacaacactaacaccagtatcactgatctgatatttacaaaaaaaatcgtatttttcaataaattaaagtcaatgcaacacccatgcaagctagaacactagctgtttggtgaacaaggacccgacatcagaacaagtctataaagtcccaaattgatatttttcaaactgtatccattccacgcattgaagatgtgaaacccaaacccatccctcgctgtgtgtgggtctgtgatcttgccatttcatactgagcatcaagatttcgaaaaacttcttcttgttgtttcaaagtcttgtaactttcttcatcaacagagctacagccggcttcatcttcactcttaatgcccattaacttcctaaatttgacattttgg

SEQ ID NO: 2647 - DNA, 757 bp, Rattus norvegicus
  Genbank Accession No. BQ208612
ttttttttttttttttttcagttctactatcatttatttttttaaatatttttgaaaaaatataatttttttacaatattttcaacttaaacactattcacactgaacacgtatggcagcttaacctactcaaatatgaagtttaagaagccaaaactgttctagctttgttaaaagaaaacgtgtgctgcagactatagtcatgatggttattaacaaagcagggaagagcaccaaagtcacgccactgtctcttgagtgcttcaattgggttatgggttggtgtgggtcctggttagacttcacacggatggtatgatgcaatcaatcttcagaagacgcaagcctccaattgtatttcctcaagcttaacactaggagaacgcagcattcctaacatgataatacaccaggcaaaagtcagacagactacatcccatctgaccaccaccttgtaacctcaggcaaagacattcttgtgaaattactttaaaagttaacagattttctccagaaaaggttatttttgatggacaaatgcaactgagaaatctgtttaacaatcagaacttaatttaaacttacttatttacttattttttttacaacgtgtagacattaaaaagtgtcaactaatcctaagggaccagtttagcctcaaagacagacaattcagtgagatttggaggtgatttaatttggttctttgtcacaatcgactggtgcttcttcctgctgtctttacatcaagccatgc

SEQ ID NO: 2648 - DNA, 739 bp, Rattus norvegicus
  Genbank Accession No. BQ208962
  misc_feature (1)..(739): n = a or c or g or t
tttttttttttttgttttagaggcattttatttagataactaaaaaattagatgtccagaagccgtcagtgtacaatgaaagagatcaaaccagttactttatcatgtatttcctcttcttcacaactaagcagagaaaaaaaggcattcttcaagggaaatgtcagaaaaataggccaatatatttttcttctccatgacagaaacagctacaggagatctggggtaaagtggacactaagttggcttttcatcacggcagcaggctttggcaggcactaggtgaacagactcctcctgcctgcaccgcacgctcagccagttccctcacaggcaacactgtagtggttcgtgcactggagcaatccatgccccaacagtctgtcccctttgccacaggcagagtaactgaaggccgatgccggtctctgcttgttcagtccatcaactgcatggcatctgcggcacacgtctgacgctgctcaggccttcacttcaggagttgacgaatagatggaatctgaattctctgaagcaatctcttccagctcttcttctgctgtttctggaaatccgatctttggctttgccagttccccgctatcttcctcaggaagcacgcatttccacaggccgtaggtctttccaaccacagtttgccacaatctcagtgtcncatcttcaganacactggcatagagttcaccatcgggactgaatctcacacagtgaatggggc

SEQ ID NO: 2649 - DNA, 700 bp, Rattus norvegicus
  Genbank Accession No. BQ208993
  misc_feature (1)..(700): n = a or c or g or t
ttttttttttttttttttggagagccaaactttgattgttttatttaacctaatatatccaaaaatatcatttcaacaagtagtcaacacacaggctgtggacagattgcacatgcttttttggtaccaagtctgagatcctgtgccgtgttttacatcccttgggtccaacttaggcatggcccttcccaatccagagcactcctggcgttgtcacttggacctacccaccaggtgggccagttttaacttcttgaagagcccaggcttgaggacaggacacaggtcacagaacccatgctctgcagtgagcctgagagcaagtctgtgatgggatgagaaggccagagtccctgcatggccctcccactgggtcctgggctggctgccatactcttcatggactgcaccactgcccaacacagagagcagcgactgtttgtagaaggtgccatttgtacttgcttatcaccatgctgagtgcctgactccccagaatgctgagcccaaggcagagaacagagatctctcgtttctcatttcagactcaacatagttagcccatctcctcatggaaggaagagcactcttctggagggacaactgaagggcaggagctgccagctgtccanagctgtgtggccttgtaacagactagtgccagagacactgcaactagctttacaaagtgtcccagggg

SEQ ID NO: 2650 - DNA, 661 bp, Rattus norvegicus
  Genbank Accession No. BQ209253
ttttttttttttttttttaaggcacaggctctttattttcctcttttatctgcttagtgttgaacacagaaggtactgctcctgggatagaggcaggaaggctcactgtgaagtccactacaccttctcacacaaggtctgctccgtctcagtggcttctgtgtcactcccctttgtctcttccagttccaaaaaacttaaaacagggtagatggagtttgatttcatccacagttaaaaagcactgagggccaagagccacactgagaattaatttcttcttctttctatagagcatatctgaatgaagaaagacatttcctaagtctcaaatcagtgtctcactttcaaccataaaagctgggtccatccattacttcttgagcaaagtatttctctgttgaagtgggttcatttttcaaccgtgaatgcctgaatcccagtaattgctctccccaggatcagagcatggatgtcatgtgtaccttcgtaagtgttcactgcctctaaattcatagcatgccggatcacatggtactcatcagaaatcccatttcctcccaggatgtctcgtgcctggcgggcgatgtccagggctttcccacagttgtttctcttcaacagggagaccatttctggagtagccttgtcctgatccttt

SEQ ID NO: 2651 - DNA, 648 bp, Rattus norvegicus
  Genbank Accession No. BQ209494
  misc_feature (1)..(648): n = a or c or g or t
ttttttttttttttttttaaatatatataatatatatacttttattattcacccgttaactccataatatgccaatcacgagcgaggtttcagcagttccattcccttgatcatggctgcatgagcatggtaattcactgaaaacagggagaccagaaacatggctaaaggtgacgtcacgcagcccacgccatggcaatataattgtcaagttcgctggcggtttggtaaagccggttcagttctgttctgtttgccagcgatctcacatctgtgagagctggaccacaagtggagggttccgtttcctggtttggattctcagtggctttatccagaatctcactggcagctggttactgtaacaccaacccaaccttctcggcccccatgctcgggcacttccaattgtacaggtaatactgcaggttgccgtcccctatgccgaacttgagcttctccaggaatgttttgttctccatgagatccagtgcattgaatacgtcgaaccctttcattttggctagaacgagggcgtcgctcatgaggtctanaagaggggtctgggtgtggacgttgtanaaggagtatgcagctttcagactcttgtgggttggatggttcatgatggtggacctcgtgccgaat

SEQ ID NO: 2652 - DNA, 646 bp, Rattus norvegicus
  Genbank Accession No. BQ209523
ttttttttttttttttttctcggttcaatctttctttctttattaaatatcaactcttcctgcctaataaactgaggttcactttccctttcctcaggctgcagtaggtcacccaggaactccctgtgcgtctggcctgactggctgggtgctacctacagatcaccgctacctgggtcttccttttgcctcttccacagactttgtctcgacaaagctgaggaccttgtgcgcagactggaaggggaggaggaaaaacagtctctgcgagaaggatggcaatgcctctgggctctttggcatcttcacatgttcctaggaagagctcggctctggagccctgggaggcagagggaacgaggcaggcagtgtggcctgagcttcagaccacactgtcctaaatggatccacaggtgaaagcagggctcccaagacccagagtgatagggaggccactggccggcaggctttagcagggaccggcagtacccatccatttcatcagatgcagcttcagtcatgggcctcaatgactctgctccagaaggtagtactgtccaaggatgactcccattggtcaggatgttaaagaaaccccgggaaggcactctggagcagcaggatggtcacgcctcgttccgaattc

SEQ ID NO: 2653 - DNA, 609 bp, Rattus norvegicus
  Genbank Accession No. BQ209561
ttttttttttttttttttgcattttgattctttattttgtgtttttaattggctcaatttattacaaaggttcccgagaaggcgaggagaggcaggaaggcaatgctgtccccctgccttacatccccacagtgtgtatggaacagggtcccagaccccttccctaatggtacaaaacctggactagagggcttcctcaccttcacgttgcaacgggatggtctcctgccctacccaggcccaggtcctctgtgaccaagtctaaggtgcccagtgaggcatggcgggggtctcctcctccagaaggcaggagctgtaggtcagcataggcaagacagtcccggctcctccagtatggggaaccccgagtccaggtactcaaccccacaaccgctcagggccctgttccgagcagtgtggcttagtggaaggctacagccatggaaggaggtgccacgggcctgcttagcacaaagtccttcatgggcagcagaaacccaaacatttccactttctggctccagaggctgtggacaggaccctggcccgcagggtggcgagggaacatggtcaggctcgggcgcccagctctccaacacgctgccgcag

SEQ ID NO: 2654 - DNA, 721 bp, Rattus norvegicus
  Genbank Accession No. BQ209700
  misc_feature (1)..(721): n = a or c or g or t
ttttttttttttttttttaatagactgtctttttaatgagtatcttatgtacacacacacaccatacaacaagcttggttccattataattccatcaggtgctcaggtatgttcaatgagctgagatagagttgatgaagcatggcctttaggtcaggactagctgggttcaggcacatcttgtgtagaaatctaaggagcctggggcatcctctcccagttaacctaggaccttaagtagcagtgacctccccctcccccttcagacacaatgtgcccaccctattaacagtataaaaaccacaatacagatgtgaagaaatactgtcttcccatcccttcactaaaatgccaattaactacgctccctaaaccatgatatacattttacaataatccgtagaaaacaacagctaccagtcatgtacttctgcacagctcacatacatgcacagaagagtgggttcccagtcagaagtgagagtgaagacttagagcatccatggcttgtcctggagcagtggatccttctcccggtctcctcgggagaacggggcttttgcatggctgagaaaaaactcaggcctttgcccttgaccacgttcctggtgcagtttcctattggcttgtacgtcttgtgttttttgtacagcangatggtaaccatggtgacanacatggccaggcagccaatggagatcaggacacattcactgttctc

SEQ ID NO: 2655 - DNA, 698 bp, Rattus norvegicus
  Genbank Accession No. BQ209889
  misc_feature (1)..(698): n = a or c or g or t
ttttttttttttttttttaaagaacaagactgggttttaatactgtgtcaattccccttccgtcagaatagacaagagaaggcaaaagcttaaaaccaatctgtataaaagtaaaaataacaaaacctctagattctaggaagagttgatgacagccaagcaggcattccaggacgtggcactgggctcccccctcaaagggcaagttctcaagtcctggtttgcagagggagcctcagggccagctcagacagatgattcatgtcaggttgtttgcttcgcttcttgatgtagtccagagttttcaccatggtccttgtgtctgcacagccatgcctctgtgccaagtgccacaagttgacagagagttggttcagcttgttgttacgaaggtccccgtgggctaggatgctattgaagaaagagaggcccagcaagctctgtcgtttcagggcctcatccttggccagggttttcagatgctccaggatctgaaccatcgctgcctcacacagcttgctgttctcagccaggaacctggagtctcccccgtacaggctgtcattggagtcaactttgtctatgtggtaaagataggtgtcctggctcatggcagacagcaggtgcaggacagaggtgtagatccgaattttgtcgtcactactgtcctcncaggtatagtcctggataacgttgag

SEQ ID NO: 2656 - DNA, 715 bp, Rattus norvegicus
  Genbank Accession No. BQ209998
  misc_feature (1)..(715): n = a or c or g or t
ttttttttttttttttttgaacgggtactattatttattataaccagggcactccaccttccctcaggggatagatgaagtatacttgtcatgtaagtcagctacattgtcactggagacacggatccagccatcctcccgcacatggtagaggttgactgctcctccggagtaggcatctctgtaggtggcttggtagatggctcggcgggccaggtcataggcctcctccacttgtaggtcataggagtagcctcgatccatgactccaaacgcatacacggagccagatcccactgagaaggcggttccagagatcctgttcccctcactgtctacatagtanaggcccgggcctctcttatcccagccacagatcatggtgcccatggacagccccatgcctttgtactgatacaccatgttggcaagcagtttggaggccgccgcgaccgagatgcgttccttgttgcgaagctcatagattcgacactgtcgagccaacaaccgctcccagaagctgcaatccgctgcacccccagccatggtgcccagaaggtaagggttgatctctatcactttcttcactgtctgggaagcaatgtaggcacctgcggtggcccgggaatccgctgcaacaatgactccatgctgaaacttgaaggccagggtggtggttccatgaagcatttcgattcgtggctcctccgggaca

SEQ ID NO: 2657 - DNA, 554 bp, Rattus norvegicus
  Genbank Accession No. BQ210401
ttttttttttttttttttggtctcaaaccatttatttctcccgaccggaaggtggccatcattacgggtggataaacacagaacggggcgtgcagcaagactcgaagaacagcggtgcaggtaagtgaggcccgggctcaagcgaaggtggaaccgttccagcccacgttggctgcgttcatgtcgtaatagttgatgtagacccggtccgggctgatgtgcaggcgatcggacagcaggccgcacagcagcttgctgtagttgcggttctgggcgccaccgatcttgccgatgctgtgcaggctgcagagggcgcaggggtcgctcgtgccactaaaagtcatgagctggtccgggaccacgtgcactgcgatgtactgtgccggcttgccggtggcctgcgccagctgctgggtgagctcggagagaaacccctctggcacggaggcgcggggaacattggtgttcacgatgaacataggcatggtggcggagagactgcgagcgacggccggaggacggtgtaaagcgcggtgtgacccaagcctcgtgcc

SEQ ID NO: 2658 - DNA, 712 bp, Rattus norvegicus
  Genbank Accession No. BQ210435
  misc_feature (1)..(712): n = a or c or g or t
tttttttttttttttgttgctgaacgatattttttattagcttaataatctgggccagcccttagcattagtaagcttcggcactagtcacagatgttcattcgctgatgggaaacttccttgtcttaaaaaatgcaacgaggaaagggaatctacttcttaggggctgcagtgacagcaggcttctcttcacgggtgatgggaatggtgcgctcagggccagaggcctgtttccttggtccattcacagtgaggactccatccgatgacagggaagaagtaatggtgagaggatccacgtcggctgggatccggtacttcctgtggaactccctggagatgaagccatgttcgtcctggcgctcttcgtgcttgccgtgcacctcaatcacgtctcccagaaccttgactttgagttcctctggagagaagtgcttcacgtccaggttcacagagaacctgtccttctccatacgcatctctgagagcccagtgtcaatccagctaggtgcccgcaggaaggagggtggccgaaggtanaaggggctcagggaagtggctgtagagaagaggtcagactccaacaggtgctctccgaagaactggtcaaagaggcggcttggggagtggaaaggaaagaagggacgccggattcaggggtggtggatggctatgtccatgatggctanatgagtgtanagtcgcctcgtgc

SEQ ID NO: 2659 - DNA, 677 bp, Rattus norvegicus
  Genbank Accession No. BQ210438
ttttttttttttttttttactttttaattgtttaactttattactgtcgcaccatttatacaattacatataatttcaatgcatccattgtacattttttttattttttgttttttttttttattttccattttccaatgggtggtgtgttggtgtctgagacacaggtggaagaaactggagctgcaatgaaggcagacttttttatttttcatttccactgaccaataaacagaactacaggtgcacccaaccacggacatgcattaactcgtcatgagaaatctaggtaggctaagtatgatgagagaatgtttgtcactcccaaaaatatctggagaggaagaatgtagggttggcattgagatacaatgtggacaagctaagtgggctccgtctgaaagttggcattcatccacaaacgttaaaaaaataccaaaataagaaaaggctgtaaattaataaggaaacacagaaaatactgctttcataaagatctgattgccttggcactggccctgtgggcagaatcaaacgcctccctccccagctgcatcgcaggagagacgctggggtttttaaggatggagcctaggggacagcggttcaggtacagatgatgtactttcagacaatgatctctaaaatccaggactgactggtcaagttgactgaag

SEQ ID NO: 2660 - DNA, 690 bp, Rattus norvegicus
  Genbank Accession No. BQ210640
  misc_feature (1)..(690): n = a or c or g or t
ttttttttttttttttgtggacacacacgatatattttgaaaaattcagctatcgaaactaagtttagccttttctgttattatcaaaaggttttcttcttttaaaataaaggtgcaaagtccaagatttctttgagtgatggcaaacaaaacaatacatatatgatctaggacagtgagcttacggaatgacgcagcacgcttaggcatacagagtactcggaaggtaacttcagggcagagaatctgaaaaaggatgcgaacctttatggaacgctaagctctttactctgttgaatacttctaatgtcacaggagaaacagtatgaaaagccactgagcaaacagacagacatccatcctctggctccctcttccccaggttcaggaggacttgagctcttctcgagattcgcaggggggagtggcttctgaactgagggggctctccaggtaggcggttcctgcacagggctttcctgtgacggggtcgataactcggcccactttgaagatgatctctgccagttcgtgtttcacgtgctttgctcgtgggacgggcagagctctgaggagcacgatgtccccgacgctgcactgctgaagggcgtcatgagcaaagtaggttttccgcttattaaagtactttagtaagtanggatccaaaacaagtctggtcgctcttacttt

SEQ ID NO: 2661 - DNA, 741 bp, Rattus norvegicus
  Genbank Accession No. BQ210659
  misc_feature (1)..(741): n = a or c or g or t
ttttttttttttttttgtaactgtcccaaagggcacacaatttattaggcagcagctgggaaatcagcggttagacttggccacacgctccagttcatctttcttcttgatagcataggagttggaggagcccttggcagcattaatgagctcatctgcaaggcactcagcgatggtcttgatgttccggaaagcagcctcacgagcccccgtgcacagcagccagatggcctgattcactcggcgaagtggggatacatccacagcctgccgtctcactgttccagcccgcccaatgcgtgttgagtcttctcgggggccactgttgatgatagcattcaccaggacctgcagagggttctcaccagtgagcaggtggatgatctcaaaggcatgcttgacaattcgtacagtcatgagcttcttgccgttgttacgaccgtgcatcatcatggagttagtaaggcgctccacgatgggacactgtgctttgcggaaacgcttggcagcataccgtcctgcactgtggggcaggtacttggcatacttctccttcacagcaatgtaatcctgtagagaaatatcgttgatctgcacatcatcagtgctccatttcccanagagcttgatgtccggggtctctgccaccgcgggtgtggctgtttcccattcagtcattctgagagcgcaaccgggcttctcagtcgatcggcgcggacacgcgcagttctggcctcgtgc

SEQ ID NO: 2662 - DNA, 715 bp, Rattus norvegicus
  Genbank Accession No. BQ210948
ttttttttttttttttatcagatagtcttttatttaaatattttcttgttgctttttttttttccggagctggggactgaacccagggccttgggcttggcaagcgctctaccactgagctaaattcccaaccccttctcgttgcttcttaactagctgggcactccaccgcaccactgttgatgtcatctatgatgtcatgagggtggcggccgtccacattgcagcccacagactgtgcagtacccaggatctccttgatagttccagaaagttctctggccaaagaccggtgtctcatctgccgggcaatgttgacaatctcatcaaaagtgatgtttccattgtgtttaatgtttttctgcttcttcctgtctcttggtggctccttgagggctttgatgatcagggcagaggcagagggcaccacctcaatctgggcctgtctgttctggatggtcagtttcactgtaatcctgaggcctttccagtcaccggtagccttggcgatgtcatcaccaacttttttgggagacagacccagaggaccgatcttaggggccaaggcggatgtggcgccgacctcgcctccggtgcacctcaagtacacgactttgatctcgttggggtcgaacttgggcggcatggtggaggtggctggtgtcggatgaaccggattcgggacgaccgaagaaagttgcaccgttgcctcctc

SEQ ID NO: 2663 - DNA, 772 bp, Rattus norvegicus
  Genbank Accession No. BQ211033
  misc_feature (1)..(772): n = a or c or g or t
ttttttttttttttttttgggatttacatcagtttaatgccttctgtacagcaccagaggttaaaagtggatctgagtaagcaaatgttctttattagtcacagtttgtcatcacacatttatttctacaataaacatacaggggagaggaagacagctcaggccaaaagctttcgccttaaataaatacgcacttcacccgctccatatgaacacccaaccaagcgcccggtcctgaaggctatgcaagtcgcatggggttctctaagtttgctttgaaagtttcaagaaacttggtagctagttcatcatcaaccattcggctgtcacttgacatcgtgacagttataagctggtgctgccgcacttgggggttcccctcttcatcctcagtgagtttcagcactggacggaatcttccaactgccaagatacaggcctgaggcgggttaatcactgcagtgaactcatcgatgccaaacatgcccaagttggaaatactaaaagatcctccttggtactcctccggcaacaattttccatctcttgctttctttgacagaacctttacagcgtcagcgatctcccgtatgtccttagcagctgcatcttttatgattggtgtaattaaacctttatctgttgccacagccactgaaatgtcaacagagggcagatgctttgggccttctccatcccaggtgacattaaccccaggcatttgcttangagtaacagctgctgctctgatgataaagtcattaactgagac

SEQ ID NO: 2664 - DNA, 536 bp, Rattus norvegicus
  Genbank Accession No. BQ211211
ttttttttttttttttttactcaaagtgattttattgcttgtgtacgcaacagcatttatgccaccagagcagaggctgtggatgactcatatttccagttgggtgggagcacccgcttagtcttatagtatcgagccagccggtgaattctgctctcaattagaatcaggcggaatttagcatccttatcttttctgttcctctcaaggtgctttctgacagcaactgctttcttgatcaaatggtagagatcctcaggaagatcaggggcaaggcctttggacttaaggattctcaagattttatttccggtcacaaaacggacctgtgccacaccatgtgagtccctcagaatcacacctatctgggaaggagtcaggcctttcttggccaacttgtaaatttgttccttcacgtcgtcagacgtcaacttcagccacgtgggcacgctacggcggtagggcagcgccgactgggacaggcccttcccgggagcgtgcatgcgacccatgatggcggaggtctgcctcgttcc

SEQ ID NO: 2665 - DNA, 567 bp, Rattus norvegicus
  Genbank Accession No. BQ780824
ttttttttttttttttttccaacttaaaggctttatttgacacaaaacacagtatggctgcgggaacaccaaactccaaagacaaaggaaaggaaaagaaccatggttctatctaatgtataattaacaggaagtcactaaacgagtaacaaatgggtaagctttacgggagagtctttcctaatgcccatacttttggaactcccactctctgttgtccaaggggcacacctgcctggttttgagccaccgagagatgcagtggaaatgaaaagcgtgctgaaagagaagacaagggttcccacgtcatcatagcccccgctgccaacacctaccacagacggcagtgaggacgatgacaacaggtctgagaccagccttgtgtgacagggcagcacacctcaccacacctcggaacccttctagtggaaatacaagggcatttccaacaagaacatgtgacatgactttactgctaacaactgactcagagagcacaggactacattctgacagtggggtcttgcctcttgccgggaatgtgggtcctggtgcattcagctgata

SEQ ID NO: 2666 - DNA, 559 bp, Rattus norvegicus
  Genbank Accession No. BQ781440
ttttttttttttttttttatgaatgaggcaatttattaacccagcatcctttgttctaatgcttcttgttggcagctgccacctgtccggcgatcctgtccagatctctctgtccctgaggtgttagcttgcggcccccatcttggtccttttccaccattttcagcccctccagggcttggaggacccggcgggccacactcttagagcctctgctgaagtggctgggcctgacaccgtttctctgccgtcctccgtagatcttggtcatggaaccaacccctgcaccaccacggaggtacaggtgccgtgctgtggaagcagctcgtgtgtagaaccagttctcatcatatggggcaagctctttatgtttggccaacttgactgtgtccacccattcggggactttcagcttcccagactttttgaggaaggctgccagagctctgacgaactcctgctggttaacgtcttttacagtaactccaggcatcgtgcggcctccgcgctgccagccaggggaaaaaaaaaaaaaaaatacaagaatggccctcgtgcc

SEQ ID NO: 2667 - DNA, 561 bp, Rattus norvegicus
  Genbank Accession No. BQ781767
ttttttttttttttttttaccgtgacacaactctttatctgattctgtgggtggctctgaaaagagccgttttttgagagttctctggggggggggaagggttcgtagagacgcgggccggtgccagcagccgcctcacttgcccttcgccttatggtggctctccgtcttcttgggcagcagcacggcctggatgttgggcaggacgccgccctgcgcgatcgtcactttgcccagcagcttgttgagttcttcgtcgttgcggatggccagctgcaggtggcgcgggatgatgcgggtcttcttgttgtcgcgggccgcgttgcccgccagctccaggatctcggcggtcaggtactccagcaccgccgccatgtataccggcgcgccggcgcccacgcgctccgcgtagttgcccttgcgcagcagccggtgcacgcgacccactgggaactgcagcccggcgcgggacgaccgcgacttggccttggcgcgggccttgcctccttgcttgccacggccggacatcacgagagcgcaaacagacggacgcctcgtgcc

SEQ ID NO: 2668 - DNA, 670 bp, Rattus norvegicus
  Genbank Accession No. BU670883
ggtgattgttggtgatggagcttgtggtaagacatgcttgctcatagtcttcagcaaggaccagttcccagaggtttatgtgcccacggtgtttgaaaactatgtggcagatattgaagtggacgggaagcaggtagagttggctttatgggacacagctggacaggaagattatgaccgtctgaggcctctctcctacccagacactgatgttatactgatgtgtttttccatcgacagccctgatagtttagaaaacatcccagaaaaatggactccagaagtcaagcatttctgtccaaatgtgcccatcatcctagttgggaacaagaaggatcttcggaatgatgagcacacaaggcgggagttagccaaaatgaagcaggagccggtaaaacctgaagaaggcagagatatggcaaacaggattggcgcttttgggtacatggagtgttcagcaaagaccaaagacggagtgagagaggtttttgagatggccacgagagctgctctgcaagctagacgcgggaagaaaaagtcggggtgcctcatcttgtgaagccttgtgacacgcagcctcatgcggttaatttgaagtgctgtttattaatcttagtgtatgattactggccttttcatttatctataatttacctaagattacaaatca

SEQ ID NO: 2669 - DNA, 748 bp, Rattus norvegicus
  Genbank Accession No. BU758544
ttttttttttttttttttatgagaaacttcctttattcttctaaacaggtgaaaataagcaattcttatatttctcacttgtaagatttttaaattcttaaaaatgcaattttcttttcaaagcacatgccatctttaaaaaattctcagcaatatacatttgcacccaagaaatacatgcagcatcactgccgtctgacaatgtcctgcactaacccaccgactcctgcacatgtgcgttctacttggggactcagaacacaggcttcagtgcaacacttatttccgtaggaaacacaggcccagtggcgtcttctgacaactgtttcccaatggctgagcacagcctccatctgccttaaagcactctcccccgtgccaatgaaagaaacaactagaattcaggagcatttgaggatcccagtgcgggaccgaggagggatacttagggctaccctgtgccacaaaacttacgcaaaaatttacctagaaaacaaaactgaaaaaactcttagattttatcaatgcaccgttttaagtattttttcttttaatttttttttttaaattttgaaagcagcttaacgtgaatgaaaagcagttcctgagtaactgcagtaaacagtctttaaatacatatacatgtacacatacatatgtatatatctgcaacttagctcatttggttctgccttagtttacctccccagagttaggtgaatcccgtcccttcctcctctcagttatc

SEQ ID NO: 2670 - DNA, 715 bp, Rattus norvegicus
  Genbank Accession No. BU758622
ttttttttttttttttttgataaaatttttacttagctataatatacattttcaacagtttaaataaaaatttttcctcatgatgttaagtgaatgttattttctttgagaatatctcttttttcattaaaataatttctgaaccactctatatgctcgaccttctgtctaacgctcagatatgggtttttcgagaggccacaggtcaccagctccatgaacaggcgaattggtccttgcttggggaaatcctccaggtgcttctccaaaaatatatgctcatggaactctgagccatcatcgtcaagacctgcttcattgttaactgggaactcccacagtttcccctcctttgtccactgtatcatctcctcaaacccattcccaaacggctgttcgcttactgtggctaattgcttagcaaattctatctcccagagagaaggtgctgcttctggttcaggtgcttcgtcgtcaaacgccttaacatcaaaaatcgaaagtcttttccccttgaacaaacatttcctccttctgaaatcagctggcttctcctggctaagcgaactgtccacttcttcgtcaaactgaatctggtgctgtggtcttgaactaactctcatcgaaggggatttggcaattttcatattcgatattatttgagtgaagctaccctgcgcttctgtctgtctgtctgagcccttgactcttcctc

SEQ ID NO: 2671 - DNA, 730 bp, Rattus norvegicus
  Genbank Accession No. BU758766
ttttttttttttttttttaaaaatatgtatccttttattatgtttcatgtgatgcaaaatatctacagtaaaataaaattcaatttctcagatagcaatgacgtacctgatacacacctgaaatgatcatcaactcaggagcgacaaagcagcctgacacttgcaatgcactatcagcaaatatttgacaatcttaccttcgtgtttctttcattacaaagctggaacatgtaacattatcgaacatctgtcttgtcattatcgctttgttaaaaaatctacttttggtcacatttttaacttcaacaatcccattcaaaccacctatagttgttaaaatccaatgtgaaggacaactatgaatttactgatgtattcactctccttcccaccattaagaacagctgcctttctgactctgaccttatgtgctctaaacagcctaggttgagtgatgtgcgcgcccaatgttcacaccccccttacagcataacctgatgtcttggagagaaaccaatgcctttgagacaacattcaggtgttgctccagtgaaaatgtgcccctggtctctaattcggtgaaggtgttggctcaagtgtaaagtcaagtgaaagaaaaatgaagcctaaactaggcgctccccacacctcggaattactttagaataaagctttgagaccttccttccaattctcatgcagtatgctatcagctctgtcgctgtcgtgg

SEQ ID NO: 2672 - DNA, 798 bp, Rattus norvegicus
  Genbank Accession No. BU759832
  misc_feature (1)..(798): n = a or c or g or t
ttttttttttttttttttgctgttaagcaaaggtcaaatctctttattgcctccctcccaccccagttccctgtcccccaacagtactgctaggaaccttcctcagattccaagcccaggggctccctgcgagtaccagaccggtatgctccctggccccgaggtagatggggataggaagaaccaggtgtacggtttttggagcgttcccagcgagcacagtcccgagtcctgcgagctgaggggccctgccagctaccaggtcccttctcctgaggatgacctgtgaggcctttgttacggggttctgcctttaagtccacagtctccttgagaggcttctcaggaggtggcagttcttggatttcactggtaccttttggggcgcagcactccccgccttttgggtgcctccgatcatactgtcgccaggagccacgaccaggtcgtggaggatctagcatggatttctgggtctcacccagcctctgttgatttggcccagcccccgaagtcttctcataaacatactgggtagccatgggtaaaggagttggcagagttgattgggcagctagggaagtagattgttctgcagaaagggtattaggtggttggggtcctcttgagacatctactactgactcaggttcaagagcagcaggaggctgctgaaggctaatgaagtatcggttccgttcagcctccaggtcaatgatgccaccttttcctgttgcctctgatacagccgtttgagttcntccntgtggcgcagctctctgcactgggttggtatac

SEQ ID NO: 2673 - DNA, 705 bp, Rattus norvegicus
  Genbank Accession No. BU760054
ttttttttttttttttttcaaagatagcattatctttattaaaaattgatagacgtagcagcacttacaaaacaagagttcatgaaaggcaggatatgctgtcagctgacagtggagaagggcaactcaggccaggctgtggctctgcatcccatgcttgctcacgaccactcgccgtaccctatcaacagcaaccctgcgacacccagcagaggccagcaagcaccatggcctccttaacttcaagcttttgccgtctgtgtgaagagtccagtgggtcaagtagcaccctccttagcagcttctggagcactcagtggtgttctggaggtggctggtgtactcgaccctatagttaaaacacctagcattcaatcaaagcacttccgtccaaggcatcttgtagacccctgctgctctggaagagacacctctccacagagcatagcatctgcaggggctcctgacctccaaggcagcacaaggagctccaggcagctgcttccacaccactgtctttggaggcgatggcaggtctggtcattctgtctcctgctcactgctctgcttcttactgctgtgtgggggtgtcaggaccccactcggaggaggagaaatcctattttgttctgacaatatggctttctttgcttgggctttgtccagcaagtccaagctgttggtgtgggtctggatgttgtggga

SEQ ID NO: 2674 - DNA, 768 bp, Rattus norvegicus
  Genbank Accession No. BU760309
  misc_feature (1)..(768): n = a or c or g or t
ttttttttttttttttttgcctggaaataaatactttaatttttttgctttatttttaagatgacaaataagtttcaagtttatttcctttttttgtttgctatttaaatacaaagctaagccacaaacaggtacaaccaagacattttatctcacagttacaccctcctgtcggatcctcctccaagtctgaccactgactgggctagcaaagggtgcggggaagactttcttaggtagcaccatcatgaggctgggagatggaggtactggggacaagggtaggctcttatacctggctcctgaaccccaggccccctggactgaaggtgaatggttagtcctccccaaggagggagaaggaagcctactcttgctatcacaggttacaactgaaggatcctcctgatctctggctgctaagccttgcgggctgccaggtaccctagggccaaacacatctggtgtctgatgcccacaggactgacggcatcttcacgggagaccaggggttctgccttgacagcaggtagagaacttcccacgtagcagaattggggttggggagggggtgtgggcttagtaatttctggtcncactacaaacctcacttttgattagaatagagtaccatctcaaatcttctctacacaaaccaaccagccaagccaaaaagaaaaataaccccagaagaaaagaaactgcattcatttcactcncttcanaacctatatacatgttaagttgttttctgtgggttttttttcc

SEQ ID NO: 2675 - DNA, 327 bp, Rattus norvegicus
  Genbank Accession No. C06598
  misc_feature (1)..(327): n = a or c or g or t
gggctgcaggtttgacagcagcctaccacagaaccagccctttgttttctcccttggcactggccaggtcatcaagggctgggaccaggggctactggggatgtgtgaaggggaaaagcggaagctagtgatcccgtctgagctggggtatgganagcggggagcccccccaaanataccaggtggagcaaccctggtgtttgaggtggaactgctcaanattganagacgttcanaactgtancaggctgcaaaggggtaggaggcccctatcagggaccanactgtttaaaaacaaacaaaaaaacctttaaaaccccaaaaaaa

SEQ ID NO: 2676 - DNA, 491 bp, Rattus norvegicus
  Genbank Accession No. C07167
  misc_feature (1)..(491): n = a or c or g or t
tttttnggtgctcattcaaaggctttattcatngcagaggggtgggcggggantggtggactcagttgcagtagttctccagttggtagagggagcagatgctggtgcagcactgatccacaatgccacgcttctgccgggcaacctccagtgccaaggtctgaagatccccggcctccgggcctccacccagctccagttgtggcacttgcgggtcctccacttcacgacgggacttgggtgtgtanaagaaaccacgttccccacacaccaggtacagagcctccaccaggctcgtgccgaattcctgcagcccgggggatccactanttctagagcggccgccaccgcggtggagctccagcttttgttccctttantgagggttaatttcaaacttggcgtaatcatggtcatagctgtttcctgtgttgaaattgttatccgctccacaattccacacaacatacgaaccggaaagcataaatgtt

SEQ ID NO: 2677 - DNA, 622 bp, Rattus norvegicus
  Genbank Accession No. CA333933
gcgaccgagcgggccaccgctgccgccatgaaccccgaatatgactacctgtttaagctgcttttgattggtgactcgggcgtgggcaagtcatgcctgcttctgcggtttgctgatgacacgtacacagagagctacatcagcaccattggggtggacttcaagattcgaaccattgaactggatggcaaaaccatcaaactacagatttgggacacagctggtcaggaacggttcaggaccatcacttccagctactatcggggtgctcatggcatcattgtggtgtatgacgtcactgaccaggaatcctacgctaatgtgaaacagtggctgcaggaaatagatcgctacgccagtgagaatgtcaataaactgctggtaggcaacaagagtgacctcaccaccaagaaggtcgtggacaataccacagccaaggaatttgcagactctctgggtgtccccttcctggagacaagtgccaagaatgccaccaatgttgaacaggcattcatgacaatggctgcagagatcaaaaaacggatggggccaggagcagcatctgggggtgaacggcccaacctgaagatcgacagcactcctgtgaaatctgctagtggtg

SEQ ID NO: 2678 - DNA, 614 bp, Rattus norvegicus
  Genbank Accession No. CA339234
caaaatcccagaataaggaaactctgaaccaggagtcatggaagtcaaacccaagctctactactttcaaggcaggggaaggatggagtcgatccgctggctgctggctacagctggagtggagtttgaagaagaatttcttgagacgagagaacaatatgagaagttgcaaaaggatggatgcctgctttttggccaagtcccattggtggaaatagacgggatgctactgacacagaccagagccatcctcagctacctggccgccaagtacaacttgtatgggaaggacctgaaggagagagtcaggattgacatgtatgccgatggcacccaggacctgatgatgatgattatcggggctccatttaaagcccctcaggaaaaagaagagagcctagctttagcagtgaagagggctaaaaaccgttacttcccagtgtttgaaaagattttaaaagaccatggagaggcatttcttgttggcaaccaactcagttgggcagacatacagctactagaagccattttgatggtggaagaagtcagtgctcctgtgttgtctgacttccctctgctgcaggcatttaagacaagaatcagcaacattccta

SEQ ID NO: 2679 - DNA, 634 bp, Rattus norvegicus
  Genbank Accession No. CA339691
tcgacccacgcgtccggtctggactgcagacaggcggcagcgagagaccggcgagctccgatcggtcggagctaaccgctgccaggcgggctgccgcggccccgcacacgccccagtcgagcgaagatggtgggccggaacagcgccatcgccgcgggcgtgtgcggtgccctcttcatagggtactgcatctactttgaccgcaaaaggcggagtgaccccaacttcaagaacaggcttcgagaacgaagaaagaaacagaagcttgctaaggagagagctgggctttccaagttacctgatttaaaagatgctgaagctgttcagaaattcttccttgaagagatacagcttggtgaagagttattagcacaaggtgactatgagaagggtgtggaccacctgacaaatgcaatcgctgtgtgtggacagcctcagcagttgctgcaagtgttacaacagactcttccaccaccagtgttccagatgcttctgaccaagcttccaaccattagtcagagaattgtcagtgctcagagcttggctgaggatgatgtggaatgagccagacaccaacatgataaaatctcagtaaaatgataacagttagctgcaggctgctctgctcgggggg

SEQ ID NO: 2680 - DNA, 651 bp, Rattus norvegicus
  Genbank Accession No. CA339825
ccacgcgtccgcttcttcagacgacattaccccctcaacactgtcaccttctgtgacctggatccacaagaaaggaagtggatgaagacagagggaggtgcccctgctaagctcttcggcttcgtggcccggaagcagggcagcaccacagacaacgcttgccacctcttcgcagagcttgaccccaaccagcctgcgtctgccattgtcaacttcgtctccaaggtcatgctgagtgctggccaaaagagatgaacgaatcctggagcccttgcccaaggctggggcactggggacggggtgtgtggggagggatctgcgaatcctgaccaccttgaatccagaacgagggctttgggtcgaccgtggagaaggagagaagaaagtgcaatgctgggagagggaagtgaattgtggagggagggaggggaacaggaggaagaggaaggaaggaagaagagaggaactcgaaatcccctgtacagatggaagccacacctcccaaagcctctccagctagctggggcccctccccctcacctcccaaagcctctccagctagctggggcccctccccctccgagagaattgagctcccacaggcacacagcccttggggggaccctatttcatggagcaacaaaaaagctc

SEQ ID NO: 2681 - DNA, 666 bp, Rattus norvegicus
  Genbank Accession No. CA340524
gctgtccccaaaatgtataaagaagaaggcttaaatgcgttctacaagggtgttgctcctctgtggatgagacagatcccatacaccatgatgaagttcgcctgctttgaacggactgttgaagctttgtacaaatttgtggttcctaagccccgaagtgaatgtacaaaggcagagcagctggttgtgacatttgtggcaggttacatagccggagtcttttgtgcgattgtctctcaccctgctgactctgtggtctctgtgctgaataaagagaaaggcagcactgcctctcaggtcctgcagaggcttggctttagaggtgtatggaaggggctcttcgcccgaatcatcatgattggcactctgacggcactgcagtggttcatctatgactctgtgaaggtctacttcaggctccctcgccctcctccacctgagatgccagagtctctgaagaagaagcttgggttaactgagtagatatacatcaaagtaacatggactgaatctgcttgttgatcagtgttgaaagtgcaaaggaacttttatatatttgacaatgtaggaaatgtctgttcctgatacaattactgtagtacccttgcttaaagcaagagtttcaaacttactgctaaataaacccatctattcatgaaaaaaaaa

SEQ ID NO: 2682 - DNA, 812 bp, Rattus norvegicus
  Genbank Accession No. CA503476
ttttttttttttttttttggtttctgctagcctttatttgtgaaagtttacacaaaaatctcccaacaggtgagcctatataaaccccacatgcctcttcccattaacaaacagaagatggctctgatgggggtagggtggggggtcatgacaatggtacggaacaaggtttattgaaactgtcttattctcaaattattttgaatatgctgaaaatgaaaggaagcaggtaataacctgtttataaagctgatgtgcatttgtgcaagcctactgccaaaggcaaataaatgctcttcaagcacaatgtccaagttggttgtttttggcatgaattaaaacaaacgaaaggacttgaaataatttcagttctacaaagcttatgtttacagatgttcttgtttacaagagcttggaaacaaaaccatgggcaaaatggtctatttttctcctctctgaaacattgacattttccaggacagaaaacagaaaattagtagagtggttgtcattgctcctaaaagaggggaaggcacaagtcagaaaataggagtctcgtgttaggctaatggtacacaccatggttttgcatttaaaagtctacaaatgggttttgacccaaaatttattttcttattgtttattcttttcatacttaaattgttcttctgtcacttgatgtatggatgttacagatttctgaccatctgctggtgccatggtgaggacttgcatgctaagatcttagaagtgagacctatcatttttcaacagcagatggcactgttgtaccagagacacttgatgcatgc

SEQ ID NO: 2683 - DNA, 749 bp, Rattus norvegicus
  Genbank Accession No. CA503551
  misc_feature (1)..(749): n = a or c or g or t
ttttttttttttttttttgcacataaagggtttattttgaatgttttaaggaaggatagagttacatcataattataaaaattacttacagaattaacagagttgtactgtgtatacttctaaatgcagagaacagggaactgtctacacgttgtataaaataaaattaaaatcaaaaatgaattcaagctcaaaaaatgaggtcgtttttctagttttaaatgtgaacacgaagacctctgaactctactcgttcgttcgttcgttcgaactgcaccaatggtggagaatacagagagcgcagcattcccaaggaacacagacatttcggccatgattattttgagtattttccctgtgtcatctttggaggacctccatctctcagacaatcagtgttaagtgttttcaggcactacagtttgtgttgctcagaacagtcttctttctaatgggtctacagagttcagagattcaggcccaatgcactttggggtttggcacataaaacaagaatagaaatgaaatctggcttagaagcaactgtgatttttagagcgtgcacagtcccttcgaatgctgcgtgacatatacaactggaatcaccttctgtcggcgctacgactgcttcaccagtgcgtctttaccctacaaccactagaacagcacagtaagcanatatacaggaaaccanaagcaaattgaaagaaagaaagcaagacagaaagacctaggtctctttaacatgc

SEQ ID NO: 2684 - DNA, 773 bp, Rattus norvegicus
  Genbank Accession No. CA503797
  misc_feature (1)..(773): n = a or c or g or t
ttttttttttttttttttaatgatttttttgtttgtttgtttctgttccattctttgtgttttgttggttttggtccttagaaaatctgagactcagagcccaggtgaaacaaggccaggtgggcgggggcgattgccccagcagccactgtggaggcagagaggggttatggcaggtcctctgctcctggtgtgacacagggcagggaggtgggaggagccactagaatctggtccaggggagctgggtgccctctgctggacttcttagggcaggcggttcctggacaaggcacatggggctttggcctggatgtgagaggctttgaaggggctggcctcaggggcagaggggacctgggtttagaaagatgtctctggggcccagaggggctcaggtgtccgttgttcctttcatataggctaagaacccacaatacaacatatatatttagcagaccagaagcgctgatcgacaagcctccatctcccctaccagactgagaaaagaggcctgcctagcccctccctgcctgaccccctagaaggaccacaaagagctctttgcatagatactgagtcagggtggggcagggctcctcagcccctccgggaggccaagggagtctgttcagggtggctgagggcctcacaggtcgctctccccatagagggctgtagagaaggacttgtagtcaagggcgcctggagcagcatcagggccctggtanggcgccatgcgggcgatgcagtactcagcctggtcagggggc

SEQ ID NO: 2685 - DNA, 777 bp, Rattus norvegicus
  Genbank Accession No. CA504143
  misc_feature (1)..(777): n = a or c or g or t
ttttttttttttttttgtctcaggtgttttattaagtgggccatactgtagctggtttctaagttgcaaaacaacataaatttaacagtaataacatagccagttagattgtgacaagcttttccttttcttaaagaggaaaaaagaaaacaaaacaaatacttagacacacactggcaggttaaataaataagatagatgaagacgggacaaactggttacaacatgctcatgtttacttctgcgcaacgttgtgccaacaggaaacatgattttctgcatgacggtagcacgatgacattgtcctggcatatctccttcccaaataatactgacaaaaaaggggaagggggaaacggatgtggagctgactccgcagtgcttgatcacaggcactgctaaaaatccctttgagcatgggatctcccactcgcacacctgtgcatggcccgtgaaagccagagagccagaataatgttaatatagaaaacattagttaaaaacgatgtggaatggcctcatcgatgtgacgtgtgtgcaggctcagcctgggaggccacaggctcccagcgtgcggccgtgcaagggaggcaccagcttcanaacaagcagcaccagcctcgccctctcctgtctctctcacatgaaagtgtgtaaaaagcaggaagcaaataaactctaaaatagattattttttccaaaaatcctctagttttctttttacagtgagtatacacatcctctctgtcnctcacggnctgcttgggtcctctggga

SEQ ID NO: 2686 - DNA, 776 bp, Rattus norvegicus
  Genbank Accession No. CA504238
  misc_feature (1)..(776): n = a or c or g or t
ttttttttttttttttttgcagtttgaattgtggtttatttagaagcattcaagagttagactgtaaataaacatattatgaataattaaaatcgccatttattataaataccaactaagttaaataatactatttcacctatctttcccctttgagctggagtccagattccttctctcaaattcttaccaggagtaaaatctttagtgttgtgacctctgtacccatctgtacccaaagtgcccttttataaactaaatgagacctagaactctgaaaggaagcttcttcccacttactgtagtggtaaactgacctttctgtgggttagcccccaagcactacttcttgctcttggctggacacctcagaaggggattacacacattcgagacgtcaccagcatgtgtgtcccctccttcgcaccgtaaccttactgatgtgaatatttacacacacctgtcctccttaccatctgctgtgacagaaaaaaagatgatgttaacgttccctttctccaacaggtgggtttccccctctttataggactagcaaaatatttcacactacccaggatttttccttaaaaaatgtatgcagagttactttgacagacgctgtccagtaggtgctgtgggttaccagcatgcctgccatccttccaggttcctgccaggtcttctganagcaaagtgttacttatttactaagtcttttagggacatgactttcttgatctgctgtctttacatagctatgaagcttggggttggtt

SEQ ID NO: 2687 - DNA, 757 bp, Rattus norvegicus
  Genbank Accession No. CA504410
  misc_feature (1)..(757): n = a or c or g or t
ttttttttttttttttttacattctcaacagacctttaatgaccggggtgagtttaggaacaaaaaggtagatagtctggtcatagggacgacaagaagtgaggacctcagtaagctgtctgagactgctgctggcggtagccaccacggcgcatatagccttcattttttcggtagccatccttttggtctcggaaatagccgccataggttccttgcttatggtcaaacacacgttcattattctccactaggctgccaagcttctcagccagctgcagagccaagttctgttgggcagtgggctcagtacggtgcatcactaccgtctgcgttggctggtccagggaagccatcaattcttcattaatgatcatcttgctgatgatggagtgaacagtgggcagatccagctcaaacatatctgagagtgtctccatactgattgagtcatagacactgctataggtaaaaaggtaggtcctcagagactcttcctggatcttccgaactagcatggtgcgaactttgtcagcctcagggaaaaggtcccacactttcccattcatcttttcattaatgatgaaactgtggcaggtcttccagtcacccatcttcatggccttggaggcagcaccacatgctccctcattgactcaggaggacctagcaggggctgccgctcgcccacccgcagttggtgatggaactgcttgctgatcatgcgtcngcgggcacactctcatgggcagcatgt

SEQ ID NO: 2688 - DNA, 730 bp, Rattus norvegicus
  Genbank Accession No. CA504590
ttttttttttttttttttaagtcactacccaccaggggtttaattctttttatgtcagttcagaaaggggccatgctttgtccccatccaaaggaaaagatctgcagggcaccctgggaatgtccaaacccagaaaagccaaggggtagtccctgagcaagtagagaagtgggtcctggggctcaggccgcctcctcctcttcttcttcactctcctcctcactctcatgatactgtctgtgattggtgttgacaaagaggtcagaatcatcttcagaacctgacccttctcctgacagctgtggctcagcggggagttccggctgactctctctgttcacattgttttgtttctcagctacctcagaaaaggcctcaggccagtgaccctccttctgtagagagcggacatggttcttgcagagcacaaaagagatctcagccttcactttttctccttcttcaatagggtcaacaatgaggaagtcccctctcttgatccagatgttcttgcggtatttggagggcatgctcaccaggaagcgctgcccttgtgctgtctctacttcatgcagattgttcccaggagtcctgaggactttcactatctgctgttggtcagaaggcaccatgtgctcccccagcacttcctgcaccacatgcttcctcttgctggcctgagacatgctggttattgtccaaggttgttagggtgcacggactgtcagct

SEQ ID NO: 2689 - DNA, 731 bp, Rattus norvegicus
  Genbank Accession No. CA504615
ttttttttttttttttttggggttttatatttattgcaactacaacttttcaaagaacgttagttatttaaattttgttcagacatgcttaaatatatacaaaacgacagtctctaatcccttgaggagaaggcggaacttcagtgttcctcatcggttcaggcacctcgccttgttgcaagcatttccaggcggcctttgagtgtcagttctgcagcactgcttctgcagcgcagcccctgccggctggctcgcggggacaggctatagcccgcggctgtcagcagcacagtcctcgctccagtgggcatctcgcttctctgccacgagtttgatgaactgtgagtgactggcatacagcttgagctggtcgctgatgtccacccacttcaccttccccgcatcatctccagcctccagcgtgaggttgtccatcgtctcccctgtctcatcatggtagttcactgcctcagtctccatccatgcgttgtcagtgttccgagggtcgtcgacatagcccttatatatcacgagatgctcctggctgaagagtgcgtgcagcttctcctcgatctccctcttctccgcactggacttctgtaacgagttcagggcttcctcaccaaactcccttttcagtgtggcactgatcttctctccggggtccaccatcccccctgggatcgccactctccacagtctttccttttgatggcgacgaatgcaagatg

SEQ ID NO: 2690 - DNA, 701 bp, Rattus norvegicus
  Genbank Accession No. CA504751
ttttttttttttttttttggagattttaattcctttattgagaaacttaagtcttgggtacatcaaaaccaatttctgggagaggggaaaaaaaaacagaactcataatagaaaaaaaagttaccatcatctgggccacaacagaacccagagaatatattcttataattgaaaaattctaggtgcttcataattgaccttttgatacaaaatgacctgttgaatttgtaacttggttcttgaaagaggtccacagacaaactaggaagtcttcagacctcagctgaatgccgtgaggggttatttggcttttgactcttctggtttaagaggtagcagcagcaacagtgcccaccttctgggcagcttctttcttggcatgatgagcctgcaggactgccacagcttcatccaccttggaacggagggactcgggggactccagcatgtggagcagctcagagttgtcgatttctagcagcatccctgtaatttttccagccaggtttgaatgcattgtttggataagtgggaacaaacgctcccccagcatctgcttctgctcctggggaggagctgcagccagcatggaggcagtcaggggttcttgaccctggacatggactgcaggctggggggcctgcaccggctgaatggcatggtgagggctgcggacattggaggcatacttgtatggagcc

SEQ ID NO: 2691 - DNA, 773 bp, Rattus norvegicus
  Genbank Accession No. CA505004
ttttttttttttttttttacttagtactgggcgctttattttgcattttacagtgtctgcttcccccatattgatcatcaaggccttatggtgagacaatgaaaacttaacacacgaattcagtatactgaaaaacagtggataatttacaaacacatctcttagaatcaaaaacatttataaaatacatattctagtacacatgaattttagatgttgaagcattttttaaaaaatggtaaacaaaacatttaacactgacaagcctagcagaacatcgctgacggcaagctggaaatagcttcaaatgctgaatatgatttgagggaaggtcactggttggaccttcatttaaataaatctactagtaagactcttttttaaatggatttctaccaagtgaacaatttatttgccctggtagcttctcaaattttatagttatgtttgttaacaacttgatttgaagagctgagaattggtggaagaaaaaaaaaaaaaaaaggaaaaatgacatgcggtcttgctgaagcgaccagcattgaccacacgtgcttagaagaggtgtgcatagaatcgcaatgcctggaataactccagtgttctcacttaaggaacttaaaatgtcatcaattagtttttaattttcaaaatggcataataatatctttgcactcccattgcagggctcattaaaattactcatactgccatttctagtttaaatatcatctgtatgcgatttaggagtatctctgcagacaggatcatag

SEQ ID NO: 2692 - DNA, 764 bp, Rattus norvegicus
  Genbank Accession No. CA505090
ttttttttttttttttttaataagaaggcctgagttggtagggaaaggaacagtcagaagaagcctgagaagggtaaggaaggaaagctcatttatacatttacaataatttacagccatcttcttctgtaaaaaggcataataataatcacaaacaggaagttcccggctatcttacagacttcagtacaggatttaaatattcaagcttgtgacgggaagcggcaaggtggtcgcagtgtacaatgtaaacaagtagctttggaaagtgaacaaagtccttgagcgatttttctttattaagaaaagacctctctttcattccttcctgaaacatgatcacaggtcagagtaaagttcatatacaaacataatttaaatggagtcagtctaaaatcactgacgtataaacagttttatacagcctacacgggagggcagtgctgaggtccctggtatagtaaacattttccatttctttaaaaaaagaaaaaaaggtactacagtattgcagtacagtgcagcataatccttaaatataaaaatatcttctcttctgttgggataatagaccttgcgtcctggaaagaagtaacaaatactgctaccgatagatagaagagctgtttgtatctttcaagtcatgtaaggcaattactgtgttggtttatgatctatggctaaaatgaagtccagaaagacaaaccatcagtatctgttatgtcttccgactactccaggtgtgttcaagtgtacttctgtgt

SEQ ID NO: 2693 - DNA, 727 bp, Rattus norvegicus
  Genbank Accession No. CA505276
tttttttttttttttcttagaaagttactttattagaattttaaacagtttaggcaatgaaaccgttctaacagcaaatgcacttcctgcttacaatgaaatctatttcaattctgataatgacatgacaggtccatccaagtttcttccaacagaaaagcccacagctcaaaagttacggggggaaacatgactaagccaaaggacttcacatgtttaccacagaagtgatacacattaaaataccacataatactttctaagagaatcaagccacttgtgaaaccattagcaagcatggagactgaaacaactgcttaggcacaggactaactcaggcaccataaaaccctctgtcttctcacttaacaaataagattccctagagacaattatttgggtgcctgcttgtaaaaataaggtacttaatgacggaacggtttcttgatcatgatcatacttgggtaatctcaaggaatgaagatgaggattattagacatgattacattaacatgaaattctttatctatacactctgatttccatgtcctgatttttcaggtctaaacacatgtgaacccactgtagggctttaaagagccacgtgtggactcgatagtacagaaatacaagctaatactgagacctgtatcttaattcattgggttcttaacaagttatgaggtagctacattgtcccccctccctgcacctccgtttctgact

SEQ ID NO: 2694 - DNA, 747 bp, Rattus norvegicus
  Genbank Accession No. CA505383
ttttttttttttttttttcaatatataagtcttttattgtttccacagagcccaaactgtacttgttatcaggatcttgtttctgaagctaggaaactgaggtctcattcgtcaggctgctggacggttcccttctcagaaacatagatgccatccaaaaacttcctgatatccttgtttttaactgttgtggcttgctgaatcagagccgctgaatttgaaacaagttcaatatcatttccttcaaggattaactcatccttctgggcttgagagacagaacaagcaacacctgtcctcatccgaaccctccggatgtatttttcacccaagaaatttcggatttcaaccagagacccattctcctgaataacgacgttgatagggaagtgagcatacacagacctcatcttgtaacggaagcccagtgtcacacccttgatcatgttctgaacatgactgcagatggttctgacagtggccagttccttcctgttaccccaccacttgtcaacacggagccttttctttttctttccaagaagactcagctctacattgatgtgattgaagtccctcctcagagttcctctggggcccttcacaatgactgtgcgccccttcagagtgatgtcgacattttctggaatgtcgacagtctgattgctgagaatggtcttcattctcgcagtagatggggcaaaaaaaaaaaaaaatcggcggccggccgctccaacccctcgtgcg

SEQ ID NO: 2695 - DNA, 557 bp, Rattus norvegicus
  Genbank Accession No. CA505409
ttttttttttttttttttggtatataaactatttattaacagcaaaggcccaaagactcatttcttcttggacacacccacagtacggcccctgcggccagtggtcttggtgtgctgaccccggacacgaaggccccaaaagtggcgcagccctctatgggctcggattttcttcagccgctccaggtcctcacgcagcttgttgtctagaccgttggccagaacctggctatacttcccatccttcacgtccttctgtctgttcaagaaccagtcagggatcttgtattgtcgtgggttctgcatgatggtgatcacacgctccacctcgtcctccgtgagctccccagccctcttggtgaggtcaatgtctgctttcctcaacaccacatgagcgtatctccgccccacacccttaatggcagtgatagcgaaggctattttccgccgcccatcgatgttggtgttgagtactcgcaggatgtgctgaaacttctcggggatcactagggacatggcggcggcacaagcggcggcgtgtaggcctccctcgtgcc

SEQ ID NO: 2696 - DNA, 735 bp, Rattus norvegicus
  Genbank Accession No. CA505785
  misc_feature (1)..(735): n = a or c or g or t
ttttttttttttttttttaaaccaactttgtgatctttattgacgggtgacaactttatactccgaggaagcactacactgtgtataacagggacatggcatcagaggtgtggcagactccacagcagacaccggcaagtgtccgtccctctgcccactgttcatgtgcacacagaacatgaatgcgatttgaaatctgttcacggtgataaagttacaatccgccagccacctctgcagcctgacgtctacccacatgtctgacccgcgatgtctatgtcagcagtttccctcttgcaatcatttaaaattcgtttcctgttaggaaccagcaacatatttttttttatatttatctccttttgaagtaagagctatctcatctctgataactggctcatttttgtcatttatcaaaaactaaagggtaaaggaagaaagtgtgatgaattaaaaaaattatttttttaaggaaagataaaattcattttcacaaatttacaagagctgctggtgcgggacttattccactacgcatcaaactgggacccagtgcgagccacctccccaggggctcaggaaccagcggctcttcagaagcggcggctcgtgtgtgtctcctcactcaagccacagtccagtctgaagtcagagtcagcatgagctgcgctgtgcagaccccccagacatcttccatccaagccccctggcgcanagggagagcctctctccaca

SEQ ID NO: 2697 - DNA, 698 bp, Rattus norvegicus
  Genbank Accession No. CA506158
tttttttttttttttcttctcaaacagtttaatagcaaataaacaaaggaaggtaccacacttggcagatacaaaatgactttttgtccgtgtgtctgtgcaattaaaacagatttaggttccccattgggacaaaagggaaaacacacaaaaagggagagtccttttaaacacacactcccttgctccaaacttttaacaacttttccttttttaatccactacacaaactgtgattaggtaagaaaagcgacaagggctcttcttgccctttttttttttttaaaaaccattaaagcaaaatccataattttctacagagtacaacacaagttcacacacaaaagacatcttttataaatcaaacaggaaaaaaggaaagctcaaacaaggtcaagaagaaagcatctctacggctgaatcacgactttgagttgattgaatcccgttgctgctgcagaacagactgtgcgtttggtcatagtggcaattttttctcttcacattgtgaaatcactttacattgttttctagtagaaaaggcaaaaaactgtacaaaacccctagtgttaaatacaacgtttgtaccaataaaaaactcacacaggtttgtctccaaaatgtaaagtttcttttttttttctttttaaattattcacaaaaagcagctggaaatcagaaaggcagctgccgctcca

SEQ ID NO: 2698 - DNA, 767 bp, Rattus norvegicus
  Genbank Accession No. CA506292
ttttttttttttttttttaatttaaatccactttttatttttcatagattttaataattatacattactcttaacataaagatagtgaaatcttaaggataaggaggcaatttatatagcctcttctattcattgttcaggatggagctttccaaagggcataggtatgagatttaacactggaaaaatacatatgaaacttgtttaaccggctgcacttaggaccaggcacagcacaataaatagagaactgcataatcttttaaaaagactgctatattttaacacatccttacgaaagaagcactatcagtgaacaatctgaaactctacagtgtgggcagagggaaagttaccgtgaaaatctgagcgttgtttctgtaacttcttcacactcatacatcaacagtctcagagggaggaagaacgcacatctcaaatccaggacaacaaaacacacttggtcaagtagtttcttgggatcattcattctgatcacaagcctaggttgctggtaggtgtaggcagacaggttttgaaatctttctcatctccactagtcagggcttctggatacgaagccatattggaagcaaactgattaagcagcaccgttaatccacctctcaacaagtcattgcataatccatatctgatttaatagtttttaaattgttatgtggaagaatatccttcttgaatagcagtctatcgtgtagacatgcactagcaaggattacacattacatctgaagtgtatactatgt

SEQ ID NO: 2699 - DNA, 779 bp, Rattus norvegicus
  Genbank Accession No. CA506489
ttttttttttttttttttcgtctgcaggctttggatttatttgatcttctagacatttttatttatataaaagacaaacgctgcatagattgaaaataagtgctttaggtcttgatataaaaagagtattgtgcattcacattcctatttgaatacatgagtatggctgaagtgttcaataaaagaataaaaccttccctttacgcagagtagtgaacaagagtcaacactttcaggaatgacaggaatgatattccttggtcttttatctcgaataaagaaaagaaaaatgacacaaacaaaacaagccacagtaacatgacaccatattccagtttctgatgatgacccggaagtgaagtcatttttgaaccctagaaaccccacaagtggaccagcattctgtcaattcaccactagagggcgcagaacaacagctactgggttagcactggcgagcccaaaggagcaagtgggttggggttttttccacggcgttcccagcccactttcatgggaaagagagcatagatttttgccctacccccgacctgactgtgtaccctacctacagaacaaaagacccctcgatggttttccaatcacggtcctatctggctgaaaataagtcgcttcaaaaacacatttgctagaagagactgtgttctgcaacatccacacttgttggtggattgacaacttcctattaaagctctccaatctctgctctcatccaagtggatgcagattccctgtctctacatgggactcctgcacgt

SEQ ID NO: 2700 - DNA, 662 bp, Rattus norvegicus
  Genbank Accession No. CA506523
ttttttttttttttttttcaacaaaagcaagtttggtttatttgaatggtttcattaaataagttctacaaaggtaacaaactgaagcacgaagcgcaatcttacaagaagcgcaacacccggagttagtgcaaaatgtacagttaacggctgctgagaaaccccaaggtttgaattcagttttaaacagtgtacattgttaaataacgtaaggaaaacatttataattcggaaagttctttttaaatgtggaaaaagatactcaaagtgtactattaacacaaaaataatttaaacagttcagtagctctagctcttgtctctaggcttcagttatttcatccacaggaggggaaatcaacagtaagtaaacctttgtgaagggggcacagacctcaaaaccaaacaccacaggctgcatttggctccctctactgctggtacaaaacactcaatcatccaaaacccgcttcactcccacagtacctctcaccctctcccaaaaggaataaatgagtgaacactttagtagcaggacctcaaacaaaaaccctgctcattacacttccctctcctaaaactttcagctctcacttgtacctttgggcctcgaccaacttagaaagaacaggactgactcttaaaggaagcagccaggctct

SEQ ID NO: 2701 - DNA, 714 bp, Rattus norvegicus
  Genbank Accession No. CA506797
  misc_feature (1)..(714): n = a or c or g or t
ttttttttttttttttttcattgtaaaacttactttaatgatttctgtgcttttccttataagaataaaacatgacagctaatcttcaatgctgaaaaccagaggatcggacaaaaatcacatttatttcaccagctctgacaggtgcagatagagaattcacaaagctccgagaccacctgacatacaaagacaagggggtggacatcagaagtggggctcctcaatttaaaaatgccccaagtaacttgaaagtcgttaagttatagtattctatgtacatcacgtaggaaatgagccaatttacaagatgctgataaagatactacaatcaaacaatccttcacagaaagaatagtcctgaactggtcaaccgcagaccaggggggtttcagtcactcgatcaccagctgatatattcactttgtgatattttcatttcaagtcaattctaaaaaacaccatgacttaaactcgaaggcagacattattgttgagaattttctgaaatggccagtgtatgtaaaaaggcttaaaaggcaacgtcaacttcagcctcgggtggcgtgaagtggtgagttgtacattaacacttcctcgggttcctgaaactttcggtgaggttggcaatatggcctttanaacctcctcctgaaaactgtacttatgtatctatttctttgttcccacatttacagatcttgggtgtcgagc

SEQ ID NO: 2702 - DNA, 786 bp, Rattus norvegicus
  Genbank Accession No. CA506937
ttttttttttttttttttaaataattccaaattttattttcttaaactgatatgacacagtgaaacacaaaagggggagactcacaaaattcatcttaaaattgacaggcctgagcactggttcagtgagcaggtttggctcacaccatacacagccagccacacacatacacagccacccaggagcctttaggaaccaggtggtgggtaaggaacccctgcactagcctccctggtggctctgggttccggttggccacaaagcaataaatacaacatgttacatgcaagggaggtcatggggcaactaaggaagagactggtcttaagagatctgctttcttgtacaactcttgtacaaccaagcacagtggcaatatttcaagtattgcaaagaaaaacgtgtttttgtgtatgtgtgtgtggcctatgttgttgtgggacagaaaccccatatctgctgtgtggacactcagatactttcaagtatgcatggacagcggtgacaaaggactggcagaccagggaggctgggaaggtattagctatgtccaccctggagcctggaagacgagcttcagcacagaccctgaaggccaccaagcacaggagccagactgacaggaaagctccacagaggacatgtttgcatatgtttttcttcacccacacctgctactgcatgggaaggatggtggctgggcactgccctttctgccatccttacagggaaaagttatgagaccagcagcacactcactcatgcacatactacatacagcctca

SEQ ID NO: 2703 - DNA, 700 bp, Rattus norvegicus
  Genbank Accession No. CA507720
ttttttttttttttttttaccattctccatgtttattgtgattccaatgccacgcaggacacacaccaccactggctaggatgagagacagcagacagtgtttataggtgcatatatataacttatccctatgtacacacacagagtagacattacacatgaagaatcaggagggtacactgctggaattaggctgcggtcagttttctctgccactgacattgagaaggcggagatgaagctctgagaagatgcagcctcagaaccgttacggcatgcgagtcacttcggagtcctcggtccacactcctctgtgtttggcactctcaggccctggcacctggcctgaactcttcagggctcccagtcactggcctgtctctgaaaagagtggggaggttggaggccaggcctctctccctaccgtgcctccctttttcacagtcagcactccaaacagtgggttctgcctcccctggggcacccagaccctcagctccattgtccccacaggagctcgctgggacacccagaccggagtcattgctgaagcaaagctgaaggatctgaccccagtcatgcccgtcatcttcatcaaggccattcctgtggaccgaatggagaccaagaacatctatgaatgcccccgtgtacaagacacgtatccgaggacccacctatgtctggacttttaacctga

SEQ ID NO: 2704 - DNA, 744 bp, Rattus norvegicus
  Genbank Accession No. CA507980
  misc_feature (1)..(744): n = a or c or g or t
ttttttttttttttttttaaagtttttaaaaagtttaatggagccaataattcggcatataaattgtgttctggcagacattagacctgctttctcttaccaaagaaaatggcacgttttatcaaaatttgacaactgagagtaaagggcactgagattcagcttcagagcaccaacttaaaccaaacaaccaagaatatcattattcaacttggacagaggaaacagaacaaggcaggaagggagatgaagcatgttcctcggtctcaagtccctcaggaatgggagttctggcttcttgtcagagcaatcacaccgtcaaacccaattccagaatttatattcacaaccacagaaaagcaaaattgaactccatgtcttggtgtatcctaagggaagcctggaagtccttgtgatgcacagggtcgtccatttaaggtaaaatgacagattgctataattcttcctgcttttcaaataaaacaaagctccacttttgcaaaaactgagaaataccttactttccttcctagtctgaacacggagttcactgttttaaataagggctatatctatgagtacagaacttcaattcacacaacatttctaacattccattcacatcccactcagtcagtaatggttaacttagtaaggtttcttcacagaaaggttattattaatggctgacaaaattgcaaacttttaacanagtgctgtaattaccagaaaaactcgtgccga

SEQ ID NO: 2705 - DNA, 616 bp, Rattus norvegicus
  Genbank Accession No. CA508302
ttttttttttttttttgacagtctgaagcttttattcagtgggtctctgtgtctagaagaaggtgtttggcctcttggtggtgaagcgtggtttgtgctggcgccgcaacacacggtggggcaatgggaacttgatcttggagtcgtggaactgcttgacagctggccggcggcacttgccagctgcaatctcttccaccttcatgatctggatggagtgcgcacgggcacggtgtcgggcacccatgtctcggtagcactgtgtgaccgcgccggcagtggtcaggtcccggtactctcggtacatgttgtgagtgccacttcgggaatcatagcgcagccagatgccgaagttcttcacacgcaggggtgacttctcaaacacctgcccacagtacacaatttccccggatgacttcttcatcttcttcatcttcttcagctgcgacacaaagtaccagaagcgggacttggccaccacatggttgggtgcaaagattcgcattcggtacagtggcggtgtgtggcattttggggttggcaagcaacgccccaccaccttgtactcccgaagcgtgcccgacgccttcatagcagtgcgtgctcgcctcgtgcc

SEQ ID NO: 2706 - DNA, 548 bp, Rattus norvegicus
  Genbank Accession No. CA508354
ttttttttttttttttttagcttacaaagcaatttattaacagaaaataacttgagaagtcctgttcacagacggcgaccccgacgaccacccttccttcgagtgctgtcagaggggatgggggtgacatcctcaatccgcccaatcttcatcccagagcgagcaagagctctgagggctgactgggctccaggtccaggggtcttggtcctgtttcctcctgtggcccggagtttgatatgcagggcagtgatgcccagttccttgcacctctgggccacatcctgggcagccaacatggctgcatacggagaggactcatctcggtcagccttcaccttcattccaccagttactcggcagatggtttccttgccagaaagatcagtaacatggacaaaggtatcattgaaggatgcaaagatgtggcagacaccaaatacattctctccttcagccacctgaggtccaaggctgatgacctgttcttccttcttttccttccccttgcgaggtgccatttctgaacgtcgtctccacctcgtgcc

SEQ ID NO: 2707 - DNA, 831 bp, Rattus norvegicus
  Genbank Accession No. CA508428
  misc_feature (1)..(831): n = a or c or g or t
ttttttttttttttttttaattgaaaatattttattgatgagaccccaccagctgcacaaagtactcctggcatcaggcaccttcctccttggcaatgcgatctttcttgagcggtcccatgaatgctttcttttcctccatggtctggaagcgaccatgtccgaatttggaggtggtgtcaatgaacttcaggtcaatcttctcaagagcccgacgcttggtctggaccagcaaggacttccggagagtaagcactcgcttcttggttcccaccacacagcctttgagcatgatgaagtcattggtcacctcaccataatggacaaagccacccagtgggttgatgctcttgtcagacaggtcgtagtcagtagatgcattgttcttgatcagcttaccatccttgatgaggtagccttgaccaatcttgtaaatcttcttgttgatctctgttcggtgatggtagcctttctgcccagctcgagccacagagaaggctacacgggcaggatgccaagctccaatacaagcaactttgcgcagacctctgtgggtctttcggggcagcttctttgtatgccaacgactggtcacccctttgtagcctttgccctttgtcacgccgatgacgtcaatcatctcatcttgctcanacacctggttcacagggacctgctgctccagcctctctcgggcccagtctagcttctcagctacagtgcccccattcacctggatctccatcaagtgtgccttcttctggcgcagaggaagcaggcgcatctgagtgtgagcattatgcagatgacctgtcagtacttcttcatgct

SEQ ID NO: 2708 - DNA, 769 bp, Rattus norvegicus
  Genbank Accession No. CA508583
  misc_feature (1)..(769): n = a or c or g or t
ttttttttttttttttttcataaataagtaatataactttattaaaatgaaaagacaatattcaaaataatgcaacaaaatgaacaaatcctttgtccaatactgtacacacagtgcggagatcagtgcattttctaaagcatgttttaaccttcatttagttcatactaaaaataagctttaaatagctcaaataatgtcattcagcagtttaaactgaacagcttgttgggacatggcagcggtgtccctctgttagcaagcaccttctctttgtgcttatctatacaagataaacaatcagaggatgtaaaaattgaacacaagctatgcgtctcactgactctcagggcagtgaggcagccaactgtgagttttctaagcaggaagatgctgaagtgacctctggcattaagacgttctgtgctattggtcagaagtgtttcacttaaaaagcaaacaatccccaggaaatactgaataggaaccaacaacacaagaccagcttgtgttgtactttaaagtctcaaaaacaaaacaacatcccatacaccccacgataactctcaatcatggctaatcactgggctggtctataaaacttatacccaacactgacggccagcaccactcaactgcactcttgaaagcctcttcagtggacgggaaaagcaggaatagcatggaaaagtcaccaattctgtccatttccangagagacatacacaggtgatagatacatggtccagaacggctgtcctctcctctc

SEQ ID NO: 2709 - DNA, 690 bp, Rattus norvegicus
  Genbank Accession No. CA508901
  misc_feature (1)..(690): n = a or c or g or t
ttttttttttttttttttaaaattgcagacgccggtttattaccgaaggctagccaggactcttctactagcccagccagcggatgcccacaagggtcccaactcagtcttccaagagcaaggcagggctgcctcacggtggagatgggagcagtgttccctcctggggcaatggcggttttcctgctcagtggcagccagggtaggcagtggataccagcaccgtcttctcaggagggcactctcagcttcggagtccccaaaaagaactgtaggacacggtcagccaggagtgccaggccgaagtccagggccaggacctggccgatgaccagcttgaactctacagggatgtccacgaggccaaactggctgttgaagtcaggggaggagcccaggagcaagcccatgatggccatcagtgacactgccagactccacaccaagggcttgttctcaggcaggctctccatgaagggtgggcccttgtagtttatggcaaaggtagccatctgcatggccatggccatgatgtacacagtgctgttgaccaggctcggctcaaactccttgtacaggtctacaaactgttcctgcttctcagggctgcgtgcctgggcctcccggtacaggtagaccaggctcaggaagtggacagagaactgcagcatcacncgtaggatggtgtat

SEQ ID NO: 2710 - DNA, 793 bp, Rattus norvegicus
  Genbank Accession No. CA509214
ttttttttttttttttttcgtttatgccagtattttattaagacggggtgtctcattgtgtagccccgcctggcttcacactgcttcctgagtgggcttccacatccagcatacatgccaacatgttatttagtccctcaccatgtttaatttgttcaaccttttagccagtgttgattttttacctctactcacaaacctgatggtacagtcatagtccttgagctactaccattcacaaaggagatcaagaggctttcagaattttattaaaaaaaaaaaaaaatccagaatggatgaaaaaggaacaatcatcaagaatatagatgtcagacattggccacccaagagggtagctggagaagtatgccttaggcccatgagaggcttgtataattcttgatagatcactttaagctatggctaacacagctgttatccattgacctaacttctgtacctatagaccatgacacagagagcttagtcttgcaaggcatcagttgaaggagcaaatgtacacacaggtcatttatagcagtgctcttggtcaacaagcatctgcatatgacctcaattcaaggtccatgacagattacctctactgcatgtgaaatgggcttccatcttgaaaacatagctacttcagcacacaccagatttacctaataatgattggtacgcagccccatcccacccctttacgtgcagctgaaaacagcaggctagttatagaagtgtgaacctgctattgctgactttattaccacttaatgagttatagctattgtca

SEQ ID NO: 2711 - DNA, 715 bp, Rattus norvegicus
  Genbank Accession No. CA509259
ttttttttttttttttttagagaaagcaggagatgggatctttattagcagctagagctatgagctacaaataaatcaaaaacattgacactgaagttgctggaaacaggtctgtacagaaatattacaaaaatctcatcttccaatcccacagctaacctcttggggaagggcagccttggccagggcaaagcagcacagaagttatcctaagaaagtctcatccaccaggaaagcagtgaactacagctacatggcactaaaactcaagatagcagtttgtaaagagtcccttaatcataaaagttttcgaatgaaaacacgtgcccctcctgtcccgggggcttccagatctctacccaagagacttgagtacttctattaaggcaactggaagcccagcacgtccttcctaacatgctatggggaaaaaacaaatgtccaaagtgctgctctttcctagaaaggaaacagcactcaaaataaaggaaaaggccacagagggctccctgagaatccagtaaaaccaagaacttttccaaacacactttgcaactggatccaggtggagcagtgccctgcagcaaggaggagtgtacatgtcagtgagggcccagcctccaggaaccgtgaccgtggctttctgagtcattgagaacacacatggtagccttgattctttctacaatcgcccccatgcagaggaaagtattta

SEQ ID NO: 2712 - DNA, 748 bp, Rattus norvegicus
  Genbank Accession No. CA509276
  misc_feature (1)..(748): n = a or c or g or t
ttttttttttttttttgtgaatatagtcatttatttgtctttacagtgacgatggaagaatgtacaggtatcttctttcaataaagtataaaaatctgtttatatacagtgaagtataataatctttaattgggaaacgtatttggtactcctgatctgtttatattaaaactgtgggggaaacgaatatctcggtaagcgctacatttccagtcgatcgcacctggcacggaaagcgtcattgcatcttaggtcctgcttggtattataaaagactaatttgaagtcctaggattcaaaataaacatcatttggaataatagatatatacatcaaaaatacatctagaaaggcattggttagtgctattaaaaagctgtgtgctcaggtactcttctccttacaggcgaaacccggtggaaatgtttgaattccgtttctagcaatttgctcttggggaaggtcagtcgaaagttacctggtcatattcttactcctcatctccactgtccatgtcaatgtctacttcctccgtgtccacggcccgggacaggatgtccgccatgagtgcttcctctagtttctttcggacttgttggactcgctcttcctgtttcctaatgtcatcatctgtaacaatgaaagctttgcagaggggttgagatgtgttaagcaaacagcagggttcttttccacggncgcagagacctgtccggtgatgggtgcagagcttgtatgcaaagcactg

SEQ ID NO: 2713 - DNA, 738 bp, Rattus norvegicus
  Genbank Accession No. CA509681
  misc_feature (1)..(738): n = a or c or g or t
tttttttttttttttattagccaaagcacatactttattagctcctgaactctagttctccttctcctgtacagttttggttccacgtagccgtccagtccggcgagcagcaatgagacccactttgcgcccagctggggcatctcttcggatagtggaaggcttgccaatgtgctggtggttaccaccgccaaagggatgctccacaggattcatggcaacaccccgcacacgtggccagcagttcctctttgccttgtacttatggtaggcacggccagcctttaagataggcttgtcaattctgcccccgccagccacgacaccaacaacagctcggttagcagaggaaatgaccttcttggaccctgaaggcagcttcactcgggtcttcttggtctctgggttgtgggagatgactgtagcatagttcccggaggctcgtgccagcttgcccctgtccccaggcttctcctccagacaacacacgatagtaccctcaggcatggtgcccacgggcaaaacattgccaatattcagctgggccttcttgccgcagtacacaaactgtccagtgtggattccctctgcggcgatgaacagctctgtccgcttcttgaatcgatagggatcacgaaagactactttcgcgaggggagcgccgcggncagggtcatgaatgatgtcctttacgatgcctttaatgtagccgtgtcgctccgcgaagtcacagcacgc

SEQ ID NO: 2714 - DNA, 841 bp, Rattus norvegicus
  Genbank Accession No. CA509706
  misc_feature (1)..(841): n = a or c or g or t
ttttttttttttttttgtcaatcagtttaatatgtcataggtagtcatatgaatgcttaagttacaaaattagctgccacggtccaatatatgggactttcagaaagcttatattacttaaacaataactaagcacataaaatttgattctaaatgtactttaagatttgtaaaacaatgttaagtctaaaattatatggccttaaagtgattcaatcttgtgttatttttaataacttaactacacctgtatatcccagtgcataatttctattaacctagacaaagccacatgaaaaaccccatgtaatccccaaggcaacagcacacagctttcaccacacctcactgttactgcggcatcagaacacagaaattgtcaaccaaaccccactacccactcccaacacaaaacaaccctttcccaccccagcaagaactacctggtacaagcagagacttaagaaatgctttctcggtaggaagcatttataaaatgcagagctctcgacaagccaatgcttatgcacagagaggggcctctctccaccatcgctcctgccccacgagtcagacaaaattctgaatcacttaaaaaagctcactttttanaagcatatttgtgcatatcaatggttatgtgtttcaagacagtacataccggccttgtggacaatantaaagcaggcagagaacaagcgcactccatagacagatcagctcctccatganaacctcacaggctgcagcaangcaagaaccattatgacctcacagagaccaagcatctgactgctgatccggctagctgacgcagtccatttattcatgcatttcttgc

SEQ ID NO: 2715 - DNA, 716 bp, Rattus norvegicus
  Genbank Accession No. CA509713
ttttttttttttttttttggcaaatacatattgttttatttagtgtttctctggattgcagaagtgtcagcagtgggctgagaaacccagagggcacagagagagctgggcaaacccaaggacctctggggtggagagaaacagcagaaagaagtgatgcccctgcagttcctccaaggccagccctgtccccatgctcccaggtcatagaggtacccagagccaataaagaccgtactatattgggtcaaaagtatgtgtgtaaggagttgacatcctaaggcatagacccaggtagaagactccctcccacctggtggctcccaagggtgattgctggtctgagagccagggatatacataagacacaacccttgctttatgggcctccttgtccctgggaaaggcagtgagatgtgctgagggcgagttttactttagggtttgctccaatcttctactggtaagtcttcctccctctgtgtgcctgtctccatctctgtgatttgcctgaaccagacaattctctgaagtctttcaaactcttaagactttcccccaactttagagtgccctcagactggggtgaaaatattaaaaacatttttttttaatgctggggattgagcccagggtctcacgcatgcttagcaccagttctacctctgggctatccccagctcctaaaaggacattcttaaggcaggaatatgggg

SEQ ID NO: 2716 - DNA, 651 bp, Rattus norvegicus
  Genbank Accession No. CA509774
ttttttttttgtgagtggcagtgaacgagcacgcactgctatgaaggcgtcgggcacgcttcgggagtacaaggtggtggggcgttgcttgccaaccccaaaatgccacacaccgccactgtaccgaatgcgaatctttgcacccaaccatgtggtggccaagtcccgcttctggtactttgtgtcgcagctgaagaagatgaagaagtcatccggggaaattgtgtactgtgggcaggtgtttgagaagtcacccctgcgtgtgaagaacttcggcatctggctgcgctatgattcccgaagtggcactcacaacatgtaccgagagtaccgggacctgaccactgccggcgcggtcacacagtgctaccgagacatgggtgcccgacaccgtgcccgtgcgcactccatccagatcatgaaggtggaagagattgcagctggcaagtgccgccggccagctgtcaagcagttccacgactccaagatcaagttcccattgccccaccgtgtgttgcggcgccagcacaaaccacgcttcaccaccaagaggccaaacaccttcttctagacacagagacccactgaataaaagcttcagactgtcaaaaaaaaaaaaaaaaaaaaaatcggcggctgcggcctcgtgcc

SEQ ID NO: 2717 - DNA, 712 bp, Rattus norvegicus
  Genbank Accession No. CA509836
ttttttttttttttgtttaataaaatgtttatttaggatgttaacacaatataggtcatgcaagagcccagtttaaaaaaaatactaaaaagaatgtaaggactgataactggtgctgccaattaaagattgtcaatcaatttatcaccaaaagtgctatgagaaaacatttgagtctgacatggttgtagtgatccttcggatttgtgcctgacattgacaggtagctatctgtgttccatgcctcagaggagcagagtcctctgtccaaaacagccatcaaccccccaccctctcacagtcagagggtgcggtggctctcggcaccctcagataacctcgagctgccaggcccccgcaggggtgaagggcgagcatttggtgagcatcagctgacggtttccaggtttccactgggaaccttgaagttttcgtaatgaaatctgtaggacttgcgagtcatcctcctggacctgacatgtagtgtgacatctggggaagggtttccaggacaatgaggatgcatttgaacagaaacaccaaatggaacacagtgtctcagatttcaaacaaacacaactcatcttttggcaaaaaaaaaaaaaaaaagaaagaaataaaataaatagcatgaaaatttgacgatgtttggataatctaccaagtgtcaaggagtataatttcattgtagacacacctcgtgccgaattct

SEQ ID NO: 2718 - DNA, 687 bp, Rattus norvegicus
  Genbank Accession No. CA510005
  misc_feature (1)..(687): n = a or c or g or t
ttttttttttttttttttactcgagagcccaaaatattttatttaacaatgtgaattttggaaaaatagcagctcccagggaagaagcttcttgaatcaaaagtggttggcagtcaacacagagcctgggcaaggttgcaccagaggcaagggtcctgcctggtcccagcaaggaaacacgttgctaatgacccagggacaggcctttcttaatgacaggaacaggaggctccaagtacactcatctacggaacattctggaaaccattctgtgagtcttccttccctagatgatgtggggaaccagaaaaccaggaagggctgtataattccatgtgctacaatttctaaatttaataacaaaccatttatgttttctacccaaattacctgctgatttgtataaatattttaaatctctttcccctcctctttagagtgtaaggatagttttaggaacagtcagtgaagccttaaagctctgagtttgaacgtggtggcagctccttgaagtgatatgggtgagtcagtgagtagctgctcaaggtccttnggtgggctttggggtanagatgcaaggttccagagtatctgctaggacaccgtaagccactccaagataccaccaagtctctaagtgctgtctgcaggtgacatgagtcagctagaaggcttcacacaaaccct

SEQ ID NO: 2719 - DNA, 667 bp, Rattus norvegicus
  Genbank Accession No. CA510339
tttttttttttttttcttaaaacggactccaatttatttattgaaaatatcacaatggctgggcatgtatcacacgcctttggtcccatcacttgggcggaagaggcaggaggatctctgtgagttcaaggccaacctggtgtacatggtgagttccaggccagccaaggctacacagtgagactctgtcttggaaaaccaaaagaaaaggaaagatcataacacacagaatgccaatatccctcctcataaataaaggtagtggataaaaagacaaaatgaaggaatgctataaaactggacagttcccagctgctttaagctctgggtttgggcctggaggaggacttgtgctctgggagaatacaacatactaagcctttcttactctggcttgtgctttgtaatggagaccctatgtcccctaaaaacattccagaaaaacacgggattctatttttttcagcaatgctggcccagagagtccctctgcctcctgcggtgggggaagatctacactcacagtctcacgtccatcatacctgagcacacccaagctccctccccctgtacgtgatctcattcgaagcccagtcgatcctactgaacactgcctgcctcatgaggccctggaggtcaccgctggctcaggtgagacaccaggtag

SEQ ID NO: 2720 - DNA, 760 bp, Rattus norvegicus
  Genbank Accession No. CA512485
  misc_feature (1)..(760): n = a or c or g or t
cgagagcctgcctgactgcgtgttcgtggaggacgtggccgtggtgtgcgaggagaccgccctcatcacccgccccggggcgcctagccgcaggaaggaggttgacatgatgaaagaggctttggaaaaacttcagctcaacatagtagagatgaaagatgaaaatgcaaccttagatggtggggacgtcctattcacaggcagagagttttttgtgggcctttccaaaaggacaaatcaacgaggtgctgagatcttggctgatactttcaaggactacgcagtttccacagtccccgtggccgattctttgcatttaaagagtttctgcagcatggctggccccaacctgatcgcaatagggtccagtgaatctgcgcagaaggccctcaagatcatgcaacagatgagtgaccaccgttatgacaagctcactgtaccggacgacatggccgccaactgtatatatttaaatatccccagcaaagggcatgtcttgctgcaccgaaccccagaagagtacccagaaagcgcaaaggtttatgagaagctcaaggaccatctactgatccctgtgagcaattctgagatggaaaaggtggacggcttgctcacctgctgctccgtttttattaacaagaagacagactcttgagcggaagagtcnctcccgagcggccggcgagtggcctaggccaggctgatgatggctctgtacccattcctcctgtttcctttgacaatctactgtgccactaac

SEQ ID NO: 2721 - DNA, 857 bp, Rattus norvegicus
  Genbank Accession No. CA512644
  misc_feature (1)..(857): n = a or c or g or t
tcatgcgagacacataagtccatctactatatcacctgctctttgctctcaccagtgatatagtagatggccaactctgccttcgtggagcgtgtgcggaaacggggctttgaggtggtatacatgactgagcccattgatgagtactgcgtacagcagctcaaggagttcgatggcaagagcctggtctccgtgaccaaggagggcctggagctaccagaggatgaggaagagaagaaaaaaatggaggagagcaaggcaaagtttgagaatctctgcaagctcatgaaggagatcttggacaagaaggttgaaaaagtgactatctccaataggcttgtgtcttccccctgctgcattgtgaccagcacctacggctggacagccaacatggaacggattatgaaggcccaggcactgcgggacaactcgacaatgggctacatgatggccaagaaacacctagagatcaaccctgaccaccccattgtggagactctgcggcagaaggctgaggcagacaaaaacgacaaagctgtcaaagacctggtggtgctgctgtttgagactgctctgctctcctctggcttctcacttgaggacccccaaacccactccaaccgcatctaccgcatgattaaactaggcctgggcattgatgaagatgaggtcactgcagaagagcccagtgctgctgttcccgatgagatcccccactggagggtgatgaggatgcctctcgcatggaagaagtggattaaaggctcctgngacagccccgccctctgtatagtatccctgtggctccccaacacgcttgactggccctgacccactggctctctgctcatgtctac

SEQ ID NO: 2722 - DNA, 866 bp, Rattus norvegicus
  Genbank Accession No. CA512712
  misc_feature (1)..(866): n = a or c or g or t
gcgcacctggtaaagctggacctcagcaagaacaagctgcagcagctgcccgcagactttggtcgcctggttaaccttcagcatttggatctcctcaacaacaggctggtcaccctgcctgtcagctttgctcagctcaagaatctgaagtggctggatctgaaggacaatcccttggatcctgtcctggccaaggtggcaggtgattgcttggatgagaagcaatgtaagcagtgtgcaaacaaggtgttacagcacatgaaggccgtgcaggcagatcaggaacgagagcggcagcgccggctggaagtggagcgagaggcagagaagaagcgtgaggccaagcagcaagctaaggaagcaaaggagcgcgagctgaggaagcgggagaaggcggaggagaaggagcgtcggcgaaaggagtatgatgctcagaaagcttccaagcgggagcaagagaagaagcctaagaaggaaacaaatcaggccccaaaatcgaagtctggctctcgccctcgcaagccaccaccccgaaaacacaatcgctcctgggctgtgctgaaggggttgttgctgctgctgctgctatgtgtagcaggagggctggttgtatgccgggtgacagggctgcaacagcagcccctctgcaccagcgtgaacgccatctacgacaatgccgtccagggcctgcgccatcatgagatcctccagtgggtcctccagaccgactcccagcagtgagctcatcctcagcatcgctgcctctcagcctcggagcttggattcctatggaattgggttctgctggacacaacttctttttagcgtcagactacctgccatcatcanatggctgctgagtggta

SEQ ID NO: 2723 - DNA, 734 bp, Rattus norvegicus
  Genbank Accession No. CA513256
  misc_feature (1)..(734): n = a or c or g or t
tgatcctgcactgaatcaagaggttgcattgaagttagagtcaaagatgaattaacagagtcacccaaatacattcagaaacaaatatcttataattgcagtgatttggagcaatcaaatgtgactgaggaaacacctgaaggtgaagagcacccagtggcagacactgaaaataaggagaacgaagttgaagaggttaaggaagagggtccaaaagagatgactttggatgagtggaaagctattcaaaataaagaccgagcaaaagtagaatttaatatccgaaaaccaaatgaaggtgctgatggacaatggaaaaagggatttgttctgcataaatcaaaaagtgaagaggctcatgcggaagattcagttatggaccatcatttccggaagccagcaaatgatataacgtctcaactggagatcaattttggagacctaggccgcccaggacgtggtggcagaggaggacgtggtggacgtgggcgtggtggtcgtcctaatcgtggcagcaggactgataagtcaagtgcttctgccacgattaggacgtggtggacgtgggcgtggtggtcgtcctaatcgtggcagcaggactgataagtcaagtgcttctgctcctgatgtagatgacccagaggcattcnccgctctggcctaactggatgccataatacaacactggttcctttgtggaccctcctgttcaaagcttttgcatgcttaaggat

SEQ ID NO: 2724 - DNA, 793 bp, Rattus norvegicus
  Genbank Accession No. CA513426
  misc_feature (1)..(793): n = a or c or g or t
ccaaaagttgtttggaatgatcatcactatcggtcagtccattgtgtacgtgatgacgggcatgtacggggacccttcagagatgggtgctggaatctgcctgctgatcaccattcagctctttgttgctggcttaattgtcctacttttggatgaactcctgcagaaaggatatggcttgggctctggcatctctctcttcattgcgactaatatctgtgagaccattgtatggaaggcattcagccccaccactgtcaacactggccgagggatggaatttgaaggcgccatcattgcgctgttccacctgctggccacccgcacagacaaggtccgagcccttcgagaggcattctaccgccagaacctccctaacctcatgaacctgattgccaccatcttcgtctttgctgttgtcatctatttccagggcttccgagtggaccttccaatcaagtcggcgcgttaccgaggccagtacaatacctaccccatcaagctcttctacacctccaacattcccatcatcttgcagtctgctctggtgtccaacctgtatgtcatctcccagatgctgtcagcatgtttcagtggcaacctgctggttagcctgctgggcacctggtcggatacgtcatctgggggcccagcccgtgcttacccagttggtggcctgtgttactacctgtctcctccggaatcattcggctcagtgctggaggaccctgtcatgcggtcgtgtacattgtattcatgctgggttcctgtgcattcntttccaaaacatgga

SEQ ID NO: 2725 - DNA, 1083 bp, Rattus norvegicus
  Genbank Accession No. D00729
acacaactctcaatcatccagtgaactgggctgactgtggcaggacctgggcggtgaggaaacccttggggacaccgatgtggcttgagcctgctcctcttcttggcgctggcctctcccgtcgcgttctgctgcaggccggatcccgcctcgccgcaggggggcctggacgagcccgtcgcttctctaacaaggcggtgttggtggagaaggagggcgaggcaggaatcgcagtgatgaagttcaagaaccctccagtgaattcctcagcttggagtttccgacagagttttcgtcatcagcctgagaagctggaaaatgaaaagagcatccgaggtgtcatcctcacttcggagcgcccgggaacctccccgccgccccacgacatgaagaagaaggacgaccagcccactatgctgagtactggaaggctcgtgccaggagctgtggctgaggctctacttgtccaacctgacttgatatctgccatcaatggcgcctttccagctggaggctgcctcatggctctcacctgtgactacaggataatggcggacaactccaagtataccataggattgaatgagagcctgctgggcattgttgcccccttctggttaaaagacaactacgtgaacacatcgggcaccgagcagccgagcgtgcccttcaactggggacgttttcccactaacatgacagcagctgctctactgacgcttcacagaagcctcaatgaggtggtacctgaggatcaggtacacagcaaggctcgctcagtgatggccaagtggtttaccattccggaccattctcggttgctgacgaagagcatgatgcgcaaggccacggcggacaacctgatcaagcagcgagaggctgacatccagaacttcaccagtttcacctccagagactccatccagaagtccctgcacgtgtacttggaaaagctcaagcaaaagaagggctgacctaagggtgccacacggtgtttagttacacgtgccttctagggacccatggtcccaaggattatcaataaggtatttttcaatttaaaaaaaaaaaaaaaggaattcc

SEQ ID NO: 2726 - DNA, 1663 bp, Rattus norvegicus
  Genbank Accession No. D00752
agtgacaaccctgaacatcaggtgtcagcaaacacagaggctggcagctggctggtatcagctctgcagccaggaggacagagaagatggccttcattgcagctttggggctcttgatggcagggatctgccctgctgtcctctgtgatggcacactgggaagggacactctatcccatgaagaccacggcaaggggagacaactgcacagtctcacattggcttccagcaacactgacttcgcattgagcctctacaagaagctggctttgaggaatccagataaaaatgttgtcttctcccctcttagcatctcagctgccttgaccattttgtctctgggagcaaaagacagcaccatggaagagattctagaaggtctcaagttcaatctcacagagatcactgaggaagaaatccaccagggctttgggcacctcctacagaggctcagccagccagaggaccaggtagagatcaatacaggtagtgccctgtttattgacaaagagcagccgatactgtcagaattccaggagaagacaagggctctgtaccaggctgaggccttcatagctgacttcaagcagcccaatgaggccaaaaagctcatcaatgactatgtgagcaatcagacccaggggaagatcgcagaactgttctcagacctggaggagaggacatccatggtgctggtgaactatctcctatttaaaggcaaatggaaggtcccctttaaccctaatgacacatttgagtctgagttctacttggatgagaagaggtctgtgaaggtgcccatgatgaaaattaaggaagtaaccacaccctatgtccgggatgaggaactctcctgctctgtgttggagctgaagtacacaggaaatgccagcgccctgtttatcctccctgaccaaggcaagatgcagcaggtggaatccagcttgcaaccagagaccctgaagaagtggaaggactctttgatccctaggattataaatgatctccgcatgcccaagttctccatctccacagactacagtctaaaagaggtccttccagagctgggcattaagaaagtcttctcccagcaagctgatctgagtaggatcacagggaccaaggatctgtatgtctctcaagtggtccacaaggctgtgctggatgtggatgagacaggcacagaagcaactgctgctacaggggtcgctacagtcatacgtagacaacctcgaactctgaatttcaaccggccattcatggtggttatcactgacatggatagtcagtctatcctctttgttgccaaaatcactaaccccaagtaagcccaaagctccccaagatctgacagttctgcccaggaccctgggactgagcctgcatgtggatctctgtatatgtcctgacattcatgctctgattggctgtttcaaagttgtcttagacagtgacatcgactatctctatggcccccatgtgcacaggagcctttagactgtcagtgtcaggctcttaggccccttgggagcatctacccatgtttctgaacctggaatctatctttattcttccctagtgactcctctttctgtgttcataccccaaacctagttattggcaagtacatccagtcccaataaatgctttgagcacatctgct

SEQ ID NO: 2727 - DNA, 2051 bp, Rattus norvegicus
  Genbank Accession No. D00753
tggcaaccctgaacatcaggagtcagcaatcacagaggcaggcagctggctggtatcgctctgcagcctgaagactggagaagatgacccgccttgtgactctggagctcttgatggctgggatcggctctgctctcctctgcttcccagattgcatactgggagaggacactctattccatgaagaccaagacaaggggacacaactggacagtctcacattggcctccatcaatactgactttgccttcagcctctacaagaagctggctttgaggaatccagataaaaatgttgtcttctccccacttagcatctcagccgccttggccgtcgtgtccctgggagcaaagggcaacagcatggaagagattctagaaggtctcaagttcaatctcacagagacccctgagacagaaatccaccggggctttggacacctcctccagaggctcagccagccaagggacgagatacagatcagtacaggcaatgccctgtttattgaaaaacgccttcaggtcctggcagagttccaggagaaggcaaaggctctgtaccaagctgaggccttcacagctgatttccagcagtctcgtgaggccaaaaagctcatcaatgactatgtgagtaaacagacccaggggaagatccagggactgatcacaaacctagctaagaagacatccatggtactggtgaattacatctactttaaaggcaaatggaaggtgccttttgaccctcgggacacattccagtctgagttctactctggcaaaaggaggcctgtgaaagtgcccatgatgaagcttgaggacctgaccacaccctacgtccgggatgaggagctgaactgcactgttgtggagctgaagtacacaggaaatgccagcgccctgtttatcctccctgaccagggcaagatgcagcaggtggaagccagcttgcaaccagagaccctgaggagatggaaggactctctcaggcccagcatgatagatgagctctacctgcccaagttctccatctctgctgactacaacctggaggacgtccttccagagctgggcatcaaagaagtcttctccacacaggctgacctgtctgggatcacaggggataaggacctgatggtctctcaggtggtccacaaggctgttctggatgtggctgagacaggcacagaagcagccgctgccacaggggtcaaatttgttccaatgtctgcaaaactggaccctctgattatagctttcgaccggcctttcctgatgattatctctgacacagaaactgcaatagctccctttttggccaagatatttaaccccaaatgagattcgaacttcccaagagttgatcgttctcctgaggcattgagcctgtctgtgggtctctgtgtgcatttttggcttctatgctctgattggccatggcggcatgcctggatgagacagtaactaactgtgtaacagcctcatgtacagacgcctgtgcagagtcgctgccatgctcccaaacttcttggtaccactagctcatatttctgagcctaaaatttgtctttcccctgcccttgctctctctcccctgtatctgcctcaacccagaagccagggccccatcaggttgtctcagtcccttcttaggccttagttatatcttccttcagcgttgctgtcttgatgggactgtgcacgattaccggccaacccacatggaccaagaagaacacttgctggtccgtatctttctgcagtatgtgggatcacttggtgcccagtgctgcctcactatttccttcctctgggcactgctccttgcagcatggcctgaccttgtccacatctggcacagagctggagccctcccttctgcagatgcatggcacctgtgggtcagaccagatccccctccccagcactcctacttagagcaatgcagcctttcttttagttcccagctgaccaacctcacacaaaagatgaccaacaacaaccaaaatgaagaggtaggagcaaaggatcaataaacacatcactgcattg

SEQ ID NO: 2728 - DNA, 1458 bp, Rattus norvegicus
  Genbank Accession No. D10261
cgggctgcccctgacatttgtccatctcccagggcctctctggagcagccatgaagtccctggtcctgctcctttgttttgctcagctctggagctgccaatcagctccacaaggtgcagggctgggttttcgagaattggcttgtgatgacccggaaacagagcatgtagctttgatagccgtggactacctcaataaacatcttcttcagggattcaggcagatcttgaatcagattgacaaagtcaaggtgtggtctcggcggcccttcggagaggtgtatgagttggaaattgacacgctggagacaacctgccacgctctggacccaacccccttagcaaattgttctgtgaggcaacaggccgagcatgcggtggagggagactgtgacttccacatcctgaaacaagatggccagttcagggtgctacacgcccagtgtcattccacaccagactctgcagaggacgttcggaagttttgcccacgatgcccaatcctgatccggttcaatgacaccaacgtggtccacactgtcaaaactgccctggctgccttcaatgcacagaataatggaacctattttaaactggtggagatttcccgagctcaaaatgtgcctttcccggtgtctactctcgtggagtttgtgatagctgcgactgactgtactggtcaggaggtcacagatccagccaaatgcaacctgctggcagaaaagcaatatggcttctgcaaggcgactctcatccacagacttggtggggaagaggtttcagtggcctgcaagttattccagacacagccccagccagccaatgccaaccctgcaggtcctgcacccacagtgggccaagctgcgcctgtagccccaccagctggcccacctgaatccgtggtggtaggacccgtggcagttcctctaggacttccagaccaccgaacccaccatgacctacggcatgccttctctcctgtggcttctgtggagtcggcctcaggagaagttcttcactcacctaaggtgggccagcctggtgacgctggtgctgctggcccagtggcccccctgtgcccagggagagtcagatacttcaagatctaggcttgactcagggaagtaaggttttggcaggcaggacatagccaccactgaagtagagggcttgtccactgaccggaattccctcccagaggaccaggggttcagttcccagcgcctacactggtggctcccattatctttggccttagggtattcagtgccctctttacctgttcactcacacacacacacacacacacacacacacacacaccagcacacatgtgcttatgcatgcacacaggcacattaataaaatgttttttaaaagtgaaatactcaaagcattaagctaaactaggagtccgagcatgtatctcattggtaaaacaccaacaaggcggaattc

SEQ ID NO: 2729 - DNA, 2540 bp, Rattus norvegicus
  Genbank Accession No. D10262
ccgcggcccactacagcagtcgcccgccgtcagcctcccgcgctcgtctctcgtcactgctgctcggcgtccattgctgcctctccccgcagtcgccgacgtcgcttccccgcgcgctcccacaaccgccgccccgccggtcagtgaagccggtgagccattccccgcgccggcccccagaggcgggcatccagccggaccccgagtgtggccctctcctgctgtggccgtccgcgccttctcgaccgcttatccagcatgaaaaccaagttctgcaccgggggcgaggccgagccgtccccgcttgggctgctgctgagctgcggtggcagcgctgccccgacgcccggcgtagggcagcagcgcgatgccgcaggcgagctggagtccaagcagcttggtggccggtcccaacctctcgcgctgccgccgccaccaccgccgcccctgccgctgcccccgccgccatcaccgccgctagcggacgaacaacccgagccccggacgcggcgcagggcctacctgtggtgcaaggaattcctgcccggagcctggaggggccttcgcgaggaccagttccacatcagtgtcatcaggggtggtctcagtaacatgctgttccagtgttccttgccagactccatagccagtgttggtgatgaacctcggaaagtgctcttgcgactgtatggggcaatcttaaagatgggggctgaagcaatggttctggagagtgttatgtttgccattcttgcagagaggtcacttgggccaaaactctatggcatctttccgcaaggccgactggagcagtttatcccgagccggcgattggacactgaagaattatgtttaccagatatttctgcagaaatagctgaaaaaatggccacatttcatggtatgaaaatgccattcaataaggaaccaaaatggctttttggaacaatggaaaaatacctgaatcaagtactaagacttaaattcagcagggaggccagagttcaacaactgcacaagttcctctcttacaatctgcctctcgagcttgagaacctgaggtcattgctgcagtatactagatccccagttgtgttttgtcataatgactgtcaagaaggtaatatcttattgttggaaggccaagagaattctgaaaagcagaagttgatgctcattgactttgaatacagcagttacaattacaggggatttgacattggaaatcatttctgtgaatggatgtatgattatacctatgaaaagtatcctttcttcagagcaaacattcagaagtatcctacccgaaaacaacagctccattttatttcaagttacttgactacattccaaaatgattttgaaagcctcagcagtgaagagcagtctgctacaaaagaagacatgttgcttgaagtcaacagatttgcccttgcctctcatttcctctggggactttggtccattgtacaggccaagatctcatccattgaatttgggtacatggaatatgcccaagccaggttcgatgcctactttgaccagaagaggaagcttggtgtgtgaatggatggctccactcttcaccactggactgcaggaggtggctgcaccaggccctcagtggagcgctgctgtgaccactgccctgggcagaaggcctggacgtctcactactgagcaccgatgtgtatgatactacagactatattaaagtggagtaacatttctttcatctttgtttacactctcactaggactctgaaccatgattggaagcagaaatatagtgtgatagtgcaatagctcagaccccgcctaagcgggaggcctttcagctacatggctacagcttcagccacttaggccccagccagacagagcagtgctgtgtgggtactgagtgctgacttaggatattaatgtgctgcaacacgttcatgaccaggctttgaaggtgacagtctgacaatgtgttggagacactctgaagggcaagtgaacagacatactgtgaaatggctcgacaggaggagcctgaattgtggggtctgtggaggcagccagctgtttctgtacagggtacacttgactatgggtatgcatctgcaggcagtagctgcagccctcctgtgcctgtgtacacatgactacaggggccagtgtcactgactggccataactgcagtgtctcctaactgggtgtgctttatgcttcagcttcccggggaggagcagtggagccagcttcctcaccccttcttgccttctctctgcctgacctggaacttgggctttcgcccattgccctctgaagctgcttcccatctgatgtcactgggagacagcagctgtatgtgtggggtattggggtgcaggtagattagagctgtgaaatccatgtacattaatacccaatgggataaacctagaatttttttttttttactctgaactctgaattgttttgtgcacatatttctgctaccaccgaaactgtattatacagataaataaacaacttgaaacttaaaaaaaaa

SEQ ID NO: 2730 - DNA, 2266 bp, Rattus norvegicus
  Genbank Accession No. D10655
cctacaatgcaggcaggcaccatagcccgctgggaaaaaaaagaaggggaaaaaatcagtgagggtgatctaattgcagaggttgaaactgataaagccactgttggatttgagagcttggaggagtgctatatggcaaagatccttgttcctgaggggaccagagatgttccgataggatgtatcatttgtatcacagttgaaaagcctcaggatattgaggcctttaaaaattatacattggattcagcaacagctgccacacaggcagccccagccccagctgcagctccagctgctgccccagctgcaccttctgcaagtgctccaggtagctcctatcccgttcacatgcagattgttcttcctgccctctccccaaccatgaccatgggcaccgtccagaggtgggaaaagaaagtgggagagaagctgagtgaaggagacttgctggcagagatagagaccgacaaggccaccataggctttgaagtacaagaagaaggttatctggcaaaaatcctggtccctgaaggcacaagggatgttcctctgggaaccccgctatgtatcatagtagaaaaacaggaagatatagcagcatttgcagactacaggccaacagaagtgaccagcttaaagccacaggcaccaccacctgtcccacccccagtggcagctgttcctcccatcccccagcctttagcacctaccccctcagccgctcctgctggaccaaagggaagggtgttcgttagccctcttgcaaagaaattggcagcagagaaagggattgacctcacccaagttaaagggacgggaccagaaggcagaatcatcaagaaggacattgactcttttgtgcctactaaggctgctcctgccgctgcagcagctgctcccccgggtccaagagtggcaccaactcctgcaggtgtcttcatagacatccccatcagcaacattcgtcgagtgattgcgcagaggctcatgcagtcgaagcagactatacctcattattacctttctgttgatgtaaatatgggagaggtgctgttggtgcggaaggaacttaataagatgcttgaaggtaaaggaaaaatctccgtcaatgacttcatcataaaagcttcagctttggcctgcctgaaagttcctgaagcaaactcatcttggatggacacagttatacgacaaaatcatgtggttgatgtcagcgttgctgtcagtacccctgcaggacttatcacccctattgtgtttaatgcacacataaaaggactggaaaccattgctagtgatgttgtttctttagcctccaaagcaagagagggtaaacttcagcctcacgagttccagggtgggacatttacaatctccaacttagggatgttcggaattaagaatttctctgcgattattaacccacctcaggcatgtattttggcaattggtgcttccgaggataaactgatccctgcagataatgagaaaggctttgacgtggctagtgtgatgtctgtcacactcagctgtgatcatcgagttgtggatggagcagttggagcccagtggcttgctgaattcaaaaagtaccttgaaaagcctgtaactatgttgttataatttccctgcgaacttctattcttcctctgctgacattatatttatatgttattaaacaggtggttcttttaaagtttcactagttaattttattattgagtcagtccagataaattatttgtaacagacataaatgaatcttttgtaaatgccagttacacccaaatgttttacccctttaataattacacatcggtttaaagctgtgtactcctagtgaaggggacatgtgggcctaactctttggtagaaggagccttcctgggagtgatagatggcaggattgtggcttcctgcagacaagtcactaaaagtacctggatgagatacttggagttagattaatgatcacttatttaagtgtgagggaacagtcgtgaaaattacgtcttatggaggagtttgaatttacgttggaatctaacagttaaagtctcctgtcacatgaccttagtttatcactcagtaagtgaaacttttaagagtcagcattttcttagacctcttcaaaccaactattatttttatatgaatctctaaataaaatagctttccccacaagataaagatataaaccagcttcttggtataaatgaaattttatgtatttatttataaacaatttcaatgtataacttga

SEQ ID NO: 2731 - DNA, 485 bp, Rattus norvegicus
  Genbank Accession No. D10952
gcttgtctcgagcgagatggcttcaaggttacttcgcggagtaggcgctttggcggctcaggccctgagggcccacggaccccgtggcgtggccgctacccgctccatggcttctggaggtggtgtccctactgatgaggagcaggctaccgggctggagagggagatcatgatagcagcacagaggggactggatccatacaatatgctacctccaaaggcagcttcgggcaccaaggaagaccccaatctagtcccatccgttagcaacaagagaatagtgggctgcatctgtgaagaggacaactgtactgtcatctggttctggctgcaccaaggcgagagccagcgatgccccaactgtggaacacattacaagttggtgccctaccaaatggtccactgagcccacccctggtttaacatttcagaatgtaaaggaaaacgtctctcaataaagactagccaacgcactggctccttcc

SEQ ID NO: 2732 - DNA, 1561 bp, Rattus norvegicus
  Genbank Accession No. D12573
gagtgtgtggtctggggccacctctctctttttgggtcaaatgagagtttggggtatcttgtgtctgagggcccttctggagtagtgtcaagggactaaaaggatgtaaccattgctctctcctttcacttcctttggttggggggaacccaggtgggacttggctcttctgccatgggcaagcagaatagcaagctgcggccagagatgctgcaggacctgcgagagaacaccgagttctctgagctggagcttcaggagtggtacaagggcttcctgaaggactgcccgactggcatcctcaacgtggatgagttcaagaagatctacgccaacttcttcccctacggcgatgcctccaagttcgccgagcatgtcttccgcacttttgacaccaacagcgacggcaccatcgacttccgggagttcatcatcgctctgagcgtgacctcgcgtggccgcctggagcagaagctcatgtgggccttcagcatgtacgacctggacggcaatggctacatcagccgggaggagatgctagaaattgtgcaggccatttacaagatggtttcgtccgtgatgaagatgcctgaggatgagtctaccccggaaaagaggactgagaaaatcttccgccaaatggacacaaacaatgacggcaagctgtcactggaggagttcatccgcggggccaaaagcgacccatcgatcgtgcgcctgctgcaatgcgatcccagcagcgcttcccagttctgagctgagaggagccagctcgcctccctgccttcaccggccctccggctctcagcttcctctccctcgtgtctatccaggctggggaatccccttctgggtctgcactgtgggggggcctctggagaagcgaaccctgcaaggaaggggctaagcaaggcagccgttagtccccacggcctaagaggcagaatctcccttagtggaccgagattacccccgggtcaggttctgtatctttccccagacagctgatcaccttccacgccacccacaacccgaggctcttccacaacacgggaagaggggctaggtccttcttgggtggtcctcagcctggagggaggtggggatttgtgccaaggtgaagagtctttttgtttgttttggtggggaagaccggaggattactgggctgtgggactttgaagaagttccctgatctacttccctgcagaagaacacttcctgtcccagctcttgctgctggaggcatggtaaaaagaagatctcccaggattccaactgggggtccccaaacccagcctgcctctttgcacttggataacacagatttacccgtctgtcctctgtatttctctctccttccccacctcacacacgcacggggccgcgcgacatgcgcgcgcaacacacacacacacacacacgcacgatatgcacgcacacatgcacagcacccgcgcacacagaggccggcagacagatgagcagagcccctccacagcgttctgtgtgggaaagaagtgcagcccctgccaagccccatgtccctctgcatgcgccg

SEQ ID NO: 2733 - DNA, 1196 bp, Rattus norvegicus
  Genbank Accession No. D12770
ggtgcggtgcctggccgggcgtaggcaagagcaaaagagcggctccttgcagactgtgcgcgcccgcgtttcagcatgggggatcaggctttgagcttccttaaggacttcctggcaggtggcatcgccgccgccgtctccaagaccgcggtcgccccgatcgagagggtcaaactgctgctgcaggtccagcatgccagcaaacagatcagtgcagagaaacagtacaaaggcatcattgattgtgtcgtgagaatccccaaggagcagggctttctctccttctggaggggtaacctggccaacgtgatccggtacttccccacccaagctctcaacttcgccttcaaggacaagtacaagcagatcttcctgggaggtgtggatcgtcataagcagttctggcgctacttcgctggtaacctggcctctggtggggcagctggggctacctccctctgcttcgtctacccactggactttgctaggaccaggctggctgccgacgtgggcaagggatcttcccagcgtgagttcaatgggctgggtgactgtctcaccaagatcttcaagtctgatggcctgaagggtctctaccagggtttcagtgtctctgtgcagggcatcatcatctacagagctgcctacttcggagtctatgacactgccaaggggatgctgccagaccccaagaatgtgcacattattgtgagctggatgattgcccagagtgtgacagccgtggcggggctggtgtcctatccatttgacactgtccgtcgtaggatgatgatgcagtctggccggaaaggggctgatattatgtacacggggacagttgactgctggaggaagattgcaaaagatgaaggacgcaaagctttcttcaaaggtgcttggtccaacgtactgagaggcatggggggtgcttttgtattggtattgtatgatgagatcaaaaaatatgtgtaatgctcaagttcacaggttcacagatccattgtgtggtttaacagactattcttaaggaaataaaaaaagacagatcatggataaaaccagaccataaggaatacctcagaaaaatgcttcattgagtattcatttaaccacaaaagtattttgtatttattttacatttagattcccacagcaaacagaagatagcttatcatacttgttcaattaattaactg

SEQ ID NO: 2734 - DNA, 581 bp, Rattus norvegicus
  Genbank Accession No. D13120
ttctgctggagacaggctccgccgggggtcggtgaagtatccaagatggctgggcgcaaacttgctctaaaaaccatcgattgggtatcttttgtggagatcatgccccaaaaccagaaggcaattggaaacgctctgaagtcctggaatgagaccttccacaccaggttggctagtctgtctgagaaaccaccagcgattgactgggcttactacagggccaatgtggacaagcctggcttggtggatgattttaaaaacaagtataatgctctgaagatccctgtgcctgaggataaatacacagccctagtggacgccgaggagaaggaggatgtgaagaactgtgcccagttcgtgactggatctcaggctagggtccgggaatatgagaagcagctggagaaaataaagaacatgattccctttgaccagatgacgattgatgacttgaatgaggtcttccctgaaaccaagctggacaagaggaagtacccatactggccccatcagcccatcgagaacctgtgaagcagcccaggagggagccctggctgacttgaataaacatttacatagtc

SEQ ID NO: 2735 - DNA, 481 bp, Rattus norvegicus
  Genbank Accession No. D13122
caaccacgcccgcaacggagctgagcaacgccgaagataatggcaggctcggcgttggcggttcgggctcggctcggtgtctggggtatgagggtcctgcaaacccgaggcttcggctcggactcgtcggagagcatggattcgggcgctggctccatccgagaagctggtggggccttcgggaaacgagagaaggctgaagaggatcggtacttccgagagaagactagagagcagctggctgccttgaagaagcaccatgaagatgagattgaccaccattcgaaggagatagagcgtctgcaaaaacagatcgaacggcataagaagaagattaaatacctaaagaatagtgagcattgagtgcacacagtcagtctctcacagagtggccagtatcattccccacttctatagagattgttttgaatgattgatgtttgacctgtgtgctactaacagataataaattatcaccagg

SEQ ID NO: 2736 - DNA, 593 bp, Rattus norvegicus
  Genbank Accession No. D13124
gcccctcacccctgaaaaatgtatgcctgctccaagttcgtctctacccgctccctgatcaggagcacctctcagctgctgagccgtccgctctctgcagtggagttgaagcgaccacagatgcccacagatgagggcctcagttgcttggcagtccggcggcctctgacctcgcttatccctagccgcagcttccaaaccagcgccatttcaagggacattgacacagctgccaagttcattggagctggggctgctacagttggggtggccggttctggagcaggaattgggactgtttttgggagtctcatcattggctatgccaggaacccctctctgaagcagcaactcttctcctatgcgattctggggtttgccctctctgaggccatggggctcttttgcctaatggtggccttcctcatcctcttcgccatgtgaagcagctgtctccacgtccacctcccatggttcttccgtgtctcgtctgcccagtgtgttccttttcctgtgcctccccaacaagtctggggaaagtacttggctcagggtttgacagagagaagacaaataaatactgtattaataag

SEQ ID NO: 2737 - DNA, 707 bp, Rattus norvegicus
  Genbank Accession No. D13127
aaagatggccgcaccagcaacatccgtgctgtcccgacaggtgcggagtttcagcacatctgtggtcaggcccttttcgaagcttgtaaggccccctgtccaggtctacggcatcgaaggccgctatgcaaccgccctgtactctgctgcgtctaagcagaaaaggctggaccaggtggaaaaggagttgctgcgagtggggcaactcttgaaggaccccaaggtgtcccttgctgttctgaacccctacattaagcgctccatcaaagtgaaaagcctgaaggacatcactacaaaggaaaaattctctccgctgacggccaacctcatgaatttacttgctgaaaatggtcgcctaggcaacacccagggcgtcatctctgccttctccaccatcatgagtgtccaccgtggagaagtgccgtgcacagtgaccacagcgtttcctttagatgaagctgttctctctgagttaaagacagtgctgaatagcttcctgagtaaaggccagatactgaacctggaggtcaagactgacccatcaatcatgggtgggatgattgtccgaattggagagaaatacgttgatatgtctgcaaagagcaagattcagaagctcagcaaggccatgcgggatctgctctgagagactgtcacctgtgtgagcgcttgtctttggagcacaataaaatgcttcctgaacagag

SEQ ID NO: 2738 - DNA, 2136 bp, Rattus norvegicus
  Genbank Accession No. D13341
gaattccgcggaattccgcccggctgcaagatgcccaagaagaagccgacgcccatccagctgaacccggcccccgatggctccgcggttaacgggaccagctcggccgagaccaacctggaggccttgcagaagaagctggaggagctggagctggacgagcagcagcggaagcgccttgaggcctttctgacgcagaagcagaaggtgggagagttgaaggatgatgactttgagaagatcagtgaactgggggctggcaatggtggagtggtgttcaaggtctcccacaagccatctggcctggttatggctaggaagctaattcacctggagatcaaacccgcaatccggaaccagatcatccgggagctgcaggtgctgcatgagtgcaactccccgtacatagtgggcttctacggggccttctacagtgacggcgagatcagcatctgcatggagcacatggatggtgggtccttggatcaagtgctgaagaaagctggaagaattcctgagcaaattttaggaaaagtcagcatcgctgtgataaaaggcctgacatatctacgagagaagcacaagattatgcacagagatgtcaagccttccaacattctagtgaactcacgtggggagatcaaactctgcgattttggggtcagcgggcagctaattgactccatggccaactccttcgtgggaacaaggtcctacatgtcgcctgagagactccaggggactcactactctgtgcagtcggacatctggagcatggggctctctctggtggagatggcagttggaagataccccattcctcctcctgatgccaaggagctggagctgctgtttggatgccaggtggaaggagacgcggccgaaacgccacccaggccaaggacccctgggaggcccctcagctcatatggaatggatagccgacctcccatggcaatttttgagttgttggattacatcgtcaatgagcctcctccaaaactgcccagtggagtattcagtctggaatttcaggattttgtgaataagtgcttaataaagaaccctgcagagagagcagatctgaagcagctcatggtacatgctttcatcaagagatctgatgccgaggaggtagacttcgcaggctggctctgctccaccattgggcttaaccagcccagcacaccaacccacgctgccagcatctgagcctttgggaagcagcagagaggaatcctctgcccagtggcatgccatgttgctttcaggcctctcccatgcttgtctatgttcagatgtgcatctcatctgtgacaaaggatgaagaacacagcatgtgccaaatcgtacttgtgtcatttttaatattgtctttatcgctatggttactcccctaagtggattggctttgtgcttggggctatttgtctgttcatcaaatacatgccaggttgaactacagtgaaaccctggtgacctgggtggtcttcttactgatgtttgcgctgctgttcatcgtgactcactagctggctgcctgtattgtcaggattctcggacccttggtacttcactcttgctggtgacctctcagtctgaggagagggggccttctgagacccttcacaggcagtgcatgcatgaaaagcatgctttgctgctactgaaatgagcaccagaacgtgtacatcatggtattttatttttgcttttggtatagaactcagcagttcccatttaaaaaaaaaatctaaccagagcccatcactgccatgatagctggggcttcagtctgtctactgtggtgattttagacttctggttgtatttctatatttatttttaaatatactgtgtgggatacttagtggtatatgtctctgagtttggattagtgtttctaaattggtagttattttgaatgtcacaaatggattaaggaatcaacgtatcaagagttctatctttcttccagtctaagtaccaatgctattgtaaacgtgtatagtgcctacaaattgtatgaaaacccttttaaccactttactcaagatgtttatcaaatctaatctcttattctaataaaaatactatcaagttaaagtaaaaaaaaaaaaaaaaaaaacggaattc

SEQ ID NO: 2739 - DNA, 1453 bp, Rattus norvegicus
  Genbank Accession No. D13417
gacggtatcgatcgaaccccttcgataacagcggaatcccccgtctacctctctccttggtcctggaatagcgctaccgatcacaaagtagccctaagacataataaaccctcaactgctccgtagtttttcttatgaaagccaagtaaaggggacgtaagcaaaaaaatatttttttttgcgtgaaggattccaaaaataaaattctctggggattgagaagaaagaaaaaaaggaaaatgccagctgatataatggagaaaaattcctcgtccccggtggctgctaccccagccagtgtcaacacgacaccggacaaaccaaagacagcctctgagcacagaaagtcatcaaagcctatcatggagaagaggcgccgggcaagaataaatgaaagtttgagccaactgaaaacactgattttggatgcacttaagaaagatagctcccggcattccaagctggagaaggcagacattctggaaatgacagtgaagcacctccggaacctgcagcgggcgcagatgaccgccgctctcagcacagacccgagcgtgttggggaagtaccgcgccggcttcagcgagtgcatgaacgaggtgacccgcttcctgtccacgtgtgagggcgttaacaccgaggtgcgcactcggctgctgggccacctggccaactgcatgacccagatcaacgccatgacctaccccgggcaggcgcaccccgccttgcaggcgccgccgccgccgcccccgtcaggacctggcggtccccagcacgcgccattcgcgccgccgccgccgcttgtgcccatccccgggggcgcggcgccccctcccggcagcgcaccctgcaagttgggcagccaggctggagaggctgccaaggtttttggcggcttccaagtggtgccggctcctgacggccaatttgctttcctcatccccaatggggccttcgcccacagcggcccggtcatcccggtctacaccagcaacagcgggacctcggtgggtcctaacgcagtgtcgccttccagcggctcctcgctcactgcggactccatgtggaggccgtggcggaactgaggggctcaggccactgctaatcataaactccctagcccacctctctcttctgacggacactaaatacgaacttggactttaggagagacttttataagtcggtggttactttgttgcttttttaaattctaaaaagttactttttgtagagagctgtattaagtgactgaccatgcactgcatttgtatatattttatatgttcatattggattgcgcctttgtattataaaagttgagatgacatttcgttttttacacgagatttctttttttatgtgatgccaaagatgtttgaaaaatgctcttaaaatatcttcctttggggaagtttatttgagaaaatataataaaagagtgaaggctttt

SEQ ID NO: 2740 - DNA, 1570 bp, Rattus norvegicus
  Genbank Accession No. D13907
gcggcggctgtatcccggacgttgttgccggtggccggacggcgcctgtggggatttacgcgaaggcttccgctccgcgccgccgctgctcagccattgtactttggaggggaccgactcagaagtacacaggctgctccacaagttgttctgaatgttcctgagacacaagtcacttgtttggaaaatggactcagggtagcttctgaaaactctgggatctcaacatgcaccgttgggctgtggatcgatgctggcagtcggtatgagaatgaaaagaacaatggcaccgctcactttctggagcacatggctttcaagggcactaaaaagaggtcccagttagaccttgaacttgagattgagaacatgggtgcccatctcaatgcctatacctccagagagcagactgtctactacgccaaagccttctccaaagatttgccaagagctgtagaaattcttgctgacataattcagaacagtacattgagagaggcagagattgaacgtgagcgtggagtcatcctcagagaaatgcaggaagttgagaccaacttgcaagaagttgtctttgattatctgcacgccacagcctatcaaaacaccgcgctcggacggacaattctgggaccaaccgagaacatcaaatctataagccgtaaggacttagtggactacataaccacacattataagggaccaagaatcgtgctggctgctgctggaggtgtttgccataacgaactgctggagttagcgaagtttcattttggtgactctttgtgcgcacacaaaggagatgtaccagctctgcctccctgtaaattcactggaagcgagattcgggtgagggatgacaagatgccactggcgcacctcgcagtggctattgaagcagttggttggacgcacccagacacgatctgtctcatggtcgcaaacacactgataggcaactgggaccgctctttcggaggaggaatgaatttatcgagcaagctggcccagctcacgtgccatggcaatctctgccacagcttccagtccttcaacacctcctacacagacacaggattgtgggggctctatatggtttgtgaacaagccacagttgctgacatgctgcacgctgtacaaaaggaatggatgcgtctgtgcacagctgttagtgagagtgaggtcgcacgcgccaaaaaccttctcaagacaaacatgctgctgcagcttgatgggtcaactccgatctgtgaagacatcggtaggcagatgctatgctacaacaggagaatccccatccctgagcttgaggccaggatcgatgctgtggacgcggagatggttcgagaagtgtgcaccaagtacatttatggcaaaagcccggccattgctgctctcggtcctattgagcgcttaccagattttaaccagatttgtagtaacatgcgctggactcgtgactgatttttgtgatgaattatcctacacatacatatttataaaactgagacctagaagttttgaaagactgctcatcttcaagtgaaaaaataaaaactttatttgaaac

SEQ ID NO: 2741 - DNA, 2023 bp, Rattus norvegicus
  Genbank Accession No. D13912
attcggatgcagagcatcagaggcccagctagagggacaacacagaggagtaatttgctgacagacctgcagggatggacctgctttcagctctcacactggaaacctgggtcctcctggcagtcgtcctggtgctcctctacggatttgggacccgcacacatggacttttcaagaaacaggggattcctgggcccaaacctctgcctttttttggcactgtgctgaattactatatgggtttatggaaattcgatgtggagtgccataaaaagtatggaaaaatatgggggttgtttgatggtcaaatgcctctgtttgccatcacggacacagaaatgatcaagaatgtgctagtgaaggaatgcttttctgtcttcacaaaccggcgggattttggcccagtggggattatggggaaagccatctctgtatctaaggatgaggagtggaagagatatagagccttgctgtcccccacgttcaccagtggaagactcaaggagatgttccctgtcatcgaacagtatggagacattttggtaaaatacttgaggcaagagaaaggcaaacctgtccctgtgaaagaagtgtttggtgcctacagcatggatgtgatcaccagcacatcatttggagtgaatgttgattccctcaacaacccgaaggatccttttgtggagaaagccaagaagctcttaagaattgatttttttgatccgttgttcttgtcagtagtactctttccattcctcacgccagtatatgagatgttaaacatctgcatgttcccaaaagattcaatagaatttttcaaaaaatttgtgtacagaatgaaggaaacccgcctggattctgtgcagaagcatcgagtggattttcttcagctgatgatgaatgctcataatgattctaaagacaaagaatctcatacagccctatccgatatggagatcacagcccagtcaatcatttttatttttgctggatatgaacccaccagcagcacactttcctttgtcctgcattccctggccactcacccagatacacagaagaaactgcaggaggagatcgacagggctctgcccaataaggcacctcccacctatgatactgtgatggaaatggaatacctggatatggtgttgaatgaaaccctcagattgtatccaattggtaatagacttgagagagtctgtaaaaaagatgttgaaatcaatggtgtgtttatgcccaaagggtcagtggtcatgattccatcttatgctcttcaccgtgatccacagcactggccagagcctgaggaatttcgcccagaaaggttcagcaaggagaacaagggcagcattgatccttatgtatatctgccctttggaaatggacccaggaactgcattggcatgaggtttgctctcatgaatatgaaactcgctctcactaaagttctgcaaaacttctccttccagccttgtaaggaaacacagatacctctgaaattaagcagacaaggacttcttcaaccaacaaaacccattattctaaaggttgtgccacgggatgaaatcataactggatcatgattttccctcaaggagttctgctgaattcttcagaaatgtggtgtctaagaacaccagaccctttaatttatgtcatgaataaaattcagatgaaattagggcttaatcgactttgttttgattcggtacatctttgctctttctcagtgtctacaatgtacccatctaatataaaggaaatgacaagtcagtgacagaacaggaacttaacctttggtgattctcatgggactacctccatccacatctggttgtctctgttaatttcttttgatagtaaccttgtctctgtaatttgatcaagaatttttcatgaaaatgtgaactattgtgacaactttaattgtagatttggtatcagatgttttagatgcattattctacactaaatgttacatggaaaaaatgtgaataaacacttctttaaaaatccccatttt

SEQ ID NO: 2742 - DNA, 1464 bp, Rattus norvegicus
  Genbank Accession No. D13921
gacaagcttttccggtctccatggctgccctggcggttctacacggcgtcgtccgcaggcctctgctccgcgggctgctgcaggaagtaagatgcctgggacgaagttatgcatccaaacccactttgaatgatgtggttatagtgagtgctacacgaactcccattggatccttcctgggcagccttgcctctcagccagccaccaagcttggtactattgcaattcagggagccattgaaaaggcagggattccaaaagaagaagtgaaggaggtctacatgggcaacgtcatccaagggggagaaggacaggccccgaccaggcaagctacactgggtgcaggtctacccattgccactccgtgcaccacagtaaacaaggtgtgtgcctcaggaatgaaagccatcatgatggcctctcaaagtcttatgtgtggacaccaggatgtgatggtggcaggcggaatggagagcatgtcaaatgtcccgtacgtaatgagcagaggagcaacaccatacggtggggtaaaacttgaagacctgattgtgaaagacgggctaaccgatgtctacaataaaattcatatgggcaattgtgctgagaacaccgcgaagaagctgagtatctcgcgggaggagcaggataagtacgccatcggctcttacacccgaagtaaagaggcgtgggatgcagggaagtttgcaaatgagattacgcccatcaccatctcagtgaaaggtaaaccagacgtggtggtgaaggaagatgaagagtacaagcgagttgacttcagtaaagtgccaaagctcaagacagtgttccagaaagaaaacggcacagtaacagctgctaacgccagcacactgaacgacggagcagctgctgtggttctcatgactgcagaggcagcccagcggctcaaggttaagccactggcacgaatcgcagcatttgctgatgctgctgtagaccccattgatttcccactcgcacctgcatatgctgtacctaaggttcttaaatatgcaggactgaaaaaagaagacattgccatgtgggaagtaaatgaagcattcagtgtggttgtactagccaacattaaaatgctggagattgaccctcaaaaagtaaatgtccatggaggagctgtttctctgggccatccaatcgggatgtctggagctcggattgttgttcacttggctcatgccttgaagcaaggagaattcggtctggctagtatttgcaatggaggaggaggggcttccgccgtgctgattgagaagctgtagacatcttgttttaggagacagttccacgtgacccgctgaagtgaactaccccttgggccagattatattcaggataagctatttcattttttattattttctactaaaaatttttaaaaatcacatccaaaaacccattgaaattgcaaataaaaatttctcctccttt

SEQ ID NO: 2743 - DNA, 1410 bp, Rattus norvegicus
  Genbank Accession No. D13966
atggcagtgcctgctctgtggccctggggagtatacttgcttatgagcctgctgtccttgggatcttgcctggacacactggaggtgtgccccagtcttgacatccgctcggaggtgacagagctccgtcggctggagaactgcagtgtggtggagggtcacctacagatcctcctcatgtttgccgccacgggagaggacttccgaggcctcagctttcctcgcctcacccaggtgactgactacctgctgctgttccgagtctatggcctagagagccttcgagacctcttccccaaccttgctgtgatccgaggtgcgcgcctcttcctgggctatgcacttataatcttcgagatgccccacttgagggacattgggctgccgtcacttggggccgtgctgcgtggggccgttcgtgtggagaagaaccaggaactttgccatctctccaccattgactggggcctgctgcagcctgcacctggtgccaaccacattgttgggaacaagctgggtgaggagtgtgctgacgtgtgccctggtgtgctgggggctgctggtgagccctgtgtgagaaccaccttcggtgggcacaccgactacaggtgttggacctccagccactgtcagagagtgtgtccctgcccccgtgggctggcctgcacagtaggtggcgagtgctgccacagtgaatgtctcgggggctgcagtcagcctgaagaccctcgagcctgcgtagcttgccgccacctctacttccaaggagtctgcctccccgcctgccctccgggcacctaccagtatgagtcttggcggtgtgtcactgcggagctctgtggccatctgcgagaggttcctggacatgccaccgcctttggcatctacgagggcagctgcctagctcagtgccctccaggcttcacccgtaatggcagcagcattttctgccataagtgtgagggcctgtgccccaaagagtgcaaggttgggacaaagaccatcgactctgtccaagccacacaggacctagtgggctgcacccatgtggaggggagcctcatcctcaaccttcgacaaggctgtcagtattcttcctggtcacgcccttggccacgccctccgtggtcacaccctccctcccttgcatggttccccctcatccctccgttcctacctcctcgtttgtccctccagctcccttccctgtggacccatcaccttccctgggctgctccactcctatctttctcatccccagacaatctggagccagagcttcaacgcaacctggggctggtggagaccatcaccggcttcctcaaaatcaagcactcttttgcactcgtgaccctgggatttttcaagaacctcaaactaatccggggagattccatggtggatgggtaa

SEQ ID NO: 2744 - DNA, 128 bp, Rattus norvegicus
  Genbank Accession No. D14564
cctcttgtaccaggtccttgacaacctagacagccacctgaagaggtctgagtacttccgcttcctctggtttcctcacactgagaacgtcagcatcatctaccaagaccacaccaacaaggtaactg

SEQ ID NO: 2745 - DNA, 1062 bp, Rattus norvegicus
  Genbank Accession No. D14688
cctccgctggaagcagtcgccggtctggtcctcttgtgcgtgcagttcaggtcagatttgaaccgccaccatgtcgagcaaaaaagcaaagaccaagaccaccaaaaagcgccctcagcgcgcaacgtccaacgtgttcgccatgtttgaccagtcccagatccaggagttcaaagaggccttcaacatgatcgaccagaaccgggacggcttcattgacaaggaggacctacacgacatgctcgcgtctctggggaagaaccccaccgacgcctacctggacgccatgatgaacgaggccccgggccccatcaatttcaccatgttcctcaccatgtttggagagaagctgaacggcaccgacccagaggacgtcatcagaacacgcttcgcttgcttcgatgaggacacgacaggcaccatccaggaggattacctgagggagctgctgaccaccatgggtgaccgcttcacagatgaggaagtggatgagctgtacagggaggcccccatcgacaaaaagggcaatttcaactacatcgagttcacgcgcatcctcaagcacggagcgaaagacaaagatgactgaagagctgcagctgacattcctgttgagtttccttattcacttcatgtctcagacacgcaccccataggacctactgtgtgccactttgtccctcagacaccccctcccatagggcctactgtgtgccgcttagtccctcagacaccccctcccatagggcctactgtgtgccacttagtccctcagacaccccctcccatagggcctactgtgtgccactctgtccctcagacaccccctcccataggacctactgtgtaccacttggtttctcagacagccccacccccaaaccccctaaggacctactgcgggccacttagtttcacagcctttcctcttttttaatgtatttattccagaccctttctgccacttagcatgtgtataatcagactggaatggggacaatgttgtaaattgtactgaaaatgagatgcaaataaaaaaatcaaccaatgtgaaagcccagg

SEQ ID NO: 2746 - DNA, 1000 bp, Rattus norvegicus
  Genbank Accession No. D14987
ctggaatcctaacagcatctacacaaagctatttataatgccagactatacttggtttgaaggaataccttttcatgcctttgggatttcaaaagaaactttgcaaaatgtttgtaataagtttgtggtgaaagaagaagatttgattttattggcttatcccaagtcaggaacgaactggctgattgaaattgtctgcttgattcagaccaagggagatcccaagtggatccaatctgtgactatctgggatcgctcaccctggatagagactgatgtaggatatgatatattaatcaaaaagaaaggaccacgactcatgacctcccatcttcccatgcatcttttctccaagtctctcttcagttccaaggccaaggtgatctatctcatcagaaatcccagagatgttcttgtttctggttattatttctggggtaattcaactcttgtgaagaagccagactcactgggaacttatgttgaatggttcctcaaaggaaatgttctatatggatcatggtttgagcacatccgtgcctggctgtccatgcgagaatgggacaacttcttgttactgtactatgaagacatgaaaaaggatacaatgggaaccataaagaagatatgtgacttcctggggaaaaaattagagccagatgagctggatttggtcctcaagtatagttccttccaagtcatgaaagaaaatgacatgtccaattatagcctcctgatgaaaaaatcaatttttactggaattggcctcatgaggaaaggcactattggggactggaagaatcacttcactgtatcccaagctgaagcctttgataaagtgtttcaggagaaaatggccggtttccctccagggatgttcccatgggaataaaatttcaaaagttttaaatattttatgaacattgatatttatgtttctgttgttctatgtctgaataactgaatgtggtcatcgaataaatcctgttctggtattgtg

SEQ ID NO: 2747 - DNA, 1376 bp, Rattus norvegicus
  Genbank Accession No. D15069
tccagcctttaccgctcctggtttctcggcttctcatcgcagtcagtcttggactttgcgggttttgccgctgtcagaaggacgtctcggactttctgcttcaagtgcttgacaactcaccctttcagcagggtatcggagcatcgctacagaatgaagctggtttccatcgccctgatgttattgggttcgctcgccgttctcggcgcggacaccgcacggctcgacacttcctcgcagttccgaaagaagtggaataagtgggcgctaagtcgtgggaagagggaactacaagcgtccagcagctaccctacggggctcgttgatgagaagacagtcccgacccagactcttgggctccaggacaagcagagcacgtctagcaccccacaagccagcactcagagcacagcccacattcgagtcaaacgctaccgccagagcatgaaccaggggtcccgcagcactggatgccgctttgggacctgcacaatgcagaaactggctcaccagatctaccagtttacagacaaagacaaggacggcatggcccccagaaacaagatcagccctcaaggctatggccgccggcgccggcgttccctgccagaggtcctccgagcccggactgtggagtcctcccaggagcagacacactcagctccagcctccccggcgcaccaagacatctccagagtctctaggttataggtgcgggtggcagcattgaacagtcgggcgagtatcccattggcgcctgcggaatcagagagcttcgcaccctgagcggactgagacaatcttgcagagatctgcctggctgcccctaggggaggcagaggaacccaagatcaagccaggctcacgtcagaaaccgagaattacaggctgatactctctccgggcaggggtctgagccactgccttgcccgctcataaactggttttctcacggggcatacggctcattacttacttgaactttccaaaacctagcgaggaaaagtgcaatgcttgttatacagccaaaggtaactatcatatttaagtttgttgatgtcaagaggtttttttttttgtaacttcaaatatatagaaatatttttgtacgttatatattgtattaagggcattttaaagcgattatattgtcaccttcccctattttaagaagtgaatgtctcagcaaggtgtaaggttgtttggttccgtgtgtgtgtgtgtgtgtgtgtgtgtgtgtgtgtgtgtgtgtgtgtaaggtggagagcgcctgattaccgcctgtggatgaagaaaaaacattgtgtcttctataatctatttacataaaatatgtgatctgggaaaaagcaaaccaataaactgtctcaatgctg

SEQ ID NO: 2748 - DNA, 2546 bp, Rattus norvegicus
  Genbank Accession No. D16302
ctccagggaagcaacagagagaagaaaagaaaggtacatggctacttcccactctcagcctagaagaataaacccttagattgcgggggaactgagccaggcaagccacaggcagccttgagcgcccccttgcctgccctcccctgcgggggccaggatgctgaagaagcagtctgcagggcttgtgctttggggtgctatcatctttgtgggctggaatgccctgctgctcctcttcttctggacacgcccagcacctggcaggctgccctcagacagtgcccttggtgatgaccctgccagcctcacccgtgaggtcatccacctggccgaggacgccgaggcggagttggagcggcagcggggactactgcagcagatcaaggagcattattctctgtggaggcagaggtggagagttcccaccgtggcccctccagcctggccccgtgtgcctgggaccccctcaccagctgtgatccccattctggtcattgcctgtgaccgcagcactgtccggcgctgcctggataagttgttgcactatcggccctctgctgagcatttccccattattgtcagtcaagactgtgggcatgaagagacagcacaggtcattgcttcttatggcaccgctgtcacacacatccggcagccagacctgagtaacattgccgtgcagccagaccaccgtaagttccagggttactacaagattgccaggcactaccgctgggcgctaggccagatcttcaacaagttcaagttcccggctgctgtggtagtggaggatgatctggaagtggcgccggacttcttcgagtacttccaggccacctacccgctgctgaaagcagacccctccctttggtgtgtgtcggcttggaatgataatggtaaggagcagatggtggactccagcaaacctgagctgctctatcgaacagacttttttcctggccttggatggctgctgttggctgatctctgggcagaactagagcccaagtggcccaaggccttctgggacgactggatgcgcagacctgagcagcggaaggggcgggcttgtattcgtccagaaatttcaagaactatgacatttggtcgcaagggtgtgagccatgggcagttctttgaccagcatcttaaattcatcaagctgaaccagcagttcgtgcccttcacccagttggacctgtcgtacctgcagcgggaggcctatgaccgggacttccttgcccaggtctatggtgccccccagctgcaggtggagaaagtgaggaccaatgatcggaaggaactgggggaggtgcgggtacagtacactagcagagacagctttaaggcctttgctaaggccctgggtgtcatggacgacctcaagtctggtgtccccagagctggctaccgtggcattgtcactttccagttccggggtcggcgtgtccacctggcacccccagagacatggaatggctatgatcctagctggaattagtggcacctgcctttccctcctgggtctccttgccgtatgatgagccgaggcagcctgcaggccctgggctataccattctgccagtgtttcctcttggatctatagatcttccctttttgtcctggccttcccccaagtggcattctagtgcacaaatcataagatgagggttatactcctcttgtcaagggagtactgtgtggtatgttcggggcatattgaacaagaaaccactgtgtggtgtggggagggttggacctgttggaccaggcttgtagtgtcctgagttctctccaagggcatctgcggagagcttggccactccagctctcctgaccaggcctctccaccctgatctggctcctgttagtacatgagcccactttatgtaccttccccactttctccaccttccccagggtggggccggattatggaagaaggaatagatttgtggccaactgagactaaccaaagggattcactgtcagagttagattgcatggccgggttgccggggtcactgcctcctggcttctcttcctgccgactttgccagtgctcttcttgtcctgcagtggagcagtgtgttgtgagatggaaagtaggagctaaagcaagacctctcccgtggtggagcagttgtcaggaacaatgacaggcggaaagcctacacttgggcacccctcttcttgcccatggccccccacttctgaaagttagttccctttgcattctttagggggattcagtggcagcctagtgggggacagtgggctccacgcctctttcccctggggttggtacagcctcctcccacagggcttgttcctggtggccatctcagcaaagtcaccagcagctgagaccaggacacctgtggcccttcctaagcattcccacatcttcccaggccgaggggcaggtggcaggctagagagaaagaaatttgtgtgttttgtttgttgcctgatcttagtttcatggaagaaaatggaatctacagaattattttcaaaaataaagtaaaggctgaattgtctg

SEQ ID NO: 2749 - DNA, 2775 bp, Rattus norvegicus
  Genbank Accession No. D16478
ctcttctgctcaagatggttgcgtcccgggcaattggcagtctcagtcgcttctctgccttcaggatcctgcgctccagaggctgcatttgcacagctttacaacttcttcctgctttgctgtctagaacccatattaattatggagtcaaaggggatgtggcagttattcggattaactcgcccaattcaaaggtaaatacattgaataaagaagtacaatcagagttcgtagaagtaatgaacgaaatctgggccaacgaccaaatcaggagcgccgtccttatttcgtcaaagcctggctgctttgttgcaggtgctgacatcaacatgctggcctcttgtacaacgccccaagaagcagcacgaatatcacaagaaggacagaaaatgtttgagaaacttgaaaagtcaccaaagcctgttgttgccgccatcagtggatcctgcttgggaggcggacttgagcttgccatagcatgtcaatacagaatagcaacaaaagacagaaaaacagtattaggtgtccctgaagtgttgctgggaatcttaccaggagccggaggtacccagaggctgcccaaaatggtgggtgtgcctgctgcttttgacatgatgctgactggtaggaacattcgtgcagacagagcaaagaaaatgggactggttgaccagttggtggacccgctaggaccaggaataaaatctccagaggaaaggacaattgaatacctagaagaagttgcagttaattttgccaaaggcctggctgacaggaaggtctctgcaaagcagagcaaaggcctgatggaaaagctgacatcgtatgccatgactatcccactttgtctgactacaacattcaaaacagtggaagaaaaagtgaagaagcagaccaaaggcctttaccctgcacctttgaagataattgacgctgtgaagactggacttgagcaaggaaatgatgctggctatcttgccgaatcagagaaatttggagagcttgcattgaccaaagaatcaaaagccctgatggggctttataatggccaggtcctgtgcaagaaaaataaatttggagcgccacagaagactgttcagcagctagccatccttggcgcagggctgatgggggctggcattgcccaggtctctgtggacaagggactgaaaactcttcttaaagacactacagtgacagggctgggccggggacagcaacaagtgttcaaaggactgaatgacaaggtaaagaagaaggcactcacatccttcgaaagggactccatcttcagcaacctgatcgggcagctcgactacaagggcttcgagaaggctgacatggtgattgaggctgtcttcgaggacctcgctgttaagcacaaagtgttaaaggaagtggaaagcgtgactccagaacactgtatcttcgccagcaacacatctgctctcccaatcaatcaaattgctgctgtgagccaaaggcctgagaaggtgatcggcatgcactacttctctcctgtggacaagatgcagcttctagagatcatcacaactgacaaaacctccaaggacaccacagcgtctgccgtggccgtgggtctcaagcaggggaaggtcatcattgtggtcaaggacggacctggcttctacaccaccaggtgtcttgctcccatgatgtcagaagtcataagaatcctccaggaaggagttgaccctaagaagctggacgccttgaccacaggcttcggcttccctgtgggtgctgccaccctggcagatgaagtagggatagatgtagcacagcacgtagcagaagatctaggcaaagccttcggggagcggtttggaggtggcagcgtagaactgctgaaactgatggtctccaagggcttcttgggtcgcaagtctgggaagggcttctacatctatcagtcgggctcaaagaataagaatttgaattctgaaatagataatatcttggtaaacctgaggctgcctgccaagcccgaggtctcctctgatgaagacatccagtaccgtgtgataacaaggtttgtgaatgaggcagtcctgtgcctacaggaagggatcctagccacgcctgaagagggagacatcggagcagtctttgggcttggctttcccccttgtctcggagggcccttccgctttgtggatctgtatggtgctcagaaggtagtggaccggctccggaagtatgagtctgcctatgggacacagtttaccccgtgtcagctactccgcgaccttgctaacaactctagcaagaagttctaccagtgagcaggccgtcccgccctgcccctccacccacgtactaacccagacccggcagtgctgcttctcagccgcgctgtctaaattatcaggaagcaggagaaagaccgaggctagccttggatttgctcctccatgatagtgccttcagccctgtcccgctcttcctcctggtgaagtctgactgtgaattaaatgtttgtacttcatgttggggggtgagccccactgtgcttcttttgcaagccctgcctgagaccccgatcagcagcctagagtaacccagaacacctgctgcctgtgccttccgggaggccagtggggcctggggtgccgagggcattttcgcaccaagccaaacacaggataacattaaaatccagactgtcggcctctgccagcctggtctgttttcctctgcctgcccttgtgtttgagcacccccatcagtaataaagccctgtgctctgagcat

SEQ ID NO: 2750 - DNA, 1928 bp, Rattus norvegicus
  Genbank Accession No. D16479
cagtccagactctaagatttcagaatgactaccatcttgacttccacttttagaaacctttctactacatcaaaatgggccctcagattttctgtaagacctctgagctgttcttcacaagtacagtctgccccagctgtccagaccaagtcaaagaagactttagcaaaacctaatctaaagaacattgtggtggtggaaggtgtccgaattccatttctgctgtcaggcacttcgtataaagacctaatgccacatgatttggctagagccgcactttcgggtttgttgtatcggaccaatattccaaaggatgttgttgattatatcatttttggtacagttattcaggaagtaaaaacaagcaatgtggctagagaggctgccctgggagctggcttctctgataagactccagctcacactgtcaccatggcttgtatctcttcaaaccaagccatgaccacagctgttggtctgatagcttctggccagtgtgatgtcgtcgtggctggtggtgttgagttaatgtctgacgtccctattcgtcattcaagaaatatgaggaaaatgatgcttgatctcaataaagccaagactctggcccagcgcctgtccttactcactaaattcagattgaattttctgtcccctgagctccctgcagtggctgagttctccactaacgagacaatgggccactctgccgaccgtctggctgctgcctttgctgtttctcgaatggaacaggataaatatgcactgcgttctcacagtctggccaagaaggcacaggatgaaggacatctttctgatattgtacccttcaaagtaccaggaaaagacacagttagcaaagataacgggatccgtccttcctcactggagcaaatggccaaactaaagcctgcattcatcaaaccctatggcacagtgacagcagcgaattcttctttcctgactgatggcgcttctgcgatgctaatcatgtcagaggacagagctctggccatgggttataagccaaaggcatatttgagggattttatatatgtgtctcaggatccaaaagatcagcttttacttggaccaacatatgctactccaaaagttctagaaaaggcaggattaaccatgaatgatattgacgcttttgaatttcatgaagccttctcaggtcagattttggctaactttaaagctatggattctgattggtttgcacaaaactacatgggtaggaaaaccaaggttggagcacctcctctggagaagtttaatatctggggcggatcactctctctgggacacccttttggagccactggctgtcggttggtcatggcagctgccaacagactgaggaaggatggaggccagtatgctttagtggctgcctgtgcagctggaggacagggtcatgctatgattgtggaagcctacccaaaatgactgctctggaaggaggcaactgatctctgcagcactcgcactgggcaatgccatttcaatgcactaccaagtgatacctgcagttcctagctcttcttaggaaacaacatttgtggccttctcttaaatattttgcggtcaagccttgccagtgttcgagctttccgataatcacagcttctgctctctaagttccagactatcacagatgtgtacacagttcttgttatctcttgtctctaagactaatgactgccagctgcttggagagaggttagctgaggtttagaaccatctttgtaacatttgcagaatctcctccttcctgtcagtgtcctacagagaattattttttctaaaatacaatccaatgtgcctacattaagttactatagaaaaaaataatctaaacatctcctaaaactgacttgcttagagacatgtttgttgaccttaataaagtagacatgtattag

SEQ ID NO: 2751 - DNA, 1115 bp, Rattus norvegicus
  Genbank Accession No. D16554
ctgtgagggtgtttcgacgcgctgggcggtttgttccttcatcgcattcgttaacaggtcaaaatgcaaatcttcgtgaagaccctgaccggcaagaccatcaccctagaggtggagcccagtgacaccatcgagaacgtgaaggccaagatccaggataaagagggcatcccccctgaccagcagaggctcatctttgccggcaagcagctggaagatggccgcaccctctctgactacaacatccagaaagagtcaaccctgcacctggtcctccgcctgaggggcggcatgcagatcttcgtgaagaccctgaccggcaagaccatcaccctggaggtggagcccagtgacaccatcgagaacgtgaaggccaagatccaggataaagagggcatcccccctgaccagcagaggctcatctttgccggcaagcagctggaagatggccgcaccctctctgattacaacatccagaaagagtcaaccctgcaccttgtcctccgcctgaggggcggcatgcagatcttcgtgaagaccctgaccggcaagaccatcaccctagaggtggagcccagtgacaccatcgagaacgtgaaggccaagatccaggataaagagggcatcccccctgaccagcagaggctcatctttgccggcaagcagctggaagatggccgcaccctctctgattacaacatccagaaggagtcaaccctgcacctggtcctccgcctgaggggcggcatgcagatcttcgtgaagaccctgaccggcaagaccatcaccctggaggtggagcccagtgacaccatcgagaacgtgaaggccaagatccaggataaagagggcatcccccctgaccagcagaggctcatctttgccggcaagcagctggaagatggccgcaccctctctgattacaacatccagaaagagtcaaccctgcacctggtcctccgcctgaggggtggctattaattcttcagtctgcattcccggcgggcactgatggcattactctgcactctagccatttgccccaatttaagtttagaaattacaagtttcagtaatagctgaacctctgttaaaaatgttaataaaggttttgt

SEQ ID NO: 2752 - DNA, 2545 bp, Rattus norvegicus
  Genbank Accession No. D17296
cttttgtgaggactgcagccaacaccgctgacaatgcagatctttgtgaaaaccttaactggtaagaccatcaccctggaggtcgagcccagtgacaccattgaaaatgtcaaggcaaagatccaggacaaggagggcatcccccctgaccagcagaggctgatctttgcaggcaagcagctggaagatggccgcaccctgtcagactacaacatccagaaggagtccaccctgcacctggtcctgcgcctcagagggggcatgcagatctttgtgaagaccctgacaggcaagaccatcaccctggaggtcgagcccagtgacaccattgaaaatgtcaaggcaaagatccaggacaaggagggcatcccccctgaccagcagaggctgatctttgcaggcaagcagctggaagatggccgcaccctgtcagactacaacatccagaaggagtccaccttgcacctggtccttcgcctcagagggggcatgcagatctttgtgaagaccctgacaggcaagaccatcaccctggaggtcgagcccagtgacaccattgaaaatgtcaaggcaaagatccaggacaaggagggcatcccccctgaccagcagaggctgatctttgcaggcaagcagctggaagatggccgcaccctgtcagactacaacatccagaaggagtccaccctgcacctggtccttcgcctcagagggggcatgcagatctttgtgaagaccctgacaggcaagaccatcaccctggaggtcgagcccagtgacaccattgaaaatgtcaaggcaaagatccaggacaaggagggcatcccccctgaccagcagaggctgatctttgcaggcaagcagctggaagatggccgcaccctgtcagactacaacatccagaaggagtccaccctgcacctggtcctgcgcctcagagggggcatgcagatctttgtgaagaccctgacaggcaagaccatcaccctggaggtcgagcccagtgacaccattgaaaatgtcaaggcaaagatccaggacaaggagggcatcccccctgaccagcagaggctgatctttgcaggcaagcagctggaagatggccgcaccctgtcagactacaacatccagaaggagtccaccctgcacctggtccttcgcctcagagggggcatgcagatctttgtgaagaccctgacaggcaagaccatcaccctggaggtcgagcccagtgacaccattgaaaatgtcaaggcaaagatccaggacaaggagggcatcccccctgaccagcagaggctgatctttgcaggcaagcagctggaagatggccgcaccctgtcagactacaacatccagaaggagtccaccctgcacctggtccttcgcctcagagggggcatgcagatctttgtgaagaccctgacaggcaagaccatcaccctggaggtcgagcccagtgacaccattgaaaatgtcaaggcaaagatccaggacaaggagggcatcccccctgaccagcagaggctgatctttgcaggcaagcagctggaagatggccgcaccctgtcagactacaacatccagaaggagtccaccctgcacctggtccttcgcctcagagggggcatgcagatctttgtgaagaccctgacaggcaagaccatcaccctggaggtcgagcccagtgacaccattgaaaatgtcaaggcaaagatccaggacaaggagggcatcccccctgaccagcagaggctgatctttgcaggcaagcagctggaagatggccgcaccctgtcagactacaacatccagaaggagtccaccctgcacctggtcctgcgcctcagagggggcatgcagatctttgtgaagaccctgacaggcaagaccatcaccctggaggtcgagcccagtgacaccattgaaaatgtcaaggcaaagatccaggacaaggagggcatcccccctgaccagcagaggctgatctttgcaggcaagcagctggaagatggccgcaccctgtcagactacaacatccagaaggagtccaccctgcacctggtcctgcgcctcagagggggcatgcagatctttgtgaagaccctgacaggcaagaccatcaccctggaggtcgagcccagtgacaccattgaaaatgtcaaggcaaagatccaggacaaggagggcatcccccctgaccagcagaggctgatctttgcaggcaagcagctggaagatggccgcaccctgtcagactacaacatccagaaggagtccaccctgcacctggtcctgcgcctcagagggggcatgcagatctttgtgaagaccctgacaggcaagaccatcactctggaggtcgagcccagtgttaacaccaagaaggtcaaacaggaagatactcgtacctttctcaccacagtatctagaaagagcccttcttgtgcttgttcttgggtttgatggggaggtgtcttagttttccctatcttttaagctgttaacaagtttcattgcactttgaataaagttcttgcattcc

SEQ ID NO: 2753 - DNA, 3189 bp, Rattus norvegicus
  Genbank Accession No. D17309
ttcagaatcactacttgaagcttcagatcccttctctacaatgaacctcagcactgcaaaccaccacatacccctaaatgatggtaacagcattccgatcatcgggcttggaacctactcagaccctagaccggtacctggcaagacctttatagcagtgaagacagctattgacgaggggtaccggcatattgatggggcctacgtctaccgaaatgaacatgaagtcggtgaggccatcagagaaaaggtggcagaagggaaggtaaagagggaagagattttctactgtggaaagttatggagtacagaccatgatccagagatggtccgcccagccctggaaaggaccctgcagaccctcaagctagattacatagacctttatatcattgagatgcccatggcctttaagcctggagaggaattttatcctaaagatgagaatggccgagtgatataccacaaatcaaatctgtgtgccacgtgggaggcactggaagcttgcaaagacgctggcttggtgaaatcccttggggtgtctaattttaaccgcaggcagctggaggtcatcttgaacaagccaggactcaagtacaagcctgtcaccaaccaggtggagtgccacccgtatttcacccagacaaaactccttgaagtttctgccagcagcatgacatcgttcattgtcgcatacagccccttagggacctgtcgcaacccgttatgggtgaatgtatcttctccacccttgttaaaggatgaactcctaacctcgctggggaaaaagtacaataagacacaagctcaaattgtgttgcgtttcgacatccagcgagggttggttgtcatccctaaaagtactacccctgaaaggatcaaagaaaactttcagatctttgacttctctctcaccaaagaagaaatgaaggacattgaagccttgaataaaaacgtgcgctttgtggagatgctcatgtggagtgatcatcctgaatacccatttcatgacgaatactgaacatggaaatttcttcagtggagttttttttttgtctttcattcgggatcttgagctgattaatcccctccagtcgtagaaataaatggggtcttgctatcttcagattaagttgagcagaatacaccatgcttaacttgtgtatagtattaattcaacttagctctgatgaagagaagatttaaatatatctaaatagtttgttggaaaatgctttactagtatctttagctcaatgtgttctagattgttgatggaaattaccgaactttaattcaaaaataacaaaatatataaaatacaagatacaatataaaatataaaatacaaaaatataaaaacaggttctaacccaggagtctgagactaccatagggagtttgatttgtttagcatttagcaggacaacaaaagaggttggcatgcttccaggtgctgaccataaccatgacccaaacaaggtcatggacacaagatggacacagccaagacacaaatccacataccaatattaatgcaccttgagtatagacagaactgaaagtctagaaagtctaaagaagaacataaagcaggatgtcccggggctagaggttctcactggaggacttgcctggcagactggagacccagggtgagggtgtgggtgaggactatcagcaaagccataacgattctgtttttaccctttgtttccatccagtgtgcccattcagcttttaatgtgcttgaaggacagacagttaccgattccttcttaaattgtttttgttcagggcagtggggaattgagacagggtctcaggtagtctgctcatgtagctgcttacaaacttgctgtgcagctgagaccagttttgaattctgaacccctggtctctcttccatttttcatggcctgagcttccacctgactggtaagtccccacttgtactgtgctgtaatcattcttgcccacttcatcaaggaaaccaccatgtaaagtggcaagaaacaatcaatatatacaaccaagatttgtatacaatatggtctgaagatggtgatttttaaaagaatgatatttaaatagccatttctttctttctttctgaatctttaaaaattattttatttatgtgcattggtgttagctgcatgtgtatctatgaggaattgtttgaactcatggaactggagttacagacagtggtgagctgtaggtaggtgctgggaattgaacccaagtcattgggaagagctgcaagtgctcttaactgctgagccatctccccagcccccaaatgaatttgggaaatactagaagataaagctttgtaaagtagtttttaagatcttaagaatatttgaggtacgtatctgaattttgacaaagctgcaagttcttttttttaaattggatttttaaaaatttatttacatttcaaatgttatcccctctcctgggttcccatccacagacctccctatctcatcccccctctcccttcttctatgagagtgttcacccacctacccactccttccctcctccctgccctgacattcccctacactagggggtcgagtcttggcaggaccaagggcctctcctcccattggtgcccaacaaggccatcctctgctacataggcagctggagccatgggtctgtccatgtgtctctctggatggtggtttagtccctgggagctctggttggttggttctgttgttatggggttgcaaacccttcagctcctttaatcctttctctaattcctccattggggaccctgttctcagttctatggttggctgtgagcatccacctgtgtatttgtcatgctctggcagagcctctcaggagaatcaggctcctgtcagcagagcacaagtaattttagcgtatataaatttttaaaaagtgataaatgattacaactgtatctatttttaattcatctgaaatacagtacatttgtttatattagatcacttccaaagggtgagagatctctaatatatttaattcatagagaatcaatggccgaagagaataagttttgagaattatcacttaaaaatgtgatcaacatgaaccatttttgttcaatactgttcaatattgttaacaatgctgttctctggaaaatattttattcacatgaattaataaaatataatg

SEQ ID NO: 2754 - DNA, 2466 bp, Rattus norvegicus
  Genbank Accession No. D17310
tttaaatagtaagaaaaaattcacagacagaaaaatttttgttaccaggtggccataaagaggtttcttgcccacagtgaactgatagctgtgacccacgtgtggttcctatggcgtcttggaagtacctccaaccctgtgaaagtgcattcctcacacagggctgtctcagaacagtcagaagaccctcgccagacccaagacctgcttggttgcatgagtaacaagcgatggattccatatctctgcgtgtagcactaaatgatggtaacttcattcctgtactggggtttggaaccactgtgcctgagaaggttgctaaggatgaagttatcaaggctactaaaatagctatagataatggattccgccattttgactctgcttatttgtacgaagtagaagaggaagtgggccaagccattagaagcaagattgaagacggcactgtgaagagagaagatatattctatacttcaaagctttggagcactttccatagaccagagctggtccgaacttgcttggaaaagacactgaaaagcactcaactggactatgtggatctttatattattcatttcccaatggctttgcagcctggagatatatttttcccacgagatgagcatggaaaactattgtttgaaacagtggatatctgtgacacatgggaggccatggagaagtgtaaggatgcaggattggccaagtctattggggtgtccaactttaactgcaggcagctggagaggattctgaataagccagggctcaaatacaagcctgtgtgcaaccaggtggaatgtcacctttatctcaaccagagcaaaatgctggactattgtaagtcaaaagacatcattctggtttcctactgcacgctgggaagttcacgagacaaaacatgggtggatcagaaaagtccagttctcctagatgatccagttctttgtgccatagcaaagaagtacaagcaaaccccagccctagttgcccttcgctaccagctgcagcgtggggttgtgcccctgatcaggagtttcaacgcgaagcggatcaaagagctaacacaggtttttgaattccagttggcttcagaggacatgaaagccctggatggcttgaacagaaatttcagatacaacaatgcaaaatattttgatgaccatcccaatcatccatttactgatgaatagtaacatggtggactttgtcagcatttctatcggaagatctgtttatgcattgtgatttgaaagatatcttggatactggtgactgaatgcatcagaccactgtttctgttaattcacagtcagctggagcaatgtccacagtgctatgagggaagccatgtttttgtcacactctgaaatggaacatcacgttgcttttccttgtgtttttaaatattcatttattttgctttccatatatgaatattttccctacatgtatgtgtatctcatgaatgtctatgtccatgcagggttgaagagtgttgcaggtcacttggaaccggagttacattgattatggagttaccatgtgggtgctgggagccaaacctaggtcttctgtgagactagcaagtgcctttgaatgctgagccatctcattaggtccaaccctaaagatccttgcctgccactatttctgtgatctcaatgttttgttttctcctgacttctgacaccaagctgatttgctagaagtcttgggcatgaagtgggtgttgaggacagttattgcaaagggatttctgggtgggagttgaaagaacgttcaacattcagggaattaattgttcgaggttattgattagtcaatattccccatattctttgaggaagaagaaagtactccatagattttccctttttcttagttttgaggtagggcacctgtggcaggagtgaccaagagacccagggttctctccaacagcccaagaaccagagctccaagaacctggagagcaagttcttgtgggaaggttggaatgttggtaagaagagaaccaatctaaaagcatcatcatgattcagatgtggggagtttgagaggaaatttgaatgtgtctctctttttgggaaatatatcatcttttttctttttgtaattacatgttgggagcaatgcccttgaaaccctccattattgatgtaatggttagaattaagtatgactgggttcatggaaaatccccagccagctgcagaagactaatacaaatctggtggtcaggatgaataatgatatgataaagttctgaccttgctgagaaatacatctgacatcaagatacccaatgtgatgacctgtaagctttctgaaaaaccaacatcctgttgacatcagctgactacatgtatactgtgcccttggcctgtgtaaatgtttcacacttcccccctccctctgttacccatgttatggtataaattcagccttggtaaaaaa

SEQ ID NO: 2755 - DNA, 1404 bp, Rattus norvegicus
  Genbank Accession No. D17349
gtaccctgaggctcacatgacttgtcctttgtgcccacaggaaagcgcatttgtcttggagaaggcattgcccaaaatgaattgttcattttcttcaccgccatcctccagaacttctctttggcaagccctgtggctcctgaggacattgacctcagtcccattaacagtggtataagcaaaataccctcaccataccagattcacttcctgtcccgctgtgtgggttgagagaggagtgtcaacgtctcacttttccccaactccataccctgtgaatggaataggaaaagctaatgaagggcctttcttgatgtaaagacagagagacttctggaggccacagcttgttctgagtcacctctctcatgcttgttaacagccatagtccctacttgccagtctatattccaggatctgtgtgaatagactacagatggtttctcttgagttggctccaccctactccgtgtgttgtgttggagggtcatgtgtgaggacctcattgatagatgagtaagagaccccatgaatgtatcacagtgctagtgagtggtggggacaagatcacgctgtgagtttagaagtgtgacccctctcctgcttgtgtttacatgcagatgaaatccatataacgaagctgacaaaattttttagttttgtattcagtgccagaggctcatgtagttcacactgacctcaaaatcctatatatattcaaagatgtcttgaaatctcgatctcctgaccagtgctgccatcacaggcacatggacctacacccagattttaacatgactatatcttaatgtttatattttaatctcctttaatttattcacaatacgtacaacttcactatctaattccaggtatcttgtcccatttaaccaacaccactccaagccccaacctattcaaagatcagtccctcattcgttctctccataacctcccctgcactggacacccacagtgccacttttgtttgacctttgtgtcaatggactggcctgacctgtgtgtcttgtagaaaaggcaaggatgtgaccttgcatgctggctgccttttatgccacacccaacttctcaggcccctgtactgtgcaggccacagtcacacaccttcacagaccttccccattcgctctcttagattctttaccctgaatcttctctctagacaaggatctcctcagccctccacccctgagctgtgtgactctacttagattctcgaacatccccctgtaagtcctccatggatctcataaatacaccaaccttcctcaccaatcaaaaaaggatccctggtatgattttgtttgagcgtggtttgcttgcttgtttgtagagacaggatctcactatctacctctggctggtcttgagctcactgaattc

SEQ ID NO: 2756 - DNA, 1743 bp, Rattus norvegicus
  Genbank Accession No. D17370
ccgtcccagcatgcagaaggacgcctcctccagcggcttcctgcccagcttccagcactttgccactcaggccatccacgtgggaccagagccggagcaatggagttcgcgtgctgtggtgctgcccatttcgctggccaccacgttcaaacaggactctccaggccagtcctcgggttttgtatacagccgctctggaaatccgacgaggaattgcttggaaaaagcagtggctgcactggatggggcaaagcactgtttgaccttcgctcggggccttgccgccaccacaacgattacccatcttttaaaagcaggagatgaagtcatttgcatggatgaagtgtatggaggcaccaacaggtacttcaggagggtggcatccgagtttggactgaagatttcttttgtggattgttccaaaaccaaattgctggaggcagcgatcacaccacagaccaagcttgtttggattgaaacacccacaaacccaaccttgaagttggccgacatcaaagcctgcgcacaaattgtccacaaacacaaagacatcattctggttgtagataacactttcatgtctgcatatttccagagacctttggctctgggtgctgatatttgtatgtgttctgccacaaaatacatgaacggccacagtgatgttgtcatgggcttagtgtctgttacttccgatgacctcaacgaacggcttcgtttcctgcagaattctctcggggcagttccttctcctttcgattgttacctctgctgccgaggcctgaagacactgcagatccggatggagaaacacttcaggaatgggatggcagtggcccgtttcctggagtctaatccccgggtagaaaaggttatttatcctgggctaccgtctcaccctcagcatgagctcgccaaacgtcagtgcacgggctgccccgggatggtcagtttctatatcaagggtactctgcagcatgctcaggtcttcctcaaaaatataaagctgtttgctctggctgagagcctgggaggatatgagagtctggctgagcttccagcaatcatgacccatgcctccgtgcctgagaaggacagagctaccctcgggatcagtgacacactgatccgactttctgtgggcctagaggatgaaaaggaccttctcgaagacctgggtcaagctttaaaggcagcgcacccttaaagttcgagtcaaagccggcattccagtgctgccatcagcagcagcagccaaggggccagaccttctgaataactggacagaccattaaggagcatctgcagaacttcgcagtgaacattttaagaccctagtgattttacagctgtaaccttacagggatcttcccttaaggactgtcttctgctaacaggttgttctgttagtatcattctgatagttttgctgtatttgtgttcaaggaagagagttgtattattttggggatcatgttgcttcttttttcctttttctttcttcggtagcctaagatatgttttaatcatgtttacaaaatttagtattgatgttttatgaagttaaattattcaatgaacggtcttaaatcaactgtaggggttttttttttgaaaaattattgaaagtggggggtctttatttaattaccataagccaaaaaaatcaaatatttggaatatctactgtgaaattctagtgattaaaggttgtacttgatacttgttgtttttcttaaatgg

SEQ ID NO: 2757 - DNA, 3410 bp, Rattus norvegicus
  Genbank Accession No. D17447
cggtccttccgacacacgagctccaagccgctcctctcttttcctaaagcccttcaaggcagtcttcggtttccttctttccagccgaccctcttcagccccgcgaagatggtggaccgcgagcaactagtgcagaaagcccggctggccgagcaggcggagcgctacgacgatatggccgcggccatgaagaacgtgacagagctgaatgaaccactgtccaacgaggaacggaacctcctgtcggtggcctacaagaacgtggttggggctcgccgctcctcctggagggtcatcagcagcatcgagcagaagacgtctgcggatggcaacgagaagaagatagagatggtccgagcctaccgggaaaagattgagaaggagctggaggccgtgtgccaggacgtgctgagcctgctggacaactacctgatcaagaactgcagcgagacccagtacgagagcaaggtgttctacctgaagatgaaaggggactattaccgctacctggctgaagtggccactggggagaaaagggcgaccgtggtggagtcgtccgagaaggcctacagcgaagcccacgagatcagcaaggagcacatgcagcccacccaccccatccggctgggcctggcgctcaactactccgttttctactacgagatccagaacgccccagagcaagcctgccacctggccaagaccgccttcgatgacgccatcgccgagctcgacactctgaacgaggactcctacaaggactccactctgatcatgcagctgctccgagacaacctaacgctctggacgagcgaccagcaagacgacgacggcggcgaaggcaacaactaaggccccaggtggactggcagcgcacgctgatgctactactgcagtctttattttttcccatgagttgggggtcgggtgggggagggaaagggagggctgaccttcccagggagaaacccacgactgtcctgtctttgattgcctctttgacatttttgccaaaataccactagtggaaagtcaggctagctatgctggtatcggagtagcagcctcacaggcgccgggactgttgtgcaggtcgtgcaagtggagctgtctgcctttagtttaacttattgctagacggtagggttctaagcagaaagaccggatggatggccctctcgttcagtgcgttctgtggttccagtaaggattcttctgtccacacgccctcgtcttcagttccgtggctgttttctctctgtggctctgctgttttctttttctcttttctcctttctttccccggggtgtataccagagaagttagagtctaaattacccaagtggacaggcttagagtggaaggcacaacctttattgacgagtcagacgtggccctgtacttagaagtctctgatgggttgacagtattaacactaaattgtagtttacagtatttctacacgacagccatacatgacaccaagccattggttctgagttttcctttgtcagtcggctttacgtctgtgtccaggtcggtctggctgtccatcagctctcgtcatggggagagtcagcttcccggagttttggttgatgggcgcttggcaggtggctgttggggaatacttttttttttttttcttctcggttcttctttactctctaaggcaagcccatcacaaaaatagaaaccgttaagtaccacacacacacagagaaaacagagaaaattcaggtctgtatgtcattatcagagactcctgctctcagcagccagggctccatcctcagtgtcactgccgcttgaatgtttctctgcacttgagtctgcccgtaccccgtgctagcagcacgcaggtatctaggtgtcgggcaagattgcagaggtgggaggttaacgagacttggaacatccggtgccagcagctgagccaacaggaaaccactgggaagaggcagttctggtcctaaaccagttgtccctgccacccctccaacccccagcactccttccccaagtgctcagtggagggtaccgaggttcagcaggaggcgctgctcacccctgtctgacctaagctttcctggttttcctttctgaatgaaatcgtagttgatggagattggcttctcacgagatcactgcacacgtgacattgaaggaagctgtgctgctatgccctacatggtccgtctcagcccttggtccctcattctcactgtggataaatcttcccataaacgtgccctgttgcatgcagagtgtgcagtttgtctcctggagaacccatgctctcatggcttcccaagatggcagcaccctagacttgctttacttgtcttcagaggcccagcagccactttatcttatactgaaaccaagctcccacttaagttgagtcacgcttaacaggatgctggtgacgtggctgtagaagaagtacgcccctctgcacagtcctagcatgccctccctcagaggcccctcctcatgctggtgtgcaaacacccactaaccgaggcccacggaagaccgcagcggaggaagcttggccaccagagccatggacagaggggttgggcttcacccggttggtttgtctccatgtcggcagtgagcatgtctgtcccgcttgtactgtttggaaatgacctactggaattgcaaaacctagtttctctttaaatttcagccttgacctttgctgtgttctagaaaagtcatgtgagggtagaactgaagagggagagcgggagacctgacgtgagcgtggatggttccttctccttcccttactgttgagaagcgcacctgcctctgatgctgtctccgttgccgcggttgccccacctattgatacagtattgtgcatgctggtgttgtatttctatacggtagctgacatttattaccttacactgtaggcgttatgtattcctatgacaacaaaacttaagacttcaaaatctttttaaactttttttttttaatttaattttttcctttcaggggtaaagtttgctttaccaaaaatagtggttgtaacaaattgatctgttttggatgttgctatagtgacatgcagttctctattttgttttcggggggaggggacaaaagaaacaccagtgttagcttactcttaatgtctggtgtttgtcatggtgaaattataactattacagtgttggagaacgccgcggagcttctctgaacgacctctgtgctttcttgtcatgttatgcagtgaaactatttttaaggtctaatcaagtgattttttcccccccaactccgtgtttcgctaaggaattatttcgcacacggaccattcttagcagtttcctcagtgatggaatattcatgaatgtgagtcattatgtagccgtcgtacattgagcaa

SEQ ID NO: 2758 - DNA, 3687 bp, Rattus norvegicus
  Genbank Accession No. D17469
ttctgttactgcggctgtgtggtctgtcatgagttgagacgggatgtgagggtttagagaaactgccgctctgaagcctgagcctctgctcagtgatcttcctgccagagggactggacaagatttcttctgcatgattggaaacttggacctattagcacgtcatctacccagagaagcaggcagcgtgacagagtgaagaggggaaggaactactgcagaaacaagcaaacagcacaaaaggtggaggctggaaagatgttttagaaagtctctgtgtcagagaagcttcaagccactgaagatggagaatgaaaccgtcagtgaactgaaccaaaccgagctcccgccgcaagtagccgtggccctcgagtaccaggtggtcaccatcttacttgtggtggttatctgtggactgggcattgtgggcaacatcatggtagtcctggtggtcatgagaacgaagcacatgagaaccgctacaaactgctacctggtgagtctggctgtggcggatctcatggtcctggtggctgcaggcctccccaacatcaccgacagcatctatggttcctgggtctatggctatgttggctgcctctgcatcacgtatctccagtacttaggaattaacgcatcttcatgctcaataacagcctttaccattgagaggtacatagcaatctgccaccccatcaaagcccagtttctgtgcacattttccagagccaaaaaaatcattatctttgtctgggcctttacatccatttactgtatgctgtggttcttccttctggatctcaatatcagcacctacaaagatgctattgtgatatcctgtggctacaagatctcccgcaactactactcacctatttacctaatggactttggcgtcttttatgtcatgccaatgatcctggccactgtgctttacgggtttatagctagaatcctcttcttaaaccccattccttcagaccctaaagaaaactctaagacgtggaaaaatgactcaacccatcagaacaagaatatgaatttaaacaccaccaacagatgtttcaacagcaccgtttcttccaggaagcaggtcaccaagatgcttgcagtggttgtaattctgtttgcccttttatggatgccctacaggactcttgtggttgtcaactcatttctctccagccctttccaggaaaattggttcttgctcttttgcagaatttgcatttatctcaacagtgccatcaacccggtgatttacaacctcatgtctcagaagtttcgtgcagccttcaggaagctctgcaattgcaagcagaagcccactgagaaagctgctaactacagtgtggccctaaattacagtgtcatcaaggagtcagaccgctttagcacagagctagatgacatcaccgtcactgacacgtatgtgtcaaccacaaaagtatcatttgatgacacctgcttggcctccgagaagaatggacccagttcttgtacatatggatattctttgactgccaaacaggagaaaatatgaacttcctcaagaataccttgggctggtattaataaaggaaatctttcaaaaaattcaatgtgactcaaaaagatccaactgatcgaaggtcttcattcagaagtcagtaagaacatcgtgatacttaaatggtacagggtggcacaataaggaagcaaacatctaatccctagccatgaggacaagccactcctgttttgatatatatatatacaaattactggcatgcttttccttaatgtgtctctctttctcaaaataactgttatttgccagatgactctgaacacatcctggaaaccaatttgttctgagcctccacatatgtccttcaatacccttgaataccaaataattctgaataggcaagttaaacagaaaatcccatggaggacaagttcatttcatgtttgtatccaagaaattgaactaagatgctgagctcaacattgactttctcttgaatgaatgaacgaacgaacgaaagaatgaatgaacatgaataagtaaatttatgaatctccaactaagaaatataacgtaaaatcttcatgatgcctgatttcctcatagatttgtttacaaatataaaacttgtttgccttttgtttttatcatcttaaaccattctcttggcttattaaaatgtactatattttgtcagatcatggtcaccaccatctctgtgtatatattatgaatacaaagttcaatagtactctcaaatctctcacctaatttaataatgatcaagattattacatgtatgttcagagaataacaacatactatcactgacatgtgaataaaattaaatgtgcagagtacatggtaggaagagaagttatatgatttcagattacaaaccttagaattcctcattgggaaaagaatatcaggggggtgctagagtaattagaacaacctcataggaaagcttgaatttcttataagaatagacttggcttagataggaaaagacaagtgatgtaaggaaagagaggtgagtaagggtaggaggaaaagaaacaaactctaggtgtaatggataatgtgtccagttaagtgtgactcattggggattgatcaaggcaagcaactagaagaaaggaaagaagggaaataaagtatttcctgattattgtatttgttgaggaaatagtcagccagacaggtggtagatgtgtatattagtaagctgtcatgtattttctaaacattgtaaatttcacttattatctataaaaatgtagtatgctatttgtctcctaagtgttataattctgtaagtatcctaaagtcataatttccaggtaaaaactaattgtatatgtgtatatcttttctatattgcactgttatcatatatgggatatatttatttatgtatatatgattcagaggtccttaacagccatgaagttatccagttatgctcaccgtagagatccaagctagctcataggcccttcatatgcctaagcatccatattaaatgagaaactgataagcagtgacaagcttctaatgccctcaccctgttgacttcgatgctgcttatatcgtgctcctgaatgcttggtttcttacaacatgcctctgaatgttttggtttccttttaccatttgtagagagctgtatactcactcatctcattgcttggagatcaatcattgtgtccgtgtggaaaaataatctcctttaagaaagtgcagtattatgtgttctctctgcaatgggaaactattactgtatgtgtatgcatgcacaataaagtatcaaactgaaagacccccccccctttttttttttttttttttttttttttttttttggccatagaaacgtctttattgaagaggacaggagtcatgctgagtttagggacatgcagtgaaggggcagtcgtgagctgtccttggtggtcaggccccaggtctgctctggaccacggggccctcaggttctccctcaggctgttggtctggcccaggtgctgtgaagtcctttggggccaatgactcagatttagtgtcttggacctgtgaccagaaggtagattgaagtagggactccatgatttggggtcctgttagagcctggggccctgcacatattagttatcagagatttggaacttgga

SEQ ID NO: 2759 - DNA, 1154 bp, Rattus norvegicus
  Genbank Accession No. D17512
cggcggcgcagagaggagcgcgggtggagggcgcggaccgaccgagcgcaccgaccatggcctccaagtgtcccaagtgtgacaagaccgtgtacttcgccgagaaggtgagctccctgggcaaggactggcacaagttctgcctcaagtgtgagcgctgcaacaagacactgacgcctggcggccatgctgagcatgatgggaaacccttctgccacaagccctgttatgccacactgtttggacccaaaggcgtgaatatcgggggcgctggttcctacatctacgagaagcctccgacggaggcccctcaggtcactggccccatcgaggtccctgtggtacgaactgaagagcggaagaccagcgggccgcccaagggtcccagcaaagcctctagtgtcaccacgttcactggggagcccaacatgtgccctcgatgcaacaagagagtgtacttcgctgagaaggtgacctccctgggcaaggactggcaccgaccctgcctgcgctgtgagcgctgctccaagacactgaccccaggcgggcatgctgagcatgatggccaaccctactgccacaagccctgctatggaatactctttggacccaaaggagtgaatactggtgctgtgggcagctacatctacgacaaggacccggaaggcacagttcagccttagatctgcagatgctgcccctcgcggtcccctatttgaccctgagggagagtgatctgctgcctagtcctgcctcagtgtgtctcgcctgcaattccagcacctaagtgatggaggagaaagcccagctagtcctagaatttcagctcccttggtcaccttggcatgtcctatgttgcccgtggtttactttctgtctgtgtgtctccatagcaccatgggtcctgtgtccccatgtccctgataactctccaaggtggctgtcctatgatatccctttgcccacactcgcccgccagtattatttatgctctgcttgccggtgatgggcatgagctagctcacagcattcccggggtgacggcaccccagcaaggagccctttgctggttcccacactactccctacttaccctcacatggttcacagctatggagatttgctgtcaataaatagtttggtttaaagattgc

SEQ ID NO: 2760 - DNA, 2166 bp, Rattus norvegicus
  Genbank Accession No. D17809
tggatcacagtctccatcgactgactcaggatgcggctggaccgccgggccctctatgcgctagttctgctgcttgcctgcgcctcgctgggtctcctgtacgccagcacccgagacgcgccaggtctcccgaaccctctggcattgtggtcacccccacaaggtcccccgaggctcgatctgctagaccttgccactgagcctcgctacgcacacatcccagtcaggatcaaggagcaagtggtggggctgctggctcagaacaattgcagttgtgagtccagcggaggacgctttgccttgccgttcctgaggcaggtccgggcgattgacttcactaaagcctttgacgccgaggagctgagggctgtttctatctccagagagcaggaataccaggccttccttgcaaggagccggtccctggctgaccagctgctgatagcccctgccaactcccccttacagtatcccctgcagggtgtggaggttcagcccctcaggagcatcctggtgccagggctaagtctgcaggaagcttctgttcaggaaatatatcaggtgaacctgattgcttcccttggcacctgggatgtggcaggggaagtaacaggggtgactctcactggagaggggcagtcggacctcacccttgccagcccaattctggataaactcaaccgacagctgcaactggtgacttacagcagccggagctaccaagccaacacagcagacacagtccggttctccaccaagggacatgaagtggccttcaccatcctcataagacatcctcccaacccccggctgtacccaccatcatccctaccccaaggagcccagtacaacatcagtgctctggttaccgttgccaccaagacctttcttcgttatgatcggctacgggcactcattgccagcatcagacgcttttaccctacggtcaccatagtaatcgctgacgacagcgacaaaccggagcgaattagcgacccccatgtggagcactatttcatgcccttcggcaagggttggtttgcaggtcggaacctggcggtgtcccaagtaaccaccaaatacgtgctgtgggtggacgacgactttgtcttcacggcgcgcacgcggctggagaagcttgtggatgtcctggagaggacgcccctggacttggttgggggcgcggtgcgggagatctcgggctacgctaccacctaccgacagctgctaagtgtggagccgggcgccccaggctttgggaactgcctccggcaaaagcagggcttccaccacgagctcgctggctttccaaactgcgtggtcaccgacggcgtagtcaacttcttcctggcgcgcacagataaagtgcgccaggtgggctttgacccacgcctcaaccgggtggctcatctggaattcttcctggatggtcttggttcccttcgagttggctcctgctctgatgttgttgtggatcatgcgtcaaaggtgaagctgccttggacatcaaaggatccaggggctgaactttatgcccgttaccgttacccgggatcactggaccaaagtcaggtggccaaacatcgactgctcttcttcaaacaccggctacagtgcatgaccgccgagtaacgtctgatttgggccttcacactgtcaggctgggcctgcctcctccctgccaggaatttccagcaaccacccccccccaatccctgagcaccccactgatgaacaccctggcttcccgaccctctccaccaatctgattcctaacaggggcttgtcctggtgacacccttcctttctgtgagtgaccagaggccagatggagccatatcctcccccacagccagtgccaagtcctccccaaccccactcctatggggcaggaaatggggaggttcactttccaagtgccaaagagcccagacggactctaagaccctcaagtggaaacactctcacctcctgaggtgggcagggaaactcccaatttgcaaccccagggacatgcaccccaccccagctctggatccagcaccatgtgtcccggctccaacatacccctacagaaagcactgtgactgtagttctgtggggctggtgaacacacggtggaagccaaaaaaaaaaaaaaaaaaaaaaaaggggggggggggatcc

SEQ ID NO: 2761 - DNA, 2680 bp, Rattus norvegicus
  Genbank Accession No. D21132
gcagctgtgagggcttcccggaagatggtgctgattaaggaattccgtgtagttttgccgtgttctgttcaagagtatcaggttggacagctttactctgttgcagaagcgagtaagaatgaaactggtggtggagaaggaatcgaagtcttgaagaatgaaccttatgaaaatgatggcgagaagggacagtacacacacaaaatctaccacctgaagagcaaagtccctgcgttcgtgaggatgattgctcccgagggctccttggtgttccatgagaaagcctggaatgcttacccctactgcagaacaattgtaacgaatgagtacatgaaagatgacttcttcatcaaaatcgaaacatggcacaaacctgacttgggaacattagaaaatgttcacggtttagatccaaacacgtggaaaaccgttgaaattgtccacatagacattgcagatcgaagtcaggttgaaccagcagactacaaagctgatgaggaccctgcgttattccagtcagtcaagaccaagagaggccccctgggacctaactggaagaaggagctggcaaacacccctgactgtcctaagatgtgtgcctataagctggtgaccatcaagttcaagtggtgggggctgcagagcaaagtagagaacttcatccagaagcaagaaaaacggatatttacaaacttacatcgccagctcttttgttggattgacaagtggattgacctgacaatggaagacattaggagaatggaggacgagactcagaaagaactagaaacaatgcgtaagaagggttccgtccgaggcacgtcggctgctgatgcctagatgagcccctgtaggtcagagacattatcaaactgtctacggagtcaaggccaagtgagggggaccagtgcggcctgcgacgactaaagccaccagcgtctcagtgttgacggatgtttccagtgtgtgcctctgacggctcgggcacacttgtgcacactcgagggcacacacacacccatgcacacacactcacactgtatgtatgtctgtagctgtatgtaaagcacatatggctacaggcctagatacacacgagtgtatatatatatgtacatgtgaagatggatcagtaccttttctccaaagtactgcacctgtcttcagcagaaatactaaagaaaatattttcaatatatatacctggaacagatattaatacccatcaacatgatgccctggatggacaaacggactgccatgtggtgccctgtggtgctggctggcgtgcttcgtgaatgccaggtgtggaccagtgtgtacagcctttggttaggtttctgtttttttcaagtcaccacacacacacacacgtttagtctcaacccatcagcaacaactcctacagaaagattttttcaaatttttagatactccagtgactctggaatgtaaactctggatgtatttataactatttatttctgggtggccactatcttccagccaaatccaacaatatctgtcaagtaaggagtgaaagctctttattggtttgcccgagggttggggatatccttttttttaaaaaattgccactttttattggatttttgtattttgaatttcaagtatttttctatatcaaatctagcaaaaaacggtgatgacggtttgtgatttataataaacactgacaatattcagattctggctaagcaaacagggtgatcaggcaattaacctgagtggcactggaggctgtgcagagccattctgtggagttttgtttctgaaatggcttttctggaattacggcctggagactggatggtctgtattgctctcagttcacagggtaggagagtggtcccgcccggctgtttccagttacagtccaagctaggaggaaatgctgatgggagcaggcacagcttgagcatgacacaggcctgtccccgtcctgaggcccagctagacctgggccttgccgacagctctgcttcctcctcctgtatctcctcctcctcccccttcctcttctgtctctactttctcctttttttttaagagaaaggagcagtagctgggaaggattttcttttttttacctttccgtctgatgctattctcctctcgtcagtcctggaaccctgaccagcatcacactgttgaatccttcaggttacacactgccttttaacctccaccctgcagtcagagcacggtggtgacacccctttgttgacaggcttgaccttcatgtcccttctgccctgccctgtgtcccatgggggaaatggcagagagtcccactgcatcacactgccctgttagcctcagcaacaagccctgggttccatgtcctctaagctctagataaaggtggttattccctgggcactgctggaagctgggaaggtcaccaccagaagggtcattgccagccttgtctcctccagtgaaaccagatcacagacatccatagtttctctgagagctggggcacacaaggaaaccagagcccagtatggattcttgtgttgctctagcagctgtggagattgagggatgtggtgaatgcaaagaacccagtttacttggcagtctcctgtgtaaatcacagtaaaacaaagtgaaatcgaaacaagaataaatttgatctcaaaatgaaaaaaaa

SEQ ID NO: 2762 - DNA, 484 bp, Rattus norvegicus
  Genbank Accession No. D21215
agacggcggcgagatggtgcacgaggtggatatgatcatcaagcacaacaagtttcagagggacacctacgacttcgacattgccatgctgaggctgaagacccccatcacgttccgcgagaacgtggcccctgcctgcttgcctcagaaagactgggccgaggccacactgatgacgcaaaagacaggcatcgtgagcgggtttggacgcacgcacgagaagggccggcagtccaaagtcctgaagatgatggaggtgccctatgtgggacgcaacacctgcaggctctccaccagcttcagcattacgcagaatatgttctgcgcaggctatgacgccaagcaagaggacgcctgccagggggacagcggtggccctcacgtcacacgattcaaagacacctactttgtgaccggcatcgtcagctggggagaggggtgtgcaaggaaagggaaatacggcatctacacgaaggtcacggcc

SEQ ID NO: 2763 - DNA, 1835 bp, Rattus norvegicus
  Genbank Accession No. D26439
ggtaggctcagtgcctaaaagccacagagccccatcaggcggggagcagggtaaagtgcagaagtcggagcccagggctgtgtagaccgccggcactatgctgtacctaccgtgcctgttgctgtgggcattcccacagttctggggacaatccgaagtccagcagaattacaccttcggctgcctgcagatctcttccttcgccaaccgaagctggtcccgcacagacagtgtggtctggctgggggatctgcagacacaccgttggagtaatgactcagacaccatcagcttcacaaagccgtggtcccagggcaaattcagtaaccagcagtgggagaagttgcagcatatgtttcaagtgtatcgaaccagctttaccagggacatcaaggaaatagtcaaaatgatgtcacctaaagaagactatcctatcgaggtccaactgtctgctggctgtgaaatgtaccctgggaatgcttcagaaagctttttacacgtagcatttcaaggagaatatgtcgtgagattccatggaacatcctggcagaaggtcccagaggccccatcttggttagatttgcccatcaaaatgctcaacgctgatgaaggaacgagagaaacagtgcagatactcctgaacgacacctgcccccagtttgtccgtggcctcctagaagcagggaagccagacctagaaaagcaagagaagccagtggcctggttatcccgtggccccaaccctgcccatggccatctgcagctggtatgtcatgtctctggcttccacccaaagcctgtgtgggtgatgtggatgcggggtgaccaggagcaagggggtactcacagaggtgacatcctgccaaatgcggatgagacatggtatcttcaagcaaccctggatgtggaggctggagacgaggctggcctggcctgcagggtgaagcacagcagtctagaggggcaggacatcatcctctactggggtggcagacaagtatccccggtgttgatcttcttgatagtaggcgtactggttctagtggtgtgtgctgtggcctactatatcatcaggaaaaggagacgctcctatcaagacatcatgtgagatttttacccctgcctctcctgaagttcagaccttccaggttctaggacttcagtccttgtctgctcagaaactgaggataaaaaagaggaatcctgaagaaatgaagagcaaccagtacacccttttaatattaattataagaaatcaattatttaaatgatttttataagcttgggtagttcagaacaaacacaactgcacatgtgtgtacctgccagaaacaagctgtgagcagtgtctcgtgggatttgtactgaactagacagcacgcttcctgcccaaacagacactttgggggttgttggcaagtgtaaagtccaacaccaacacgactgtactctgtatttttcaagataacgagaaaaatggatttgtgtgtgtgtgtgtgacatatagctttggggtttgttggcaagtataaagtccaacaccaacacgactgtactctgtatttttcaagataactagaaaaatagattttgtgtgtgtgtgtgtgtgatacaagtattttaaaaagtaaactcaaatatttacaaatgattactaccttaaatacaaagctgctgactgatgattaccccaaaggcttcttccagtgtgtggtctttttacaatgtttgttctaattgtcataatggccactttagggcacagtctccattgaaaatgtgcattaatgactgaaaggtggtttctctttaaaataaaattaggatgtacgatg

SEQ ID NO: 2764 - DNA, 452 bp, Rattus norvegicus
  Genbank Accession No. D28339
cttgagcagggggagcatcgggatgttgtgatacgacagggagagatattcctcctgcctgccagggtgccccactccccgcagaggtttgccaacaccatgggcctggtgattgagagaaggcgaatggagaccgagctggatgggctgaggtactatgtgggcgacactgaggatgtcctcttcgagaaatggttccactgtaaggaccttgggacgcagttagcccccatcatccaagagttcttccactctgagcagtaccgaacaggaaagcccaaccctgaccaactgctcaaggagccgccattcccgctgagtacacggtccgtaatggagcccatgtcactgaaggcctggctggagagccactccagggagcttcaggcaggcacatccctaagcctgtttggggacagctatgagacgcaagtcatcgcccacggccaagg

SEQ ID NO: 2765 - DNA, 1500 bp, Rattus norvegicus
  Genbank Accession No. D28557
taaccgcgccaaccgccaccgaggtgcccggagagaggcggagaggcggcatgagcgaggcgggcgaggccaccaccggcggcaccacgcacccgcaggccgcggccgacgcgcccgccgcggcgcccccggaccccgcgcctaagagcccggcggccagcggcgcgccccaggccccggcgcccgccgcgctgctcgcgggagccccggcgagagccagcccccgggcccgccccggcctcatcagcccccgcgggaagcgaggacgcgagaagaaagttctcgccaccaaagtccttggcactgtcaaatggttcaacgtcagaaatggatatggatttataaaccgaaacgacaccaaagaagatgtgtttgtacaccagactgccatcaagaagaataaccacgtcaagtatctgcgcagtgtgggggatggagaaactgtagagtttgatgtggttgaaggagaaaagggtgctgaagcagcaaatgtgactggcccagatggagttcctgtagaagggagtcgctatgctgctgatcggcgccggtacagacgcggctactatggcaggcgccgaggacctccccgtaatgctggtgagattggagagatgaaggatggagtccccgagggagcgcagctccaggttcatcggaatcccacttaccgcccaaggttccgcaggggacctgctcgcccacgacctgcccctgctattggagaggctgaagataaagaaaatcagcaagcggccaatggtccaaaccagccgtctgcccgccgtggattccgacgcccctacaactacaggcgccgcccccgtcccctcaacgctgtttcacaagatggcaaagagaccaaggcaggtgaagcaccaactgagaaccccgctccagccaccgaacagagcagtgccgagtgaccctggctcccaggcaccttcaccaccagcagggtgaccttaagaattaatgaccattcaaaaacaaggcaaaaagcacacccacgaccttaccaacaccaaagaaacatctaagcaataaaacggaagactaacaagatttggacattagaatgtttactgctattctctacgaaactaacaactgcaaagggaaggagcccgcactgtccatcaagctgcgtcccgggaacctgcacaggcagagagcagcctccccatttcagcaacctagtgctttatatttttttcctggtttttactgttttggtaatatgaattaaaagaagaaatattaataccacatggggattgccccaaccaaagaaatctgaaatatatagtaaatgctctttttcctttgttgttcattttggatgctggtgctaaacttccaagtgtcatgatttaagaagaaattttatgcccttatttattcctaggatgaggggagaacatttttgctttcttacatagctctctctgaaatgtgcagtaacaagttcctcaaaaataaaatttttaccttcaaaga

SEQ ID NO: 2766 - DNA, 4469 bp, Rattus norvegicus
  Genbank Accession No. D29683
cgtgcggtcggagcgtagagctcagcgcagagcaccgggagccggagccttagcgggaggtgcatccaaagcccggccgttcggagcccgcgagcgatgatgtcatcctacaagcgggccacgctggacgaagaggatctggtggactcactctccgagggcgatgtgtaccccaatggcctacaggtgaacttccgcagcccccggagcggacagaggtgctgggcagctcggacctcggtggagaagcggctggtggttctggtgacgcttctggcagcagggctggtggcctgcctggcagccctaggcatccagtaccggacaagaacgcctccggtatgtctgactgaggcctgtgtctcagtgaccagctccatcctaaactccatggaccccacggtagacccctgccaggacttcttcagctacgcctgtggtggctggatcaaggccaaccccgttcccgacggtcactcacgctgggggaccttcagcaacctctgggagcacaaccaagccatcattaagcatctgctggaaaattccacggccagcgcgagcgaggcagagaaaaaggcgcaagtgtactaccgtgcgtgtatgaacgaaactaggatcgaggagcttcgggccaagcccctgatggagctgattgagaagctcggaggttggaatatcacaggaccctgggccaaggacaacttccaggacacgctgcaggtggtcacagcgcactaccgcacctcacccttcttctctgtctatgtcagtgccgactccaagaactccaacagcaatgtgatccaggtggaccagtccggccttggcttgccctccagagactattacctgaacaagacggaaaatgaaaaggtactgactggctatctgaactacatggtccagctggggaaactgctgggtggtggggacgaggactccatccggccccagatgcagcagatcctggattttgagaccgctctggccaacatcaccatcccccaggagaagcgccgggatgaagagctcatctaccacaaagtcacggctgctgagctgcagaccttggcacccgccatcaactggttaccctttctgaatgccattttttacccagtggagatcaatgagtctgagcccatcgtggtctacgacaaggaatacctcagacaagtctccacactcatcaacagcaccgacaaatgcctgctcaacaactacatgatgtggaacctggtacggaaaacaagctcctttctcgaccagcgctttcaggatgccgatgagaagttcatggaggttatgtacgggacaaagaagacctgtcttccccgctggaagttttgcgtgagtgacacagaaaacaacctgggctttgccctgggccccatgtttgtgaaagcaacctttgcggaggacagcaagaacatagccagcgagatcatcctggagatcaagaaggcattcgaggagagcctgagcaccctgaaatggatggatgaagatactcggaggtcagccaaggagaaggcggacgccatctacaacatgataggctaccccaacttcatcatggaccccaaggagctggacaaagtgttcaatgactacacagcagttcccgatctctactttgagaacgccatgcgatttttcaacttctcattgagggtcacagccgaccagctcaggaaagcccccaacagagatcagtggagtatgaccccgcccatggtgaacgcctactactcgcccaccaagaacgagattgtgtttccagctggaatcctgcaggcgccattttatacccgctcttcgcccaacgccttgaactttggtggtatcggggtcgttgtggggcacgagctgactcatgctttcgacgatcaaggccgggagtatgacaaggatgggaacctccggccctggtggaagaactcgtcggtggaggcattcaagcagcagaccgagtgcatggtacagcagtataacaactacagtgtgaacggagagcccgtgaatgggcggcacaccctcggggagaacatcgcggacaacgggggactcaaggcagcctaccgggcgtaccagaactgggtaaagaagaacggagctgagcagatactgcccaccctgggtctcaccagcaaccagctcttcttcctgggattcgcacaggtctggtgctcggtccgcacaccagagagctcccacgaaggcctcatcaccgatccgcacagcccctcccgcttccgggtcatcggctcactctccaactccaaggagttctcagaacacttccgctgcccgctcggctcccccatgaaccctcgccacaaatgcgaagtctggtaagggctgaagcgcagagaacacaggtggaagaagggaaggggcctgcagccagctcccgggaacagggccgcgctgtcaccctccttccagcccctcggccgagggccccttccccaccctggagggtatgcagccatcttgtctaagcctatgccagaggctcagcactggaagccaacatttgacccccttcgaagctccagcatcccagacacccttgagtgatgctataccgggcctttgggtgtgtcaagctggtggcttgccagccctgggcctcacactgacaatggcagtgggacaggaccctttgccacgtccaatgccagatataccacaataccactgtgtcaaatgctttaaagatatattttttggggagactattttttaagcattatggaatacactggaaatcttcagggaaaatgcatttaaaacacttttttttaaaaaaagattagtatatttattatgttctctcttttttttctaaacaacctgcggacaaaggaaaccccactgattgaccccaggggaccccaggctgttgagcaggccaccagtttgagcactgctttagcccattgttggtgtaattgcttgtgcagtcaggagatgtaggggccaggcagaaggggtggccagctgaagggcctgatttatgagcatggccttctctgtcctgtctccggagtccaaccatgggaaccccaacaaggacgggctgttacccaagttgatccctatggcagtacaaagccagagtaatggcctccgtacaaccgggggacccctgaacactctggacaacatcacaggagcccgtcggggctgagaccccacaccccatcagatgcacactattgtccaaagatgtcttgttttggtcccacctcttctggccttgggaccggttgcctctctgtagcagttctgacatcctgaagtggtcgccctctgtaccaggggaaaggggaaagagaaagcagtccagttctccctccaagctccgtagcctgtagttaccctggcttggctcctgggaccccttctctagtgccttaccccaggccacagcccctgagcccctttgaggaggcagcatttgtcttgctttctcagtggagcccccaagtgtcctgactagaagccaacaccatagccccactcccagaagccccagggtaccgtcccaaaccctacaggacagccattccacacattccccaccccacccccctctgcagcaggccaagactggaaggttcccagccccatcgggctccagggaatggcaggatgtcatccacccacagcatcacctaacagatatgtgggcctccactaagtggcgctcactgaggttttcatgactgctgtagggagcaagctcttgtgacctgtgtgtgaggagcgcagtagaagtgcccatcacagcccctggcaagtcatgcccccacatagcacaacacacacacacactcacctggaagccagagtcctccttggccaagacgcagagacagtgtagtctcggtcctgctagcgtagcgatagtcttagcactgggatggggagctgcaagcgggtgtctggcaaggttcttggtccctgtgaacacattcgaggtctcagctcttcggggaaaagtaacacaggaagcaggaaggtgctggagccacgccctgccacacaggggggaccttctgggtgggatcatctgccctttctatcccctcgccctgcttccccacaggtggccgtcctggatgccagtatctagaagcagggtcctgagctggagttagccatgcacgcattgctcagggtgtgcagggagccaaggcaggaaaacccaggctggttagggatggatgggtgcaaaagcagcatcccgacccctgtccctccagagatttgagaagggcagaattaggaagggcacccgccctcagaaagagccctcctctcaagcccggagtttccctgcaggcacaaggacatggggtttggaactggggactctatttttttgtattattgtgttttgtgctactgtagttttggtgtggcacctattataattaaaataaagtacttatacc

SEQ ID NO: 2767 - DNA, 2026 bp, Rattus norvegicus
  Genbank Accession No. D29967
aggaagccctgcagagcatcagaggcccagctagagggacaacacagaggagtaatttgctgacagacctgcagggatggacctgctttcagctctcacactggaaacctgggtcctcctggcagtcgtcctggtgctcctctacggatttgggacccgcacacatggacttttcaagaaacaggggattcctgggcccaaacctctgcctttttttggcactgtgctgaattactatatgggtttatggaaattcgatgtggagtgccataaaaagtatggaaaaatatgggggttgtttgatggtcaaatgcctctgtttgccatcacggacacagaaatgatcaagaatgtgctagtgaaggaatgcttttctgtcttcacaaaccggcggtattttggcccagtggggattatgggaaaggccatctctgtatctaaggatgaggagtggaagagatatagagccttgctgtcacccacgttcaccagtggaagactcaaggagatgttccctgtcatcgaacagtatggagacattttggtaaaatacttgaggcaagagaaaggcaaacctgtccctgtgaaagaagtgtttggtgcctacagcatggatgtgatcaccagcacatcatttggagtgaatgttgattccctcaacaacccgaaggatccttttgtggagaaagccaagaagctcttaagaattgatttttttgatccgttgttcttgtcagtagtactctttccattcctcacgccagtatatgagatgttaaacatctgcatgttcccaaaagattcaatagaatttttcaaaaaatttgtgtacagaatgaaggaaacccgcctggattctgtgcagaagcatcgagtggattttcttcagctgatgatgaatgctcataatgattctaaagacaaagaatctcatacagccctatccgatatggagatcacagcccagtcaatcatttttatttttgctggatatgaacccaccagcagcacactttcctttgtcctgcattccctggccactcacccagatacacagaagaaactgcaggaggagatcgacagggctctgcccaataaggcacctcccacctatgatactgtgatggaaatggaatacctggatatggtgttgaatgaaaccctcagattgtatccaattggtaatagacttgagagagtctgtaaaaaagatgttgaaatcaatggtgtgtttatgcccaaagggtcagtggtcatgattccatcttatgctcttcaccgtgatccacagcactggccagagcctgaggaatttcgcccagaaaggttcagcaaggagaacaagggcagcattgatccttatgtatatctgccctttggaaatggacccaggaactgcattggcatgaggtttgctctcatgaatatgaaactcgctctcactaaagttctgcaaaacttctccttccagccttgtaaggaaacacagatacctctgaaattaagcagacaaggacttcttcaaccaacaaaacccattattctaaaggttgtgccacgggatgaaatcataactggatcatgattttccctcaaggagttctgctgaattcttcagaaatgtggtgtctaagaacaccagaccctttaatttatgtcatgaataaaattcagatgaaattagggcttaatcgactttgttttgatttggtacatctttgctctttctcagtgtctacaatgtacccatctaatataaaggaaatgacaagtcagtgacagaacaggaacttaacctttggtgattctcatgggactacctccatccacatctggttgtctctgttaatttcttttgatagtaaccttgtctctgtaatttgatcaagaatttttcatgaaaatgtgaactattgtgacaactttaattgtagatttggtatcagatgttttagatgcattattctacactaaatgttacatggaaaaaatgtgaataaacacttctttaaaaaatccccatttt

SEQ ID NO: 2768 - DNA, 2744 bp, Rattus norvegicus
  Genbank Accession No. D30649
tgaggacagttcctttttccctccctagaggaaagaaagagccttattttctggctaaacaggtttacacagctacaggaacaatggattccaggctagctttagccacggaggagcccattaagaaagacagcctgaagagatataagatcctttgtgcggttcttcttgctttgctggtgatcgtgtcgcttggattgggcctgggcctgggactcaggaaacctgaagagcatataggcagctgcaggaaaaaatgctttgattcgtcacacagaggactggagggttgccgctgtgactccggatgcacagaccggggagactgctgctgggactttgaagatacctgtgtgaaatcaactcaaatctggacgtgtaattcgttccgctgtggggagaccagactagagacagccctctgttcctgtgcggatgactgtctgcagaggaaggactgctgcactgactacaaggctgtgtgccaaggagaagtcccatgggtgacagaagcctgtgcctcatcccaggagccccagtgtccagaagggtttgaccagccgccggttatcttgttctccatggacggctttagagctgagtacttacaaacatggagcaccctgctgccaaacattaacaaactgaaaacatgtggactccattccaaatatatgagagcagtgtatcccaccaaaacctttccaaatcattataccattgtcacgggtttgtatccagagtcgcacggcatcattgacaataacatgtatgatgtgtacctcaacaagaatttttcactttcttcagtggagaaaagtaaccctgcctggtggagtgggcagccgatttggttaacagcaatgtatcaaggcttaaaagctgcttcctactactggccaggatcagatgtggctgtcaatggctccttccctaacatctacaggaattacagcaattccgtcccatatgaaagtaggattgctacactgttgcaatggctggacctgcccaaagctgaacgacccagtttttacaccatatatgtggaagagcccgattctgcggggcacaagagtggaccagtcagtgctggagtcattaaagccttacagttagttgatgatgcctttgggatgttgatggagggtttgaaacagaggaatttacacaactgtgtcaacataatcgttctggctgatcatggaatggaccagacctcttgtgacagagtggaatacatgacagattattttcctgaaataaacttctacatgtaccaaggacctgcccctcgaatcaggactcgtaatatacctcaggacttctttacctttaattccgaagagattgtcagagacctcagctgtcgaaaatccgatcaacacttcaaaccctacttgactccggatttgccgaaacgactgcactatgccaagaacgtcaggattgacaaagttcatctaatggtggatcggcaatggctggcttacaggaacaaaggagttcccaactgcgaaggcgggacacacggttacaacaatgaatttaaaagtatggaggcaatctttttggcacatggacccagctttaaagagaagactgttatcgaaccatttgaaaacatcgaagtctataatctactgtgtgatcttctgcacatccaaccggcaccaaacaacggttctcacggtagcctgaatcatcttctgaaggcaccattttaccagccgtcgcatgcagaagaattgtcaaagtctgctggctgtggttttactactccattgcctaaggactcactaaactgctcctgcctcgcactgcagacttctggtcaagaagagcaagtcaaccaaagactaaatctcaatagaggagaggtctcggcaacagagaagacaaatttgccatttgggaggcccagggtgatacagaagaacaaagaccactgtctgctttaccacagggaatacgtcagtgggtttgggaaagctatgaagatgcccatgtggagttcatacactgttcccaagccgggagacacatcatctcttcctcccacagttccagactgtctgcgggctgatgtcagggttgatccttcggagagccaaaaatgttccttctatttagcagaccagaatatcgaccatggcttcctctatcctcccgcaatcaaaggaaataatgagagtcaatatgatgctttaattacaagtaatttggtcccaatgtataaagaattcaaaaaaatgtgggactacttccataaagttctccttataaaatacgctatagaaagaaatggagtgaatgtggttagtggacccatatttgattacaattatgatggccattttgatgcccccgatgaaatcacaaactatgtagctggcaccgatgttcctgtcccgacacactactttgtggtactgacaagctgtaaaaacaaaacccacacacccgacagctgccctgggtggctggatgtcctgccctttgtcgtccctcaccggcccaccaaacccgtggaaagctgtcctgaaaacaaagcagaagacctttgggttgaagagagatttaaagcacacatcgcccgggtccgtgatgtggagctcctcactggccttgacttttatcaggaaaaaacacagcccgtctctgaaattttgcagctgaagacatatttgcccacattcgaaaccattatttgaatagatgtgtaaagccatttgacaaaatga

SEQ ID NO: 2769 - DNA, 4758 bp, Rattus norvegicus
  Genbank Accession No. D32249
tggcgggtggaggatcgagcgctgttctcgctctggagccgctgcacatctcggaatcatttgcagcttattcactgtgtaaggaaaaaccaaattacatccataattctattgaactggaagcatagacgctgccatatatgtcacagtatacagaaaaagaaccatcagtaatggatcaagactccagcaaggctgcgtggcctagagcagcaggaggataccagacgattacaggcaggaggtacggaaggagacatgcgtatgtcagttttaagccatgtatgaccaggcatgaacggagcttgggtcgggctggcgatgactatgaagttctggaactggatgacgttgccaaggaaaacaccgcaggttccagttcattggatcaagtccatccttctttacccagtgaaactacagttgaaaaaagtgaaacagaaattcctacttgtggtccagcactgaatcaaagcacggagagcaacccatccgttgccacagtgtgtcatagtgaggaagtcagggagaccttagacagcagtacgaatcttcagaatcacgctgagagagagtgtacgccagcagtttgtaatgcctcaagtgtccagaatggaattgtgttggttcatactgactcttatgatccagacagcaagcatgatgagaatgactctcttcaactttgtgcccaagctgtggaaggtggtagacgtcagaaggtattaggcaatgcagtctttgagctggaaaatggagaggtagagagatatgctgatctgtgtccctcagttccctctctcagtggtgaaataagggaggagtctgaagagctaggttcagcactcttagagaaaaattctgctggcgatgcggaggctgtccatcaggatgggcaggaatttcagaggtcttctgaagacggcattgttagaaagaggcgacaagatgataccgatcagggaagacagacagaaaattcaactgaagatgcagactgtgttccaggccatgttgaacaaaatactagtgagagagccaatcaccatggaagttctcctgaacaggtagtgaggcccaaagttagaaaagtgatcagttcaagccaggtggaccaagagagcggttttaataggcacgaggctaagcaaagaagtgttcagaggtggagagaggctctggaagttgaggaatgcagttcagatgaccctataatcaagtgtgacgattatgatggagaccatgactgcatgttcctaaccccatcctactcaagagttacgccaagggaagcagaacgtcaccgtgcgacagcagaaaatggagccacagcttcaggaaggcaagaggctcgggaaaatgccttttggaatgcctgtggagagtattaccagctctttgacaaagacgaagacagttcagagtgcagtgatggggaatggtctgcttctctgcctcaccgattttctggcacagaaaaagaccagtcctcaagcgatgaaagctgggaaactctgccaggaaaagatgagaatgaacctgagctacagagtgatagtagtggccctgaggaagaaaaccaagaattgtctcttcaggagggagaacagacgtccttggaggagggggagattccctggttacagtacaatgaggtcaatgagagcagcagcgatgaagggaacgagcctgccaatgagtttgcacaaccagaagctttcatgttggatgggaacaacaacctggaggacgactcgagcgtgagtgaagacctggatgtggactggagcctatttgatggttttgcggatggacttggtgttgctgaagctatttcctacgtggatcctcagttcctcacctacatggcactagaagaacgcttagcccaggctatggagactgcactggcacacttagagtctcttgctgtagacgttgaggtggctaacccacctgccagtaaggaaagcatcgacggacttccagaaacccttgtcctagaagatcacaccgctattggtcaggagcagtgctgtcccatctgctgcagtgagtacattaaggatgacatcgcaacagagctgccctgccatcacttctttcataagccttgtgtctccatttggctacagaagtccggaacgtgccctgtgtgccgccgccacttcccacctgcagtgattgacgcatctgcagctgcttcctctgaaccagaccttgatgcctcgcctgcaaacgacaatgctgaggaagccccgtaagccgtcacggggaaatgagatcgaaattctatcacagtaaatctgcaaattccttctaaatctgatgtgcaaataattatatataaatatatttaaaatgctctatatagtatatgccgtagtttagaaagagaatattaacctttctaaactgaatttaggtttgcagaagatactaaacattttcaagctgaatgttgaagcagtgcatccattttctttagttgaacatggtgtccattgtaacgtcagtagtcatctctgtggcatacgtttctgttttgtctgaagtgctgccactaagagatcagaattaagctctcctttccacatcagatgtgaaaggagagcttaattctgatctctgtggcatacgtttctgttttgtctgaagtgctgccactaagagatcagaattaagctctcctttccacatcagatgtgaaaactgtgatcacaacagtagtacagtttggtttcattgaaaataaactgaattctaaagcatgctttttcactggtccctttgcttttgctacttcgagacctcttggtttatataacactgaggttaagattaaagcttttcagaatgccaggcaaagactagagttttgacccgaacacacacacaaaataaaaaaataaaaaataaattacatcttagatgtaaacttcctgaaactgtcatgtaataaactattcagtgaacgttggatgtttaaaggctagtaaagcatgtgaattatctgatgtgcttcatgctcggcacagtctcatgagcttggcctatgaaacactgtctaagccctcatgcagtctgcttctacttgttaaacactgaaggtccagaccagtcttggcatctgattaagaaattggatgtagttagctaaggtagtttgggttctactttaggagatctgaagatttgcacatggccatgtctgttacagcatcaccccagattagaaaggcacagcttttaggtggtcacacgagtaggcaagtctgtgcagacgctggtgtgataggtagcttacaggtgagccctgacatcagcacagggacaacggctcagcaggcccagcactggagcccatccgcgtgcacatctacctgccctgctcatccagttcgggaatatttctatagcttcccaaatcagcttcatctgatttgtgtaatatatctgagtatttatagtctttcttttttctccagtcttaaaaataaatgaattttcactgttggcacatttgaggcttaaatataagaaacctaacacttgcattctgatttttgcatatattgtaaatgtggctggtatttacagcgaatcctgtgtgtccttttatgggtaaaacaaaagtgaacattgcatgcaagtaatgtggtgaatttgtaatttaggggttttctggggcttctgtgactgtggatgcttaaattcaggccttaatgttgctctagctagcatgtttccttctaatgtacatagtcagcctgtatccactaatctctgcttgtcttctcctccgtggtcttcacaccgtatccactgatggtcagttagtgtcagaggtcacccaggttagcatcagttcccatgtgtgccgtgcggattgtgagccgtgtggttgcttggttggttttcttttatgtactttgattagctgtggcacttactgagtaaacttacgttgctgcagactgctgtgtaacaagccacgttttgtgtttagtcagtattacacacgggaccttgttttattcttctagatagcagctgtcccaaagaaaatatttcttctttgcctattaagatttagctattatctgccagttgttaaggggtttgattccaaactcaaccagagttgaacgtaagaaagctgctgtactcttgctgtccatctgttacgtcctccgttgttggctcctgactacgtacccacggctgctgaaggagacttgttttaatttgttttaaaaaggaaaatgaagttttaggactttgatggtggggaagctgacaagttcagaccccagtctgtcatttgctcttagcttggatccttttgaaaagttaagaatatatgaaggtaaattagaaaaagtaaaaatattgataaaatgtcatttatcttatgtctattttatgttgttatttggcctattaattttaattttttgaacattttcttatttcttgtaatatgaatgccgatatttaaagtttgactcacttgggtttcttttgtgtttcttagttgttatctctaagcctaactaacttttaagattatttgtgatatggatttatataagctgttaaatatatatgagctgttaaaatggaatgcaaggttttccaaagaccaggtctaactgtaatgattggtttattgttctacaatcccagcccggcattttccgtgtaaatcataaacaataaacaggatatactcagtgttcatttctaaaaaaaaaa

SEQ ID NO: 2770 - DNA, 4492 bp, Rattus norvegicus
  Genbank Accession No. D37934
gtggtcgacggtatcgataagcttgatatcgaattccggcaccacaacatagctgatgggtgatgccaaagaagaggcaggcactggtagagtttgaagatgtgctgggggcttgtaatgcagtaaactacgctgcagacaaccagatctacattgctggtcaccctgcttttgtcaattattctaccagccagaagatctctcgccccggtgactctgatgactcccggagcgtcaacagtgtgcttctgtttaccatcctgaaccccatctactccataaccacggatgttctttacactatctgtaatccttgtggccccttgctgatgagggaggcgaagggctgcacctgcagggaggtgcccatgatgatgaggaggtccacctttgagagtctgactgcatgcaggagaagaagcgcggtgggaggttctcaccgaaaaacacgatatcgggctttaccacattctgacacttctcacacttgggagttgcttctgagaagatcttctctttcatccagctcatcgtgtactcttttccacaggaggtgttgacacagtgtgatgtgtagaaggtgccgtgggcctccaccaggtcctggggctccagccccgccactcgttccagagtgtcaatattctgcgtgtagcagcgcagcagcagccccttctccttcagcaggcggatgaagtagtggcagatggtcggcttgaactgcccaggatagagctccttagcaagggcaaagaagggttctggatgtttcttgaagtagctgatctcaaagatggcctctgggtatggaaggtggtatttctccaagtttgcatagaggccagtggatggggagcggaagtcagggattcctgcggatgtggagattccagctcccaccaaacagatgaccctgcgacagcgctcgctctgcatgtagcgtgtcactccttcaagggtcagctcgtccagcagacgctccttctgggaaccaggcccagggtctgggtgaataatattccgcaggaaggtccatctctgcctctccgccagtggctcctccctcagtgtccgagtctgaatcggtccggctcggccatgggaacggggtgggggctctcgggactgtcaccgactgctctgtcccgtgacggctacgagaccgagacccctttttcccccgagggagccttcccaggtggggggccggccgaggaggaaggggtccctcggccacgggctccccccgagccacccgacccaggagcgccccggccacccccagacccgggtcccctcccactcccagggtcccaggagaagccaacctttgtagttcaggtgagcaccgagcagctgctgatgtctacgggaggatgtgacaaagaacctcctaggggacaaggggtcgacacccggggagacaggacccaggaaggcggggagaagccccgcgaacagagagaagggcccaggcccgaacagggacctgacatccctggtcagcaggaagaaagtccccagcaggagccttccagtgaacggggtgacagtgttggagaacgggaagccaggagtcccggacatgaaggagaaggtggcggagaatggcctggaatctccggagagaggagagagagccctggtgaatggggagccgatgtccccagaggccggggagaaggtgctggcgaatggggttctgatgtccccaaagatcgaggagaaggtggcagagaatggggtcctgaggctgcccaggaacacggagaggccgccagagactggacttcggagagtcccaggaccctgggagaagatgcccgagactgggggtctagctcccgagacgctgctggatcgagcccctgcgccctgcgaggcagtcttgccccagaacggcttggagatggcccctggccagcttggcccagtccccaagagcgggaacccggaccccgggaccgagtggagagtccccgagagtgggggggcaccgagagcccccggggctgggaagctggacctcgggagtgggggccgagccccggggggcgcggggacggtccccgccggcggccccgcaagcgccgtggacgcaaaggccggatgggtagacaactcgagaccactgccacctccgcctcagccactgggggcccagcagaggaggccggagccagtgcccctgaaggccaggccggaggtggccccagaggaagagccaggggtcccagacaacaggctcggcggagacatggcccccaacgtagacgaggacccccccaagccggagaggaagggcccggagatgccacgcttgttcttggacttgggaccacctcaggggaacagcgagcagatcaaagccaaactctcccggctctcgctggcgctcccaccgctcacgctcacgccgttcccgggcccgggcccgcggcggccaccttgggagggcgcggacgcaggggcagctggcggggaggccggcggggcgggggcgccggggccagcggaggaggacggggaggacgaggacgaggacgaggaggacgacgaggcagcgggctctcggggacccgggaggacgcgggaagccccagtgcccgtcgtggtgagcagcgccgacggggacacggcccgcccgctgcgggggctgctcaagtctccacgcgcggccgacgagccagaggacagcgaactggagaggaagcgcaagatggtctccttccacggggacgtgaccgtctacctcttcgaccaggagactccaaccaacgagttgagcgtccagggcacccccgagggggacacggagccatcaacgcccccagcgcccccgacgcctccccaccccaccaccccaggagatgggtttcccaacaacgacagcggctttggcggcagtttcgagtgggcggaggatttccccctcctccccccaccaggcccccccctgtgcttctcccgcttctccgtctcacctgcgctggagaccccggggcctcccgcccgggctcccgacgcccggcccgcaggccccgtggagaactgactccccaaagacccagcccttttgcaccccaagaagagggtttgcgagcagaatcttgtgtggacgatggagccattgcccccgacactgacacagcctctggggaggtgcctgaggctgggccctccctctcctccaccatgtgccaaatgggaaggcccaggccctcccccaagtcccccagatgagtcccctgatccccctgatccccccgaccccctcggagccacatgaggcagaaagccccatcgctgaacagccacacttcttggaactgaactgaactctgtgggcccagagcccctggcacagcagaggcccctcctggcctcatgagggtcactggcttcaggaacctgggcccccatcttgcgtctccccttcccccaagcctggcccctagagggggcctctaattcaaaccttcgcgtgacattttcacattatttaaaaaaaaaccggaatttttttttttttttctttgttttagtcaccatcttaggcttttactgctgtgaacagacaccattaccaaggcaaatcttataaggacaacatttaattggggctggctttcaggttcagaggttcagtccattattatcaatgcaggaacatggcagcatccaggcaggcatggtgcaggcagagctgagagttctacatcttcatttgatgtctgctagcagaatattggcttctaggcaactaggttaagggcttaaagccacaagcacagtgacacacctattccccttctaatagtgcactccctggactgagcatatacaaaacatcacagtcccaataactagtgccaagggacataaaatgttctgccagtggttaaaagtatcttctgtgctttttgaaatttcttgggctactccaatgaaagctgtgtatgtatctctccctgcacagctttcattggagtagcccaagaaagctgtgcagggagagatacatacaccgttctttactggtgatagcatccccaaagtttaccaaagaatagctcttgcttaatatctagacatgctctcaatttgttagctatgcattttctccaccgcagccacctgaggttagcaatcagcgggtgcatgagttcactccacagggttgctaccgaattaattcgcggccgccacaactccagtgctgttggcccatggggaacgggcggagtggccactgaggagtttctccctgtcaccccaattctggaaggctttgtcattcttcgaaagaaccccaactacaatctttgaaaaatggctgacactagagaccctggctgcagctgactttttttagcaggctgtactgcccctgccaggggcagatactgttccagatctttgggggaattgttacctcctgctgttttgttactgagtaagataatcttgtcgaataaagacctttatcccc

SEQ ID NO: 2771 - DNA, 2813 bp, Rattus norvegicus
  Genbank Accession No. D43623
ctgagctgtgctgactaaaccccaggatggcggaagcacaccaggcagtagctttccagttcactgtgaccccagacggggtcgacttccggcttagtcgggaggctctgagacacatctacctgtctggaatcaactcctggaagaaacgccttattcgaatcaagaatggtatccttaggggtgtgtaccctggcagccctaccagctggctggttgttgtcatggcaacagttggttccaactactgcaaagtggacatctccatggggctggtccattgcatccagagatgcctcccgacaaggtatggctcctacgggaccccacagaccgagacacttctcagtatggtcatcttctccaccggagtctgggcgacaggcatttttttattccgacaaaccctgaagctgctgctttcctatcatgggtggatgttcgagatgcacagcaagaccagccatgccaccaagatctgggctatctgtgttcgtctcctgtccagccggcggcccatgctctatagcttccaaacatcactgcccaagcttcctgtccccagtgtgccagccacaattcaccggtacttggattctgtgcggcccttgctggatgacgaagcctatttccgcatggagtcgttggccaaagaattccaggacaagattgcccccagactgcagaaatacctggtgctgaagtcatggtgggcaaccaactatgtaagtgactggtgggaagagtacgtctacctccgaggcaggagccccatcatggtgaacagcaactattacgccatggattttgtgcttattaagaacacgagccaacaagcagcacgtttgggaaacaccgttcacgccatgatcatgtatcgccgcaaactggaccgagaagagatcaagccggtaatggcactgggtatggtacccatgtgctcctaccagatggagaggatgttcaacactacacgcatcccaggcaaagagacagacttgctacagcacctctcagagagcaggcacgtggctgtctaccacaaaggtcgcttcttcaaggtttggctctatgagggctcgtgcctgctcaagccccgagacctcgagatgcagttccagagaatcctcgatgacacctccccgcctcagcctggagaggaaaagctggcagccctcaccgcaggaggaagggtagagtgggcagaagcacgtcagaagttctttagctctggcaagaacaagatgtccctggataccatcgaacgtgctgctttctttgtggccctggacgaagactctcactgttacaaccctgatgacgaggccagtctcagcctctacggcaaatccctgctgcacggcaactgctataacaggtggttcgacaaatctttcactctcatctcctgcaagaatggccagctgggcctcaacacagaacactcatgggcagatgctcccatcatcggtcacctctgggagttcgtcctggccactgatacctttcacctgggctacacggagacaggacactgtgtgggtgaacccaacaccaagttgccgccgcctcagcggatgcagtgggacattcccgagcagtgccagacagccatcgagaattcgtaccaagtagccaaggccctggctgatgatgtggagttatactgcttccagttcttacccttcggcaaaggcctgatcaagaagtgtcggaccagccctgatgcctttgtgcagattgccctgcagctggctcatttccgggacaaaggcaagttctgcctgacctatgaggcctccatgacaagaatgttccgagaggggcggacagagactgtgcgttcctgtactagcgagtccacggcctttgtgcgggccatgatgacggggtcccataagaaacaagacctccaagacctcttccggaaagcctccgaaaaacaccaaaacatgtaccgcctagccatgacaggggctgggatcgacaggcacctcttctgcctctacatcgtctccaagtacttaggggttagatctcctttcctggacgaggtgctttcggaaccctggagcctctccaccagccagatcccccagttccagatctgcatgtttgacccaaagcagtaccccaatcatctgggtgctggaggtggctttggtcctgtggccgaccacggatacggggtttcctacatgatcgcaggcgaaaacacaatgttcttccatgtttccagcaagttatcgagttcagaaacgaacgccctgcgcttcgggaaccacatccgtcaagcactgctggatatcgccgaccttttcaaaatttccaagactgacagctgagaccaggagacacaccagctgccctttggtccccacctggtggaggaagaggtctgtggccagttcacaggcataaggggtggcatgcacacgtgcccagttctgagaccagctccagcgcaggggctccccaggcagacactgctcctccaggcccggtcgaggtgggattggagtggtgagggaactttgatctttttttttcccccggtcttggtagatgctaataaaaataaggctgtataattctctctcagcccttaggtgcctatgtttggttagagaactagaaggcctttcccctgcccctgctcaggttagggtggtggcgactgaagggccgggtgaatgttcataatggctttttacctgctttgaaatgtgtgcttttcctgaataatgcggacttcgagagtgctgtccaacctctcatgtgcacttggaataaattcttactttagaaccttt

SEQ ID NO: 2772 - DNA, 1879 bp, Rattus norvegicus
  Genbank Accession No. D43964
aagactttttccccagccttaactggatagtctgaagttttcaaaactcttatccacaaagttgtcagaaccttgattgggaagtcctgtgcatctgtgctaacctacagggcctccttatccagagcactctgcatttcagagggtcgctgtcgaactacggttttggcgaagacattcctgaagaattgtctgaggtttcctctgcaaaaatggccaagctgacagctgttcctctcagtgcacttgttgatgagcctgtgcatatccgggtcacaggcctgacccccttccaggtggtgtgccttcaggcatcactgaaagatgataagggaaacctgtttaattctcaggccttctacagggccagtgaagtgggtgaggtagatctggaacgtgattcctctcttggaggagactacatgggggtccaccccatgggtcttttctggtccatgaaacctgaaaagctattgactagattggtaaaaagagatgtgatgaataggccccacaaagtccacataaaactttgccatccatactttccagtagaaggcaaagttatcagttcctccttggatagtctgattctggaaaggtggtatatggcacctggtgtcactaggatccatgtaaaggaaggccgaatccggggagccctgtttctgcctccaggagaaggtcctttcccaggggtcattgacttgtttggaggagctggtggactgtttgagttccgggccagcctcctggccagtcatggctttgccactttagctctggcttactggggctatgatgacctgccctctcgactggagaaggtagatctagagtattttgaagaaggtgtagagtttctcctgagacatcctaaggtcctgggcccaggggttggcatcctttctgtgtgcattggagcagagattggactttctatggctattaacctaaaacagataacagccactgtacttataaatgggcctaattttgtttctagcaatccacatgtatatcgtggtaaggtcttccagcctacaccctgcagtgaagaatttgtaaccaccaatgctttgggacttgtagagttctatcgaacctttgaggaaactgcagataaggatagcaaatactgttttcccattgaaaaagctcacggacattttcttttcgtggtgggagaagatgataagaacctcaacagcaaagtgcatgctaagcaagccatagcccagctgatgaaaagtggaaagaagaactggactctgctgtcttaccctggggcaggtcacctgattgagcctccctactccccactgtgctcagcctcaaggatgccctttgtaatcccaagcatcaactggggaggagaggttatcccacacgcagctgcgcaggaacattcttggaaggagatacagaaatttctcaagcagcatcttaatccaggtttcaacagtcagctgtgagtggacttgattatattactggaaagaggagctgggcatctcctggccagctccactcctcacttccatagaggaatgtctttaatctcttatcacatgaggaagaagagtaccaccagaaaatgccgaaggacagagagtgataacctcatgactttggaaggggagacatgttttccatggaataaaatgtccctcagtgagagtcctatatctgtataaataaaatcttagggttttcctaaaatgttcaacaccacagcaactttctgtgatgataattatcaaggaaattatcactgataatccacaggatactttagtttataaaagagacatgaaaagaattatatattgttacttattaatttcttaaaactcacattaaatatgcttagatcatc

SEQ ID NO: 2773 - DNA, 9132 bp, Rattus norvegicus
  Genbank Accession No. D45201
gaacgctagctgcccgcactcctcagccgcttggctcgccgctgccctcacctccgcgccggccgcccgccctccggcggcgcccggacgccggcccacccggccctccgccgcccccgggtctcggggaggacatggccgcacacaggccggtggaatgggtccaggccgtggtcagccgcttcgacgagcagcttccaataaaaacaggacagcagaacacacataccaaagtcagcacggagcacaacaaggagtgtctgatcaacatttccaagtacaagttttctttggtcatcagtggactcaccaccattctaaagaatgttaacaatatgaggatatttggagaagctgctgaaaaaaatttgtatctctctcagttgatcatattggatacactggaaaaatgtcttgctgggcaaccaaaggacacaatgagattagatgaaacaatgctggtcaaacagttgctaccagaaatctgccattttcttcacacctgccgtgaaggaaaccaacatgcagccgaacttcggaattctgcttctggggttttattttctctcagctgcaacaacttcaatgcagtctttagtcgaatttctacaaggttacaggagttgactgtctgttcagaagacaatgttgatgttcatgatatagaattgttacagtatatcaatgtggattgtgcaaaattaaaacgactcctgaaggaaacagcatttaaatttaaagccctgaagaaggtggcacaattggcagttataaatagcctagaaaaggctttttggaactgggtggaaaattatccagatgaatttacaaagctataccaaattccacagacagatatggctgagtgtgcaggaaagctgtttgacttggtggatggttttgcagaaagcaccaaacgtaaagcagcagtttggccactacagatcattctcctcattctgtgtccagaaataatccaggacatatccagggatgtggtcgatgagaacaacacaaacaagaaactgtttctggacagtttacggaaagcacttgctggccatggcggaagcagacagctgactgaaagtgctgccatcgcttgtgtcaagttgtgtaaagcaagtacttacatcaactgggaagacaactctgtcattttcctactggttcagtccatggtggttgatctgaagaacctgctttttaatccaagtaaaccattctctagaggcagtcagcctgcagatgtggacctcatgattgactgtcttgtctcttgctttcggatcagccctcacaacaaccaacactttaagatctgtctggctcagaattcaccttctacatttcactatgtgttggtaaactcactccaccgcattatcaccaattctgcatgggattggtggcctaagattgacgctgtatattgtcactcagttgaacttcgaaatatgtttggtgaaacccttcataaagcagtgcaaggctgtggagcacacccagcattacggatggcaccaagtcttacctttaaggaaaaggtaacaagccttaagtttaaagaaaagcctacggacctagaggcaaggagctacaagtatcttcttttgtctatggtgaaactgattcatgcagacccaaagcttttgctttgtaatccaagaaaacagggccctgaaactcaaggtagtacagcagaactgattacagggctcgtacagctggttcctcagtcacacatgccagaggtcgctcaggaggctatggaggctttgttggttcttcatcagttagacagcattgatctgtggaatcctgatgctcctgtagaaacgttttgggaaattagttcacaaatgcttttttacatctgcaagaaattaactagtcatcaaatgcttagtagcacagaaattctcaagtggttacgggaaattctgatctgcaggaataaatttcttcttaaaaataagcaggcagatagaagttcctgtcattctctctacctttatggagtaggatgtgacctgcctgctagtggaaatgtcactcagatgtcagttgatcatgaggagtcactacgtacctgtgctcctggagcctctctgcggaaaggaagagggaattcctccatggatagcacagcagggtgcagtggaaccccacctatatgccgacaagcccagaccaagctagaagtggccttgtacatgtttctgtggagtcctgacacggaagttgttctggttgctatgtcctgtttccgccacctctgtgaagaagcagacatccgatgtggtgtggatgaagtgtcagtacacaacttcttgcccaactacaacacattcatggaatttgcctcagtcagcaatatgttgtcaacaggaagagcggcacttcagaaaagagtgatggccctgctaaggcgcattgagcaccctactgcaggaaacactgaggcctgggaagatacacatgcaaagtgggaacaggctacaaaactaatccttaactacccaaaggccaaaatggaagatggccaggctgcagaaagtcttcataagaccattgttaagagacggatgtcccatgtcagtggaggaggatccatagacttgtctgacacagactccctgcaggaatggatcaacatgactggcttcctctgtgcccttggtggggtgtgcctgcaacagagaagcagctctggcctagcaacatacagcccacctatgggccctgtcagtgaacgcaaagggtctatgatttctgtaatgtcttctgaagggaatgttgattcacctgtcagcagatttatggaccggcttctgtccttgatggtgtgtaaccatgagaaagtggggcttcagatacggaccaatgttaaggacctggtgggtctggagctgagtcctgctctgtatccaatgctgttcaacaaactgaagagtgccatcagcaagttttttgactctcaaggacaggtattattaactgacagcaatactcagtttgtagagcaaaccatagctataatgaagaacctactggataatcatactgaaggcagctctgagcatctgggacaagctagcattgagacaatgatgctaaatctggtcagatatgttcgtgttcttgggaatatggttcatgcaattcaaataaaaacgaaattgtgtcagttagttgaagtcatgatggcaagaagagacgacctctcgttttgtcaagagatgaaatttcggaataagatggtggagtacctaacagactgggttatgggcacttcaaaccaagccgcagatgatgatgtaaagtgtctcacaagagatctagaccaagcaagcatggaggcagtagtctcgctcctcgctggtcttccactgcagcctgaagaaggagacggagtggagctgatggaggccaagtcacagctattccttaagtacttcacattatttatgaaccttttgaatgactgtagtgaagttgaagatgaaaatgcacaaacaggtggcaggaaacgtggcatgtctcggaggctggcatccctgaggcactgtacagtgcttgcaatgtcaaacttactcaatgctaatgtggacagtggactcatgcactccataggcttaggttatcataaagatcttcagacaagagctacatttatggaagttctgacaaaaatccttcaacaaggaacagaatttgatacacttgctgaaaccgtgttggcagatcggttcgagagacttgtggaactggtcacaatgatgggagaccagggagagctccctatagctatggctctggccaatgtggtcccttgttctcagtgggatgagctggctcgagttctggtcacgctgtttgattctcggcatttgctctaccagctgctctggaacatgttttctaaggaggtagagttggcagactccatgcagactctctttcgaggcaacagcttggccagtaagataatgacgttctgcttcaaggtgtacggtgctacttacctacaaaagctcttggaccccttgttacgaatcattatcacatcctccgattggcagcatgttagctttgaagtggatcctaccaggttagagccctctgagagccttgaggagaaccagaggaacctccttcagatgacagagaagttcttccatgccatcatcagttcttcctcagagttcccctcgcagcttcgaagtgtctgccattgtttgtaccaggtggttagccagcgcttccctcagaacagcatcggtgccgtcggaagtgccatgttcctgaggttcatcaaccctgccattgtctcaccgtatgaagcagggattttagataaaaagccaccacctagaattgaaaggggcttgaagttaatgtcaaaggtccttcagagcattgccaatcatgtactgttcacaaaggaagagcacatgaggccttttaatgattttgtgaaaagcaacttcgacttggcacggaggtttttcttagatatagcatcagattgtcccacaagtgacgcagtaaaccatagtctttccttcatcagtgatggcaatgtgctcgctttacatcggctgctttggaataatcaggagaaaattggccagtatctttccagcaacagggatcataaagctgttggaagacgacctttcgataagatggccacacttcttgcatatctgggtcctccggagcacaagcctgtggcagatacacactggtccagccttaaccttaccagttcaaagtttgaggaatttatgaccaggcatcaggttcatgagaaggaagagttcaaggccttgaaaacattaagcatcttctaccaagctggcacatccaaagctgggaatcctattttctattatgttgcacggaggttcaaaactggccaaatcaatggggatttgctgatataccatgtcttgctgactttaaagccatattatgcaaagccatatgaaattgtagtggaccttacccatactgggcctagcaatcgctttaaaacagacttcctctctaagtggtttgttgtttttcctggctttgcttatgacaacgtgtctgcagtctatatctataactgtaactcctgggtcagggagtacaccaaataccatgagcggctgctgactggcctcaagggcagcaaaaggctcattttcatcgactgtcctgggaagctggctgagcacatagagcacgagcaacagaagctccctgctgctaccttggcactggaagaggatctaaaggttttccacaatgcgctcaagctagctcacaaggacaccaaagtttctattaaggttggttctactgctgttcaggtaacctcagcagaaagaacaaaagtattggggcaatccgtctttctaaatgatatctactatgcttctgaaatcgaagagatctgcctagttgatgagaaccagttcactttaaccattgcaaaccaaggcacaccgctgacctttatgcaccaagagtgtgaagccattgttcagtctatcattcatatcaggacccgatgggaactgtcacagcctgactccatccctcagcataccaagattcgaccaaaagatgtccctggaacactgcttaatatcgcattactgaatttgggcagttcagaccctagtttacggtctgctgcctataacctcctgtgtgccttaacttgtacctttaatttaaagatcgaaggtcagttactagagacatcagggttatgcatccctgccaacaacaccctcttcattgtctctatcagtaaaacgcttgcagccaacgagccacacctcaccttagagtttttggaagagtgtatttctggatttagcaaatctagtattgaattgaaacacctttgtttggaatatatgaccccatggctgtcaaacctagtccgtttttgtaagcataacgatgacgccaaacgacaaagggttactgccatccttgataaactcataacaatgaccataaatgaaaagcagatgtacccttctattcaagcaaaaatatgggggagccttgggcagatcacagacctgctagatgttgtgcttgacagtttcatcaaaaccagtgctaccggagggttggggtctatcaaagctgaggtgatggcagacacagctgtggctttagcttctggaaatgtgaaactggtgtcaagtaaggttattggaaggatgtgtaaaataattgacaagacttgcttatctccaactccaactttagaacagcatcttatgtgggacgacattgccattttagcccgctatatgctgatgctgtccttcaacaactccctggatgtggccgctcatctcccctatctcttccatgttgtcaccttcttagtagccacaggtcctttgtcccttcgcgcttccacccacggattggtcattaatatcattcactctctgtgcacttgctcacagcttcattttagtgaagagaccaagcaagttttgaggctcagtctgacagagttctcgttacccaaattttacttactgtttggcatcagcaaagtcaagtcagctgctgtcattgccttccgttccagctaccgggaccggtcgttctctcctggctcctatgaaagggagacttttgctttgacgtccctggaaacagtcacagaagctttgttggagatcatggaggcatgtatgagagatattccaacatgcaagtggctggatcagtggacggaactggctcaaagatttgcatttcagtacaacccatccctgcagccaagagctcttgtggtgtttggctgtattagcaaacgtgtgtctcacgggcagataaagcagattatccgaatccttagcaaggcacttgaaagttgtttaaagggacctgacacttacaacagtcaagttctgatagaagccacagtgattgcactgaccaaactacagccacttcttaataaggactcaccactgcacaaagccctcttctgggttgctgtggctgtgctgcagctagatgaagtcaacttgtactcagctggcactgcacttctggaacagaatctgcataccttggatagtctccggatattcaatgacaagagtccggaagaggtatttatggcaatccggaatcctctggaatggcactgcaagcaaatggatcactttgttggactcaatttcaactctaattttaactttgcactagttggacacctcttaaaagggtacagacatccttcacctgccattgttgcaagaacagtcagaattttgcatacactactaactcttgttaacaaacatagaaattgtgacaaatttgaggtgaatacacagagtgtggcttacttagcagctctactcacagtgtctgaagaggttcgaagtcgctgtagcctcaagcataggaagtcccttcttcttactgatatctcaatggaaaatgttcctatggatacatatcccattcatcacggtgatcccagctctaggacactaaaggagactcagccatggtcctctcccagaggttcagaaggataccttgcagccacctacccagctgtaggccaaactagtccccgagccaggaaatccatgagcttggacatgggacagccttctcaggccaacacaaaaaaattgcttggaacaaggaaaagttttgatcacttgatatcagacacaaaggctcctaaaagacaagaaatggaatcagggattacaacacccccaaaaatgagaagagtggcagagaccgactatgaaatggaaacccaaaggatttcctcctcgcagcagcacccacatttacggaaagtctcagtgtctgaatctaatgttctattggacgaagaagtacttactgacccaaagatccaagcactgcttcttactgttctggctacactggtaaaatataccacagatgaatttgatcagcgaattctttatgaatatctagcagaggccagtgttgtgtttcccaaagtgtttcctcttgtgcacaatttgttggactctaagatcaataccctcttgtctttgtgccaagatccaaatttgttaaatccgatccatggaatcgtgcagagtgtggtgtaccatgaggaatcccctccacagtaccaaacatcatacctgcaaagtttcggttttaatggcttatggcggtttgcaggacccttttcaaagcaaacacaaatcccagactatgctgagctcattgttaaatttcttgatgccttgattgacacgtacttgcctggaattgatgaagaaaccagtgaggagtccctcctgacacccacatctccttaccctcctgcactgcagagccagcttagtatcactgccaaccttaacctctctaattctatgacctcacttgcaacttcccagcattccccaggaatcgacaaggagaacgttgaactctcccccaccactggccactgtaacagtggacggactcgccatggatccgcaagccaagtgcagaagcaaaggagtgctggcagtttcaaacgtaatagcattaagaagatcgtgtgaagctttctttctttcactcttcaaaccaacctaacatggcttctcactcatgactctcccccaccttgcactgctgcttcgtgtcttatgaacgcatctggtctgctgtgttgccagacggtcacctcttggagcattgcctaagtttaatgctgcttctctttgatgttttccttctactttggcatgtgtctggttgagcacttgttctgaggactgcagagaaagcaggaggtcaggaagcctgactgagagcgtggactgtgggcgtggatgaaccgtccagtgccgccactgctgccagccatgggccatacacagaagacgaccttctgtgttccggtcttacagagtgaagtggtcgtcttatttacacacttacaagttcgggggagaaataatattttaaccccagtgtatttaatcttctagctgtgggcttttttaccttatgaagttgaaggaaccacagaggccaagcctcagcgaagccacaggccaggggctgggggagggggacaaactagtattttgt

SEQ ID NO: 2774 - DNA, 1640 bp, Rattus norvegicus
  Genbank Accession No. D45254
agagccgtgcgcagcggcgtgtgtggggccgtgtgcagacccgcgtgtggcgcaggcaaggaccctgaaaataaacagccgctgctttgcgagtctccttcttgggtctacgtccgagtctcctctgctgtgggcagctcagacgccgaagctctaactgcagctatgagcagcaacgaatgcttcaagtgtggacgatctggccactgggccagggaatgccctactggtggaggtcggggtcgtggaatgagaagccgcggcagaggtggttttacctcggatagagggttccagtttgtttcctcgtctcttcctgacatctgttatcgctgtggtgagtctggtcatcttgccaaggattgtgatcttcaggaggatgcctgctataactgcggtagaggtggccacattgccaaggactgcaaggagcccaagagagagcgagagcaatgctgctacaactgtggcaagccaggccatctggctcgtgactgtgaccacgcggacgagcagaagtgctattcctgtggggaatttggacatattcaaaaagactgcaccaaggtgaagtgctataggtgtggtgaaactggtcatgtagccatcaattgcagcaagacaagtgaagtcaactgttaccgctgtggcgagtcagggcatcttgcacgggaatgcacaattgaggctactgcctaattattttcctttgtcgcccctcctttttctgattgatggttgtattattttctctgaatcctcttcactggccaaaggttggcagatagaggctgttcccaggccagtgagctttacttgcagtgtaaaaggaggaaaggggtggaaaaaaaaccgaatttctgcatttaactacaaaaaaagtttatgtttagtttggtagaggtgttatgtataatgctttgttaaagaaccccctttccgtgccactggtgaatagggattaatgaatgggaagagttcagtcagaccagtaagcccttctgggtttgagtgtgttcccatgtaggaggtaaaaccaattctggatgcatctaagcttccatgaataactttaattcttagcataatgatggccttggattgtctgacctcagtagctattaaataacatcgagtaacatctgcatcaggccctcatagaacattcagttgagttgggagtaaactgaaaagacaaatgtgttgaaggatatgccagggaatctggctaaagcctaatacaggagcatcttcatcccagtgttgatgctggacgtacagaaggtgatggcaaaggtgtagaacacattttttcaaagactaaatctaaaacccagagtaaacatccgatgctcagagttagcataatttggagctattcaggaattgcagagaaatgcattttcacagaaatcaagatgttatttttgtatactatatcacttagacaactgtgtttcatttgctgtaatcagtttttaaagtcagatggaaaaagcaactgaagtcttagaaaatagaaaatgtaattttaaactattccaataaagctggaggaggaaggggagttttgactaaagttccttttgtttgttttaaattttcatcaatgtatatagaacaaaatgccatattaaaga

SEQ ID NO: 2775 - DNA, 2411 bp, Rattus norvegicus
  Genbank Accession No. D49494
gccggcgcgggctcggctgagctccacgcggctcaggacagccgtgaccactgaccgggcggcgtggatgctcagcaagcagctctgccaccgcgagccaatcccgatacatcgagtcgggtcgtcggggctgtccgagtccccacagacactccagccgtggaccaggtgcacagccaacactgagccttccctgtctgccctcctgggctcagacccttcaccactgtcactcagccatggctccaggtcttgctcggatcagcttgaggtctcagctgctgcccttggtgccgctgctcctgctactgcggggcgcaggctgcggccacagagtcccctcatggtcctcactgccttcagcagctgacagtgtgcagagggacagggacctccagcagtcacccggggacgctgcagccgctctgggtccaggcgcccaggacatagtcgctgtccacatgctcaggctctatgagaagtacaaccggagaggcgctccaccaggaggaggcaacaccgtccgaagcttccgtgcccggctggatgtgatcgaccagaagcctgtgtatttcttcaacttgacttccatgcaagactcagaaatgatcctcacagccaccttccacttctactcagaacctccacggtggccccgggctcgtgaggtattctgcaagccccgagctaagaatgcatcctgccggctcctgaccccaggtctgcctgctcgcttgcacctaatcttccgcagtctctcgcagaacactgccactcaggggctgctccgcggggccatggccctgacacctccaccacgtggcctctggcaggccaaggacatctcctcaatcatcaaggctgcccgaagggatggagaacttcttctctctgctcagctggattctggagagaaggatctcggagtgccacggcccagttcccacatgccctatatccttgtctatgcaaatgacctggccatctcggagcccaacagtgtagcagtgacgctacagagatacgacccatttccagctggagactttgagcctggagcagcccccaacagctcagcggatccccgcgtgcgcagggcggcacaggtatccaaacccctgcaagacaatgaacttccagggctggacgaaagaccagcgcctgccctgcacgcccagcatttccacaagcacgagttctggtccagtcctttccgggcactgaaaccccgcaccgggcgcaaagaccgcaagaagaaagaccaggatacattcaccccctcctcctcgcaggtgctggactttgatgagaagacgatgcagaaagccaggaggcggcagtgggatgagcctcgggtctgctccaggaggtacctgaaggtggattttgcagacatcgggtggaatgaatggatcatctcacccaaatcctttgatgcctactactgtgctggagcctgcgagttccccatgcccaagatcgtccgcccgtccaaccatgccaccatccagagcatcgtcagagctgtgggcattgtccctggcatcccggagccatgctgtgtcccagacaagatgaactcccttggagtccttttcctggacgagaatcggaatgtggttctgaaggtgtaccccaatatgtccgtagagacctgtgcctgtcggtaaggtggcttcaagatggaaggcagacctccttcacccctgctgtgcagagtggcattcttggagccaggatttgactcgagcaagtcccaggtgctagacggagcttatagacagccaggctgagaccaagatctgtccaccgagccacagttctcccgttcttccgcgtcgtggtagctctgtaaggacttttttgagttcctggaaggaatctggaattcaccatggtctgaaatttgcccacatttttcaaggcctagaaatagcatgtgtccacagatgtcaaccccaaggcatctgtcctctcagaacctggaaagactatgcaaatctcggggcactccccgccccccacggcagtaaatgcttatttgaaaaccctcaagcggcatactagaaacagggcctaaagcatggcatggatgggtatttctcttacatttcactacacatgcttttatacatgcagtacgcaacatgtactcgagactgatttcttcttttaatatatgtattttgatttcaaagcaaagtggacagagttgacccccatgccccacagacgtaatactgaaagttaggtgtgggctgtttaaacatgcgtatgaaaaataatacagtgatatgctggaatactaaaaaataaccaagattctatatttttgtaaattatactttgtatactgtagattgtgagtgttctgtgtttttatggaaagctaataaattaaaggtacagtg

SEQ ID NO: 2776 - DNA, 539 bp, Rattus norvegicus
  Genbank Accession No. D49653
ccaagaagaagaagaccccagcgaggaaaatgtgctggagacccctgtgccggttcctgtggctttggtcctatctgtcctatgttcaagctgtgcctatccacaaagtccaggatgacaccaaaaccctcatcaagaccattgtcaccaggatcaatgacatttcacacacgcagtcggtatccgccaggcagagggtcaccggtttggacttcattcccgggcttcaccccattctgagtttgtccaagatggaccagaccctggcagtctatcaacagatcctcaccagcttgccttcccaaaacgtgctgcagatagctcatgacctggagaacctgcgagacctcctccatctgctggccttctccaagagctgctccctgccgcagacccgtggcctgcagaagccagagagcctggatggcgtcctggaagcctcgctctactccacagaggtggtggctctgagcaggctgcagggctctctgcaggacattcttcaacagttggaccttagccctgaatgctgaggtttc

SEQ ID NO: 2777 - DNA, 3320 bp, Rattus norvegicus
  Genbank Accession No. D63834
gaattcggcacgagctgcgaagtgactggtcggtcgtgtaggtgctgcagccaacgagcccggtggcgggcaagggacacgagcaggacccccggctccgaagaattgcggcccgcgccgccgcgtcacgcacactctgggcgccgcgagatacacataacgatactaggttttcgccgcatcttggaattcatcgacacctaagatgccacctgcgattggcgggccagtggggtacacccccccagatggaggctggggctgggcggtggtagttggagccttcatttctattggcttctcctatgcatttcccaaatccatcactgtcttctttaaagagattgaaattatattcagtgcaacgaccagtgaagtgtcatggatatcgtccatcatgctggctgtcatgtatgccggaggtcctatcagcagtatcttggtgaataaatatggcagccgtccagtaatgattgctggtggctgcctgtctggctgtggcttgattgcagcttctttctgtaacacggtgcaggaactttacttctgcattggtgtcattggaggtcttgggcttgctttcaacttgaacccagctctgactatgattggcaagtatttctacaagaagcgaccattggccaatggcctggctatggcaggcagcccagtgttcctctctaccctggctccacttaatcaggctttctttggtatttttggctggagaggaagcttcctaattcttgggggcctcctcctcaactgttgtgtagctggatccctgatgcgaccaatagggcctcagcaaggcaaggtggaaaaactcaagtccaaagagtctctccaggaagctgggaagtctgatgcaaatacagatctcattggaggaagtcccaaaggagaaaagctgtcagtcttccaaacagttaataaattcctggacttgtccctgtttacccatagaggctttttgctgtacctgtctggaaatgtggtcatgttctttgggctctttacccctttggtctttcttagtaattatggtaagagtaagcatttttccagtgagaagtcagccttcctcctttccattttggcttttgttgatatggtggccagaccgtccatgggtcttgcagccaacaccaggtggatcagacctcgagtccagtacttttttgctgcttctgttgttgcgaatggagtgtgccatttgctggcacctttgtctacgacctatgttgggttctgcatctacgcgggagtctttggatttgcctttggttggctcagctccgtattgtttgagacgttgatggacctcgttggaccccagaggttctccagtgctgtgggcttggtgaccattgtggaatgttgtcctgtcctcctgggaccaccacttttaggccgcctcaatgacatgtatggagactacaaatacacatactgggcttgtggcgtgatcctcatcatcgcaggcctctacctcttcattggtatgggcatcaattatcgacttgtggccaaagaacagaaagcggaggaaaagaagagggacggtaaagaggacgagaccagcactgatgttgatgagaagcccaagaagacaatgaaagaaacacagtcgccagcgccactgcagaacagctctggagaccccgcggaggaggagagcccagtctgacctgtggagcatgaagagagcaggtgtgacccgagacatccgaaaccattctgctggcccctagtctaccagtggtgccccgtgcagacagtggacaattgtgtggaaaacccaccagggtgttcattggtgggatttttttttttcactccttaccaatgcctggatttaaaatatactctgctttaggtagggagtggttgacaaagaatatggggaagaagcagtgatctgtttgtttgtttgtttgtttgtttgtttgtttgttttaatcttagcttttaacagtgtcatgaagattataatatgtgccttaagttttagtttttagaactctttagagagccttaacttttaaaaccattctgctgaattcatctgtttaaaacgtcattttaagaggaaaaataacaactagcttgcttgaggtaactaaccttaatcttgttttgttgttgttgtaatgctttgtcagacagacattgttaccggaacatttatgaatagaaatactgcttaaaggtcacaggtttataaaatactgagctaaagtatttttctagcattatagttgcctggtacatctgctgctaggtatatatttgagaaatttgaagcataaaattctggatcttggcagttccagccacagcctgtcacctgctgggcacctcttctggaatgctcactacagtctagtgctaaggtgttgccactgaattgatacctttgctcctattcagagacactgtgtggttagaagtaattggccatttttgaaatcaaatgcaaaaagttagtattaaaatctacaaaacaattccttaacacgtctgatttaatgtaaacagtatttcaagcatcagctgaattcagcgtaggttgtcccaaaaccttagttatggtgtgatactctgggtatgtgtgggtttgaggggctgtgagtgaggtcttggttcttaggattgacccagggccatgagcatgcgaagtacatgctgtacggccgagccacaacccacaggcaccctggagtcctcctagtccctgagaccttttctctgatttttgatagctcatttatttactgatagtttagagctgtatgtgagatatccagtacagggtgaatgtatgcgctctttgttttttacattgttttcagtatttgcaaaaccgagagggtcagtgtttggcctcagggaagccaataaagataaaatagggtggaagtttgcagactttcagtaagtacccacctcccgccacacacaccagacttacaggggaacttctatcatgcttacgattatttgacgcagtcttacctccacatcttaactttcacgaccctttcacttacctgacatgtagaaaaatgggtttaatatatggataggaggaaagatggaccagattggaattacagtgggttttttttttttaaacctgatgttttctgaatagaggcagaaaaaataagacatatgacactgaattggacgatgcatttaaaataccattgtaatgacagggtgaatacagatttacaaccttgtgtaagaagctgactttttccaaataaaacatttattttatttttagaaaaaaaaaaaaaaaaaaactcgag

SEQ ID NO: 2778 - DNA, 3206 bp, Rattus norvegicus
  Genbank Accession No. D78303
gtttcgcgcaggaagcaggctccattttagcgccgcccgccgtcgccatctgtttctctctcctcccccttgtctctggtgtggccgaatccccaacagaaagattgaagcccgcgctgtccgaggtcaggcgggaagagaaccagaggacgggaggaagggtgctcgtaggagctgagtggagcaggtcaggtcgaagcgcgcggcccgccggacggactgacggacggactcgtgcgcctgcggccgcggctgcggcgcgccgcgcgactcgcttcccggcggcggtggcggcggcggaagccggagggcagccatggcggccgacagccgggaggagaaagatggggaacttaatgttttagatgatattttgactgaagtaccagaacaggatgatgaactgtataatccagagagtgaacaagataaaaatgagaaaaaaggatcaaaaagaaaaagtgaaagaatggaatctattgacaccaagcgacagaagccttctatccattcaagacaactgatttctaagccactaagctcatctgttagcaataataaaagaatagttagtacaaaaggaaagtcggttacagaatataaaaatgaggaatatcaaagatctgaaaggaacaagcgtctagatgctgatcgaaaaattcgtctgtcaagcagttcctctagagaaccttacaagagtcaaccagaaaaaccttgtctacggaaaagggattctgaaagaagggccaagtctcctacaccagatggttctgagagaattgggcttgaagttgatagacgtgcaagcagatccagccagtcttcaaaggaagaggggaactctgaggagtatggctctgaccacgagacaggaagcagtgcttcttctgaacagggcaacaacactgagaatgaggaggaaggaggggaagaagatgtagaggaagatgaagaggtagatgaagatggagatgatgatgaggaagtggatgaagatgcggaggaggaggaggacgaggaagaagatgaggaggaggaggatgaggaagaagaagaggaagaggaagaagaatatgaacaggatgagagagatcagaaggaagaagggaatgattatgacacccgtagtgaggccagtgattctggttctgagtctgtttccttcacagatggatctgtcaggtctggttcaggaacagatggatcagatgagaaaaagaaggaaaggaagagagctcgaggcatatcacccattgtctttgatagaagtggcagttctgcatcagagtcatatgcagatcaaaccagtaaactcaaatctgtccttcaggatgcaagatttttcctcataaagagtaacaaccatgagaatgtgtctcttgccaaagcaaagggtgtatggtccacattacctgtaaatgagaagaaattaaatcttgcgtttagatctgcaaggagtgttatattaatattttctgtcagggaaagtggaaagtttcaaggttttgccagattgtcatcagaatcgcatcatggtggctctcctatacattgggtgcttccagcaggaatgagtgctaaaatgcttggaggtgtttttaaaattgactggatttgcaggcgtgaattaccctttactaagtcagctcatctcaccaatccctggaatgaacataagccagtaaagattggacgtgatggacaggaaattgaacttgaatgtggaacccagctttgtcttctgtttccccctgatgaaagtattgacttgtatcagctcattcataaaatgcgtcacaagagaagaatgcattctcagcctcgatcaagaggacgtccatcccgtcgagaaccagtccgggatgtgggaaggcgtcgaccagaagattatgatattcataacagcagaaagaaaccaaggattgactatccccctgagtttcaccagagaccagggtatttaaaggatccccgataccaggaagttgacagacgattttcaggagttcgccgagatgtgtttttaaatgggtcctacaatgattatgtgagggaatttcataacatgggaccaccgcctccttggcaaggaatgcctccttacccgggaatagaacagcctccacaccatccctactaccagcaccatgccccgcctcctcaagcccaccccccttactcaggacaccatccggtaccacatgaagcaagatacagagataaacgagtacatgactatgatatgagggttgatgatttccttcgccgcacacaagccgttgtcagtggtcggagaagtagaccccgagaaagagatcgggagcgagagcgagaccgccctagagataacagaagagatagagagcgagacagaggtcgtgatcgagaaagagagagagaaagaatatgtgatcgggacagagaccgaggggaaagaggtcgttatcgaagataatgtgctttttggaagcactgactgaagataaaaaatattgtattttttttgtgtgtgtttacaagtagtaaatttattttcagctgtctacttaaagctcattgtgtagaaggatttattatcttctttgttccaagcatgcagtagaataagaactggaaaactcagatccgccaaaaaatgcacagttgacagttgagttgacacttttattggggcagaatggaacagtccaagaatgtagatattgattcattctccataaatgttctttttacagtgtattcatcctagagttattttgtttgtttgttttccttcttttggaccttggtcaatactgccatagtattttgctttgtgtttctataggtagctgcacacggttcagtaaaaataatgctgctatcaagtatgcagatattgagtatgatggtttgactatatggcagtgttgtagcagcctctcggtttctcctcttccctccttttttttaaacctataaatccactttttttttaagtcttcaatgatgagagcaatattaagaagacattgctatctaatttttaatctttttaaataaaacgttcctatgttcagtagcatggtcgatgctattgtttagccttccttccaaactgtacattggcttggaatgttcagttttgcgtgtgtggcagcagaagataaccccacattctacattgctactgttttgtatgaaataaattggtaaagattgacact

SEQ ID NO: 2779 - DNA, 1816 bp, Rattus norvegicus
  Genbank Accession No. D78308
ccccctcggcccgccatgctcctttcggtgccgctcctgcttggcctcctcggcctggctgccgcagaccctgccatctatttcaaagagcagttcttggacggagatgcctggaccaaccgctgggtcgaatccaaacataagtctgattttggcaaattcgtcctcagttctggcaaattctacggggaccaggagaaggataaagggttgcagacaagccaagatgcccgattttacgcgctgtccgccagattcgaacccttcagcaacaagggccagacactggtggtacagttcaccgtgaagcatgagcagaatatcgactgtgggggcggctacgtgaagctgtttccgggtggcttggaccagaaggacatgcatggagactcagaatataacatcatgtttggtccggacatctgcggtcctggcaccaagaaggttcatgtcatctttaactacaagggcaagaacgtgctgatcaacaaggatatccggtgtaaggatgatgaattcacacatctatacacgctgattgtgcggccagacaacacctacgaggtgaaaattgacaacagccaggtggagtcgggctccttggaggatgattgggactttctgccgcccaagaagattaaggatcctgacgctgccaagccagaagactgggatgaacgagccaagattgatgaccccacagattccaagcctgaggactgggacaagccagagcacatccctgaccctgatgctaagaagcctgaggactgggacgaagagatggatggagagtgggaaccaccagtgattcaaaatcctgaatacaagggcgaatggaagccacgtcaaattgacaacccagattacaagggtacctggatacacccagagattgacaatcctgaatactcccccgatgcgaatatctatgcctatgatagttttgctgtactgggcttagacctctggcaggtcaagtctggcacaatttttgacaacttcctcatcaccaatgatgaggcctatgcagaggagtttggcaatgagacctggggtgtcaccaaggctgcagagaagcagatgaaggacaagcaggatgaggagcagaggcttaaggaagaagaagaagacaagaagcgtaaagaggaagaggaggccgaggataaagaggatgaggatgacagagatgaagatgaagatgaagaggatgagaaggaagaagatgaggaggatgccactggccaagccaaggatgagctgtagaggccacaccacctgcctccagggctggactgaggcctgaacaccccgccacagagctggctgctcccaataatgtctctatgagactcaagaacttttcatttttttttcaggcaggttcaggtctggggtggattctgatttttgttcccctgcctccccatcctccccacccccctttttttttactggtgtttgtctttaattcttcagccctcacctcctggcctctcatttttgaatcaacattttttctttctgtccctttctccatctcttggtcactatcctccaactctaggaacaggtatggaggaaaagcctaggcttgagatttcatctgctctcctttctgaatctcagaggagggtaggagaagggggtggtatcttccctccccccagcactgaggaagaatggggctcttcccctttctcccttgcccccaggactgggccatttgtggggcagccagttctagcacagctcacactgagagtgtaagaactacaaacaaaatttctattaaattaagttttgtgtcttccca

SEQ ID NO: 2780 - DNA, 1593 bp, Rattus norvegicus
  Genbank Accession No. D83796
atggcttgccttcttcctgctgctcgacttcctgcaggctttctcttcttagtgctctggggctcagttctaggtgacaagctgctggtggtcccccaggatggcagccactggcttagcatgaaggagatagtggagcacctcagtgaacgcggacacgacattgtggtgctagtgccagaagtcaatttgcttttgggagaatccaaatactacaggaggaaaagcttcccggtcccctacaacctagaagagttgcggacccgctatcgctcctttgggaacaaccactttgctgccagttcccccctgatggctcctctaagagagtacaggaacaacatgattgtcattgacatgtgctttttcagctgccagagcctcctgaaggactcggccaccctcagcttcctcagggagaaccagtttgatgctctgttcacagacccggccatgccctgtggtgtgatcctggctgagtatctcaagctgccttccatctacctcttcagaggtttcccatgctctctggagcacatgcttggtcaaagcccaagccccgtatcctatgttcccagattctacaccaaattctcagaccacatgacatttccccaacggctggccaacttcattgctaacatcttggagaactacctttatcattgtctgtactcaaagtatgagatccttgcctcagacctcctcaagagagatgtgtccctacctgccttacaccagaactctctgtggctgttacggtatgattttgtgttcgaatacccccggccagtcatgcccaacatgatcttcattggagggaccaactgcaagaagaaggggaacctgtctcaggaatttgaagcctatgtcaacgcctccggagaacatggcatcgtggttttctctttgggatccatggtctcagagattccagagaagaaagcgatggaaatcgctgaggctttgggcagaattcctcagacggtcctgtggcgctacaccggaactagaccatcgaaccttgcaaagaacactattcttgtcaaatggctaccccaaaacgatctgcttggtcatccaaaggctcgggcgttcatcacacactccggttcccatggtatttatgaaggaatatgcaatggggttccaatggtgatgatgcccttgtttggtgatcagatggacaacgccaagcgcatggaaactcggggagctggggtgaccctgaatgtcctggaaatgactgccgatgatttggaaaacgcccttaaaactgtcatcaataacaagagttacaaggagaacatcatgcgcctctccagccttcacaaggaccgtcctatcgagcctctggacctggctgtgttctgggtggagtacgtgatgaggcacaagggggcgccacacctgcgccccgccgcccacgacctcacctggtaccagtaccactccttggacgtgattggctttctcctggccatcgtgttgacggtggtcttcattgtctataaaagttgtgcctatggctgccggaaatgctttgggggaaagggtcgagtgaagaaatcacacaaatccaagacccactga

SEQ ID NO: 2781 - DNA, 3387 bp, Rattus norvegicus
  Genbank Accession No. D84346
atgtcgcgctccgtgctgcagcccagtcagcagaagctggcggagaagctcaccatcctcaacgaccggggcgtcggcatgctcacgcgcctctacaacatcaagaaggcatgtggagatcccaaggctaaaccatcctaccttattgacaaaaacctggaatctgctgtgaaattcatagtcagaaaatttcctgctgtagaaacacgcaacaacaatcaacagcttgcacaactacagaaagaaaaatcagagattctgaaaaatctggcattatattactttacatttgtagatgttatggaatttaaggaccatgtctgtgacttgctgaatactatcgacgtctgccaagtcttctttgatattactgtgaactttgatttaacaaagaactacttagacttgactgtgacctacacaacattaatgatactgctgtcccggattgaagaaaggaaggccatcattggactgtacaattatgcacatgaaatgacccacggagcaagtgaccgagaatacccacgccttggtcagatgattgtggactatgaacaccctttaaagaagatgatggaagaattcgtaccccacagcaagtctctttcagatgcgctaatttctcttcagatggtgtatcctagacggaatctttcagcagatcagtggaggaatgcccagttgttgagtctcatcagtgcacccagtacaatgcttaatcctgcacagtctgacaccatgccttgtgaatatctctctttggatgcaatggagaaatggattatctttggctttattctgtgccatgggatgctaaataccgaggctacagcactgaacctttggaagctagctcttcagagtagctcctgcctctctctctttcgggatgaagttttccacattcacaaagctgcagaagatttatttgtaaacattcggggctataataaacggattaacgacataagagaatgtaaggaggcggctgtatcccacgctggctcaatgcacagagagagacgcaagtttttacggtctgcactgaaagaactggcaactgtcctctcggatcagcctggcctgcttggtcccaaggcactttttgttttcatggcattatcttttgcccgtgatgaaattatctggctactccgtcatgcagacaacatgccaaagaagagtgcagatgactttatagataagcacattgctgagctgatcttttacatggaggagctcagagcacatgtcaggaagtacgggcctgtcatgcagaggtactacgtgcagtacctctccggcttcgatgctgttgtccttaacgagcttgtgcagaatctctctgtttgccctgaagatgaatcaatcatcatgtcctcctttgttaacaccatgacttccctaagtgtgaaacaagttgaagatggggaagtgtttgatttcagaggaatgagattagattggtttaggttacaggcatacactagtgtctccaaagcttcacttagccttgcagatcaccgagaactcggaaagatgatgaacacaataatattccatacaaagatggtcgattccttggtggaaatgttggtggaaacatccgatctctccatattttgtttttatagccgtgcttttgagaagatgtttcagcagtgcttggagttgccttctcagtcgcgatactccatcgcctttcctctgctctgcactcacttcatgagctgcacacatgagctgtgtcccgaagagcgccatcatataggggatcgtagcctttccctgtgtaatatgttccttgatgagatggccaaacaagctcggaacctcatcactgatatttgcacagaacagtgtactcttagtgaccagttactgccgaagcattgtgccaaaaccatcagtcaagcagtgaataagaagtcaaaaaaacagactggcaagaaaggggaacctgaaagggaaaagccgggtgtcgagagcatgaggaaaaacaggctggtagtgaccaaccttgataagttgcacactgcactttcggagttatgcttctccataaattatgttccaaacatggcagtgtgggaacacaccttcacaccgcgggagtacttgacttctcatctggaaatccgattcactaaatcaattgttggaatgaccatgtataatcaggctacacaggagattgcaaagccatcagaacttctgacaagcgtaagagaatatatgactgtactccagtccatagagaactatgtgcagattgatatcaccagagtatttaataatgtccttcttcagcaaacacaacacttagacagccatggagaaccaaccatcacgagtctgtatacaaactggtacttggaaacgttattaagacaagtcagcaatggccatatagcttattttcctgcaatgaaagcatttgtgaatttacccacagaaaatgaattaacattcaatgcagaggaatactctgatatatcagaaatgaggtcgttgtcagagctcttaggcccatatgggatgaagttcctaagcgagagtcttatgtggcatatttcatcacaagttgctgaacttaagaaacttgtggtggagaatgttgatgttctaacacaaatgaggaccagctttgacaaaccagaccagatggctgcactctttaaaagattatcatctgttgacagtgtcttgaaaaggatgacgataattggtgttattttatccttccggtcactggcacaagaagcactgagagatgttttgtcctaccacattccttttctcgtgagctccattgaggatttcaaggaccacattccacgggaaaccgatatgaaggttgcaatgaatgtgtatgagctgtcatctgctgctggattaccatgcgagattgatcctgccttagtagtagctctttcctcacaaaaatcagagaacattagtccagaagaagaatataagatcgcttgcctcctgatggtctttgtagcagtttccctgcctacactggccagcaatgtgatgtcccagtacagccctgcaatagaaggacactgcaacaatattcattgtctggccaaagcaatcaaccaaattgctgctgctttgtttacaattcacaaaggaagcattgaagacagacttaaagaattcctggcgcttgcgtcctccagtctactgaaaatcggccaagagacagataaaactacaacgagaaatagagaatctgtttatttgctactggatatgattgtacaagaatcaccgttcctgacaatggatctcttggaatcttgttttccttatgtgttgctgagaaatgcataccacgctgtctacaaacaaagtgtcacatcctctgcatag

SEQ ID NO: 2782 - DNA, 443 bp, Rattus norvegicus
  Genbank Accession No. D84480
agatcaacacaaatgtgtatttcaatatccgaaatatactcagaaacacattttgcataatgataaacagtgtacaatcttttaacaaaaccccagcaaaatggaaaccaggcagtatacataactttcacccaagtcttgccagtggtttcaagaaagccaaacaagaagaagcccagacaccatattttttaaaaggagctctggcaaagttttattaaaggagaactttcttgtttacttctcaccagtctgttctggcatgcttctaataatatcggaatcacctgggtcaatgatagccagtgtgcatactctgtagtatttcccacacgctgtgcccaattccatgttattgccactgtagtgatggacaccagttttagccaacatggatagtattctattcaaattccccaactggacgtggtgggaagaaacat

SEQ ID NO: 2783 - DNA, 2963 bp, Rattus norvegicus
  Genbank Accession No. D85100
gacacagtactgccgatgttggacagaggatcgcttaacagaacgaaatctcaaaacaaattaacaggacccggttgcttgatttcccaaatcagaaaaggctcgaaatgtctagaggggctgactgatgcagcggtgacccggactggagacagttggacgcgatcatctctggtgcttttgttcaaccttgaaaccttcgccacaggagacttgcctgagcagagaagcaaacgtggagaaacaaagagagatctagcgaaaagcctctgggaccaaggaggggaggtgggactctgggttggcggtggcacctgctgccggctattaataatagggtcgcgatgcgtttataaggtgtttgattaaacaaagactctatgagagaagaataactagcaacagccccacgtctgagtcgtcgcctccgacctttttcaacgtgggttctttgggccgagcgtcgtttgccgagaactagatctcacctgaccccagacgctgaaaacaagcgctgtggcatcctgggccacccaagctgacaagggcgcgccccctgagcacacgaggtgccccacgagggggagggacccacagccgtcccgcccgcaccgcggtgtccgctgcgggcacctgcagccgagccgccacccgcagtcgcagcgcgtccggcggccgaacccggtcgtcagctcgtcagcacctgctctgcttctctcccgcccgccgccgcgctgcacgcctcgagcgctccctcggccccggcggggaccggggaccccgcagccaccgccatgctgcctgtgctctacaccggcctggcggggctgctgctgctgcctctgctgctcacctgctgctgcccctacctcctccaggacgtgcggttcttcctgcaactggccaacatggcccggcaggtgcgcagctaccggcagcggcgacccgtgcgcaccatcctgcatgtcttcttggagcaagcgcgcaagaccccgcacaagcccttcctgctgtttcgcgacgagacgcttacctacgcccaggtagaccggcgcagcaaccaagtagcgcgagcgctgcatgatcacctgggcctgcggcagggggattgcgtggccctcttcatgggcaatgagccggcctacgtgtggctctggctgggactgctcaaactgggctgtcccatggcgtgcctcaactacaacatccgtgccaagtctctgctacactgctttcagtgctgcggggcgaaggtgctgctggcctccccagagctacacgaagctgtcgaggaggttcttccaaccctgaaaaaggagggcgtgtccgtcttctacgtaagcagaacttctaacactaatggcgtggacacagtactggacaaagtagacggggtgtcggcggaccccatcccggagtcgtggaggtctgaagtcacgttcaccacacccgcagtctacatatatacttcgggcaccacaggtcttccaaaggctgcaaccattaatcaccatcgcctctggtatgggaccagccttgccctgaggtccggaattaaggctcatgacgtcatctacaccaccatgcccctgtaccacagcgcggcgctcatgattggcctccacggatgcattgtggttggggctacatttgctttgcggagcaaattttcagccagccagttttgggacgactgcaggaaatacaacgccactgtcattcagtacatcggtgaactgcttcggtacctctgcaacacgccccagaaaccaaatgaccgggaccacaaagtgaaaatagcactaggaaatggcttacgaggagatgtgtggagagagttcatcaagagatttggggacattcacatttatgagttctacgcttccactgaaggcaacattggatttatgaactatccaagaaaaatcggagctgttggaagagaaaattacctacaaaaaaaagttgtaaggcacgagctgatcaagtatgacgtggagaaggatgagcctgtccgtgatgcaaatggatattgcatcaaagtccccaaaggagaggttggactcttgatttgcaaaatcacagagctcacaccattttttggctatgctggaggaaagacccagacagagaagaaaaagctcagagatgtttttaagaaaggagacgtctacttcaacagtggcgatctcctgatgatcgaccgtgaaaatttcatctattttcacgacagagttggagacaccttccggtggaaaggagagaatgtagctaccacggaagtcgctgacattgtgggactggtagattttgttgaagaagtgaatgtttacggtgtgcccgtgccaggtcatgaaggtcgcatcgggatggcctcgatcaagatgaaagaaaactacgagttcaatggaaagaaactctttcagcacatctcggagtacctgcccagttactcgaggcctcggttcctgagaatacaagataccattgagatcaccgggacttttaaacaccgcaaagtgaccctgatggaagagggctttaacccctcagtcatcaaagataccttgtatttcatggatgacacagaaaaaacatacgtgcccatgactgaggacatttataatgccataattgataagactctgaagctctgaatgttgcctggctcctaacacttccagaaagaaacacaataggcctagcatagccccttcacatgtgtaatccaactttaacttgattaaaggttataggtgtgatttttcctaggaaattattcatttaaaggacaattgtttgtttgtttgtttgttttttattaattacaccagaacgtttgcaagtaaaaagatttaaagtcacttatttttcaatgtgcacctgccatttgtccttgcaaacttagcttcttggagagagggccttatttttttaaagacataataaactatgtaaacact

SEQ ID NO: 2784 - DNA, 4862 bp, Rattus norvegicus
  Genbank Accession No. D85189
gccgaggctcgcccctccttgcaaggctgctccagagctagcgggcacgcgagctcctctccgggagcttccttccccgaaaggccgggacccagtggcggactcgtggtgagcgaggcagcaccttcgatcccaggagattgacctgttcttaaaagtgaaagaagaaatctaagaaaaacgctatggcaaagagaataaaagctaagcccacttcagacaaacccggaagtccatatcgctctgtcacgcacttcgactcactagctgtcatagacatccctggagcagatactctggataaattatttgaccatgctgtagccaagtttgggaagaaggacagcctggggacccgggagatcctgagcgaagaaaatgaaatgcagccaaatggaaaggtttttaagaagttaattcttgggaattataaatggataaactatcttgaagtgaactgccgagtgaataactttggaagtggcctcactgcactgggactgaaaccaaagaacaccattgccattttctgtgagaccagggcggagtggatgattgcagcgcagacctgctttaagtacaactttccgcttgtgactttatatgctacccttggcaaagaagctgtcgttcatggattaaatgagtctgaggcttcctatctgattactagtgttgaacttctggaaagcaaactgaaggcggcattattagatatcaattgtgttaaacatatcatttatgtggataacaagactatcaatagagcggagtaccccgaggggcttgagattcacagcatgcagtcagtagaggagctgggatccaagccagaaaactcaagcattcctccaagtagaccaactccttcggacatggccattgtcatgtacaccagtggctctactggccgccccaagggagtgatgatgcaccatagcaatctgatagctgggatgacaggccagtgtgagcgcatacctggattaggaccaaaggacacatatattggctacttacctttggctcatgtgctggaactgacagcagagatctcctgctttacctacggctgtaggattggatattcgtcaccactcacactgtctgaccagtccagcaaaatcaagaagggaagcaagggtgattgtactgtactgaaacctacacttatggcggccgttccggaaatcatggatagaatttacaagaatgttatgagcaaggttcaagagatgaattatattcagaagactctatttaaaattgggtatgattataaattagagcaaatcaagaaaggatatgatgcccctctttgtaatctgatactgtttaagaaggtgaaggctcttctaggaggaaatgtccgcatgatgctgtccggcggtgccccactgtccccccagacacaccgattcatgaatgtctgcttctgctgccccattggtcagggctatgggctgacagaatcatgcggtgctggaacagttactgaagttaccgactacactactggaagagttggcgctcctcttatttgctgtgaaattaaactgaaggactggcaggaaggtggttatacagttcatgataagccaaaccccagaggtgaaattgtgattggaggccagaatatctccatgggatattttaaaaatgaagagaaaacagcagaagattattctgtggatgaaaatggacaaaggtggttttgcactggtgatattggagaattccaccctgatggatgcttacagattatcgatcgtaagaaagatctggtgaagctgcaagccggagagtacgtgtctcttgggaaagtcgaagccgcactgaagaattgtccactgatcgacaacatctgtgcttttgccaaaagtgaccagtcttatgtgatcagttttgtggttcccaaccagaaaaagttgactcttttggcacaacagaagggggtagaaggatcttgggttgatatttgcaataatcctgccatggaagctgaaatactgaaagaaattcgagaagctgcaaatgccatgaaattggaacgatttgaaattccaatcaaagttcgattgagcccagagccatggacccctgaaactggtttggtaacagatgccttcaagctgaaaaggaaggaactgaagaaccattatcttaaagacattgagcggatgtatgggggcaaataaaaggcaactgtctacttcacatttgcacaggaggtggcctgatggtttttttagttctagagtttaagcctttgttgatctctctgttaaaatgtaaggtgaatcttctaaagacatgaaacaaaaaaacaaccaaaagtggttacaataaattgcatagtcctagagaagctgaaattgaagacatttccctttagctgtgttattaagtttagagcaaaaattctgttttagaatattagccttagctacacttgtttttctaaagatactccatgctaaagtaaacaaattggacttggactaggtgtagttgaagaaatctacagcttccagtgtctatgtcttcctagttcagaagtttctatcgtaatcattaggacaaaattacgtattaacactactcaaagccgaagttccaccaggctttgaaatcctcttccaaccatttctcttgaagggaaaaaaatcagttgtaataaatggattcagtatcttagaaggtattattttaagctcataattgccatgtaggtgagacatagaatcattataatattgtgaataattacagtgcctgaagttaaaactaaaacaacacacacataccaaaaatatctcataatgtatttgaagggaggctgaattgctcctttggatgtctaagaacttaaatcagcaactgtaattattgaaatgtcttcagaaaaatgtccactttgtaaaagtgacctttctgtgtgtgatctagtcaaaggctgagaccaaggggaacatgttagaaagtcaatcagaattcaataagatacattgcttttctgttagaaagttcatggcatcctaagcattcagaattaggatcctggcatagcactgagcctgggaaagagatttagcctctttaactttgataccagggcttgattttaaaatgtgcttgtattaaattacatttgtaatttatggtctgtttgctgttgctgattgattcttgatcagtagtgtgcatttcagagagcctttcattttgctttaatttcagcaaagcgggttatgataaatgacttcctcgaatcttgttcaaacctacgggtgattaagtgtcttggatgagtctgaggaagttaaagggaagaaaacactgttaacacttttcctgtttgtgaagagtttagaaactggaaatgctagatttgggagaagggcagagttacttgattaaggactgtctgtgcagtaacttgggagtgtgagtttctttttaaatcttcagctaaaatctggaattatatattcttgatagatattcgcacttgaaccatagttactgtatgtaaaaagcaaaaattcttaatactgttattctttgcacttttttcatagtcattttatacacacacacacacacatgcatgtgtatgtgtgtgtgtatatataatatatatatgttgcttacattgtgttgtacagatgtgggccaccactacaacaaaatgagttctttgtgctctaaaatatttataaagaaattatttaaatgttatgtatatggtggtaatattgagaaaaaaaatcatctggtattctgagcaacagcgaaggtttttgtaaaagtttcttttcagtgttgtgcaaactaaaatttgaggcaagttttccctgaagttctatgtgagtattctcatgcttcccatcttgcctttgaagtgtgaaaagacatcaagtagactactagtcagcttctacctactcctagtgcactgtttatccgtttttttttaaaggcttttccaatatatgtatcccatttggaatggtgattttaaaatgtgagtgcatgcagactatcttacttaagatacttgcaccccacccacagccatctcccaaagctggaacactgccaactaggtccttaagaatcacgcattgaatacaaggtcgggtgctgctaattcttcatgaaaatcctaacacacacgttaagggaccagggagatgccactgccctctgacttttcatcaaaaaaaaaatatatatatacatgtttatgtaaacagaactattttccatattcatagtgactttttaagtatttgagcctaaaggttttgatctccattttatacctatttaaatcgttcacaatttcatgtcagccatcaattaaagctgtgcttactgttgattgtgtgtgcatttctaaggtgaacgctcctaattttttgctttaattacatgaaagggtcttatttctttgatatttgtgctcttttttttaatgtagactgaaggtatgattgtgtgacttttaagaaatgaaataccgatgaatgatccatagagtccaaagtgagggagaatgctgtttctttgttcatagagactgactagtaatctttgcctatattttcctggtagcagatgacaaatgtttctacagtgacaagctgagaagaggttaaaggttaaagattgtgtggcattcgggaactggagagatacgttttaattttgaatgtagttacaaattttatattcatatttgtactttctgttaatgcacgattgtagaattgttctgtagattttttgtgtttactcttgaaaggctttgtttgttcttctttttaagtttgcacttgaatcttataaaataaatc

SEQ ID NO: 2785 - DNA, 1049 bp, Rattus norvegicus
  Genbank Accession No. D85435
gccttcggttttagggagagcaggccgggcggtcagagatcatgggggagagcgcactggagcccgggcctgtgcccggggcgccggctgggggtccggtgcacgccgtcaccgtggtgactttgctggagaagctggccaccatgctagaggcgctgcgggagaggcaggggggcctggctgagaggcagggcggcctggcgggctcggtgcgccgcatccagagtggcctgggcgcgctgagtcgcagccacgacaccaccagcaacacactggcgcagctgctggccaaggcggagcgcgtgggctcccacgccgacgcagcccaggagcgggcagtgcaccgcgccgctcaggtgcagcgactggaggccaaccacgggttgctggtggcgcgcgggaagctgcacgtcctgctcttcaaggaggagactgaaattccagcccgcgccttccagaaagcaccagagctcttgggcccggaggaccagttggtgctaggcccagagcagccagaggatgaagttggagagagttctgatgaggaacccgtggagtcccgggctcagcggctgcgacgcactggcttacagaaggttcaaagcctgaaaagggctttttccagtcgtaaaggctctgaagcagcacagcccacgccagtcaagccgccacgcctaggtcctgtccggaactccgaaggcccggcagaaggccagcctgcagctcagcctgcaatggagcctgtgctcccgtctgccctggagccagaacctcctcagcctaccaaggaagatcctgagagacctgtgcttcaaatagagagcgcagcctgatccctggggctgcctgccccattcagcccttatgccttgtcccaaaaataaatactaatcgagtgcagcacttacatccaaataaggagagaatcctgcatccactgcccggctccaatccttccttcctggttttccagtctggtaccctgtgtcctctgaaagaggaacattcggccttgtttaggttcaccaccaataaaagtaattttctct

SEQ ID NO: 2786 - DNA, 1423 bp, Rattus norvegicus
  Genbank Accession No. D85760
aggccggggcccgcgcgccatggacgcccctcagccggcgcggcgcggccgcggcctgagggcggtcatgtccggggtggtgcggaccctcagccgctgcttgctgccggccgaggccggagcccgcgagcgcagggcgggcgcggcgcgcgacgcggaacgcgaggcccgacggcgcagccgcgacatcgacgcgctgctggcccgcgagcggcgcgcggtgcggcggctggtcaagatcttgctgctgggcgccggcgagagcggcaagtccaccttcctcaagcagatgcgcatcatccacggccgggagttcgaccagaaggcgctgctggagttccgcgacaccatcttcgacaacatccttaagggctcgagggtgcttgtagacgctcgggacaagcttggcattccctggcagcactctgagaacgagaagcacgggatgtttctgatggccttcgagaacaaggcagggctgcctgtggagcctgccaccttccagctctacgttccagccctgagcgcactctggagagactccgggatcagggaagccttcagccgcagaagcgagttccagctgggtgagtcagtgaagtacttcctggataacttagaccggattggccagctgaactacttccccagtaagcaagacatcctgttggctagaaaggccaccaagggaatcgtggagcatgacttcgtgataaagaaaatcccatttaagatggtggatgtgggcggccagaggtcgcagcgccagaagtggttccagtgcttcgacgggatcacatcgatcctgttcatggtgtcctcaagcgagtatgaccaggtcctcatggaggataggcgcaccaaccggctggtggagtccatgaacatcttcgagaccatcgtcaacaacaagctcttcttcaacgtctccatcatcctcttcctcaacaagatggacctgctggtggagaaggtgaagtcggtgagcattaagaagcacttcccagacttcaagggcgacccgcaccggctggaggacgtccagcgctacctggtccagtgctttgacaggaagcgcaggaaccgcggcaagcctctgttccaccacttcaccactgccatagacaccgagaacatccgcttcgtgtttcatgccgtgaaggacaccatcctgcaggagaacctgaaagatatcatgctgcagtgagacagcccctctgccagtcctctcgtggcctctgtgtggccacatgtctctggtgtgtctgccacctgcatggacctgcagtgggcatctcgaagccacaccatctaatacctggcactaagaatgctggactgtcagccacaccagcgagctgcgggcaagaggatgggagtgtcagtgatagctactgaatcggggactgaaactactgaatcc

SEQ ID NO: 2787 - DNA, 4880 bp, Rattus norvegicus
  Genbank Accession No. D86086
aagagtcttcgtaacagaagcgcgaggagagcattatggacaagttctgcaactctactttttgggatctctcattactggaaagtccagaggctgacctgcctctttgttttgagcaaactgttctggtgtggattcccttgggctttctttggctcctggctccttggcaactttacagcgtgtacagatccaggaccaagagatcttctataaccaaattctaccttgccaagcaggtgttcgtcgtgtttcttcttattttagcagccatagacctgtctcttgcgctcacagaagatactggacaagccacagttcctcctgtcagatatacgaatccaatcctctacctgtgcacatggctcctggttttggcagtccagcacagcaggcaatggtgtgtacgaaagaactcttggttcctgtctctgttctggatcctctcggtcttatgcggcgtattccagtttcagactctgatacgagcactcctgaaggacagcaagtccaacatggcctactcctacctgttcttcgtctcctacggtttccagattgtcctcctgattcttacagccttttcaggaccaagtgactcaacacaaactccatcagtcacggcttcctttctgagtagcattacatttagttggtatgacaggactgttctgaaaggttacaagcatccactgacactagaagatgtctgggatatcgatgaagggtttaaaacaaggtcagtcaccagcaagtttgaggcggccatgacaaaggacctgcagaaagccaggcaggcttttcagaggcggctgcagaagtcccagcggaaacctgaggccacactacacggactgaacaagaagcagagtcagagccaagacgttctcgtcctggaagaagcgaaaaagaagtctgagaagaccaccaaagactatcccaaatcgtggttgatcaagtctctcttcaaaaccttccacgtagtgatcctgaaatcatttatactgaaattaatacatgaccttttggtgtttctgaatcctcagctgctgaagttgctgatcggtttcgtgaagagctctaactcatacgtgtggtttggctatatctgtgcaatcctaatgtttgctgtgactctcatccaatctttctgccttcagtcttactttcaacattgttttgtgttgggaatgtgcgtacggacaaccgtcatgtcttcgatatataagaaggcattgaccctatctaacttggctaggaagcagtacaccattggagagacggtgaacttggtgtctgtagattcccagaagctaatggatgcgaccaactacatgcagttggtgtggtcaagtgttatacagattactttgtccatcttcttcctgtggagagagttgggaccgtccatcttagcaggtgttggggttatggttctcctaatcccagttaatggagttctggctaccaagatcagaaatattcaggtccaaaatatgaagaataaagacaaacgtttaaaaatcatgaatgagattctcagtggaatcaagatcctgaaatactttgcctgggaaccttcatttcaagagcaagtccagggcattcggaagaaagaactcaagaacttgctgcggttcggccagctgcagagtctgctgatcttcattttacagataactccaatcctggtgtctgtggtcacattttctgtctatgtcctggtggatagcgccaatgttttgaatgcggagaaggcatttacctccatcaccctcttcaatatcctacgcttccctctgtccatgcttcccatggtgacctcatcgatcctccaggccagtgtttctgtggaccggctggagaggtatttgggaggagacgatttagacacatctgccattcgccgcgtcagcaattttgataaagctgtgaagttttcagaggcctcttttacttgggacccggacttggaagccacaatccaagatgtgaacctggacataaagccaggccaactggtggctgtggtgggcactgtaggctctgggaaatcctctttggtatcagccatgctgggagaaatggaaaacgttcacgggcacatcaccatccagggatccacagcctatgtccctcagcagtcctggattcagaatggaaccatcaaagacaacatcctgtttgggtccgaatacaatgaaaagaagtaccagcaagttctcaaagcatgcgctctcctcccagacttggaaatattgcctggaggagacatggctgagatcggagagaaggggataaatctcagtggtggtcagaagcagcgagtcagcctggccagagctgcctatcaagatgctgacatctatattctggacgatcccctgtcggctgtggatgctcatgtgggaaaacacattttcaacaaggttgtgggccccaacggcctgttggctggcaagacgagaatctttgttactcatggtattcacttccttccccaagtggatgagattgtagttctggggaaaggcaccatcttagagaaaggatcctatcgtgacctgttggacaagaagggagtgtttgctaggaactggaagaccttcatgaagcattcagggcctgaaggagaggccacagtcaataatgacagtgaggcggaagacgacgatgatgggctgattcccaccatggaggaaatccctgaggatgcagcttccttggccatgagaagagaaaatagtcttcgccgtacactgagccgcagctctaggtccagcagccgacgtgggaagtccctcaaaaactccttgaagattaaaaatgtgaatgtcttgaaggagaaggaaaaagaagtggaaggacaaaaactaattaagaaagaatttgtggaaaccgggaaggtcaagttctccatctacctgaagtatctacaggcagtagggtggtggtccatacttttcatcatccttttctacggattgaataatgttgcttttatcggctctaacctctggctgagtgcttggaccagtgactctgacaacttgaatgggaccaacaattcgtcttctcatagggacatgagaattggggtctttggagctctgggattagcacaaggtatatgtttgcttatttcaactctgtggagcatatatgcttgcagaaatgcatcaaaagctttgcacgggcagctgttaaccaacatcctccgggcacccatgaggttttttgacacaactcccacaggccggattgtgaacagattttctggtgatatttctactgtggacgacttgctcccccagacacttcgaagctggatgatgtgtttctttggcatcgctggcactcttgtcatgatctgcatggccaccccagtcttcgctatcatcatcattcctctcagcattctttatatttcggtgcaggttttttatgtggctacttcccgccagctgagacggttggattctgtcaccaaatctccgatctattctcacttcagtgagactgtcacaggtttgcccattatccgtgcctttgagcaccagcagcgatttctagcttggaatgagaagcagattgacatcaaccagaaatgtgtcttttcctggattacctccaacaggtggcttgcaattcggctggagctggttggaaacttggtcgtcttctgttccgccttgctgctggttatttatagaaaaaccttaaccggggacgttgtgggctttgttctgtccaacgccctcaatatcacacaaaccttgaactggctagtgaggatgacgtcagaagcagagaccaacattgtggcagttgagcgaataagtgaatacataaatgtagagaatgaggcgccctgggtgactgacaagaggcctccggcagactggcccagacatggtgagatccagtttaacaactatcaagtgcggtatcggccggagctggatctggtactgaaagggatcacttgtaacatcaagagcggagagaaggtcggcgtagtgggcaggactggggctgggaaatcatccctcacaaactgcctcttcagaatcttagagtctgcggggggccagatcatcattgatgggatagatgttgcctccattggactgcacgaccttcgagagaggctgaccatcattccccaggaccccattttgttctcggggagtctgaggatgaatctcgaccctttcaacaaatattcagatgaggaggtttggagggccctggagttggctcacctcagatcctttgtgtctggcctacagcttgggttgttatccgaagtgacagagggtggtgacaacctgagcatagggcagaggcagctcctatgcctgggcagggctgtgcttcgaaaatccaaaatcctggtcctggatgaagccacggctgcagtggatctcgagacggatagcctcattcagacgaccatccgaaaggagttctcccagtgcacggtcatcaccatcgctcacaggctgcacaccatcatggacagtgacaagataatggtcctagacaacgggaagattgtcgagtatggcagtcctgaagaactgctgtccaacagaggttccttctatctgatggccaaggaagccggcattgaaaatgtgaatcacacagagctctagcagctggttccgtggctggcggactataagaacagtttctattatttgctttggtttctgtgactgtgctctaggtgcaaagacacatattttgttcccgttgctcaggctggcctcaaactctaaggctccagcaatctctggtctcagccagagacctgtaaaaatagacacttcaaagattatcatgaataatatttaataatagtaaaaaaaaaa

SEQ ID NO: 2788 - DNA, 1234 bp, Rattus norvegicus
  Genbank Accession No. D89375
ggggtagcttcttcagatccgtacagcctgctacaaaaatgggtactgcagaagatgtttttagaaaagatctgaagatcattcatggctaccccatggtctatgcttttgcactgggttgggaaaaaatcgaagagttccagagcagaccatgtgacattgtaatacccacttaccctaaatcaggtactacttggcttagtgaaattgtggacatggttctaaatgatggaaatgttgaaaaatgtaagcgagatgttattacctctaaagttccaatgttggaacaaaatgttcctggagcaagaagatcaggtgttgaactcttgaagaaaactccatcacctcgaattataaagacacatcttccaattgatctactcccaaaatccttctgggataacaagtgcaagatgatttaccttgctagaaatggcaaggatgttgctgtgtcctattatcattttgatctaatgaataatattcagcctcttcctggcacctgggaagaatatctggagaaattcctcgctggaaatgtggcctatggctcatggttcgatcatgttaagagttggtgggaaaagagggaagggcatcccatacttttcttatactatgaagacttgaaaaagaacccgaagaaagaaatcaagaagattgccaactttctagacaagaccttggatgaacataccttggaaaggatcgtccatcacacctcctttgaagtgatgaaggataaccccctggtcaattacacccatctgcccacagaaataatggatcacagcaagtccccattcatgagaaaaggtgttgttggtgactggaaaaattacttcacaatgacccaaagtgagaaatttgatgccatatataagaagaaattgtctggaacaacacttgagttctgcacagatattcagagtgcctaaacttcaacttgaatatatgatttcttgaaatagtagtttgacagggaaatcagatggatttgtgagggagaaataaatgtgcttttaaaacactgattaaatatgccctgcacatccctcagcaggaattattaataattccgaattatctagggacaaggtcttttgtgatcttagttttcaaagggtatgtcttcagattccaaagtgactactgaattaaataaataagttttttttaaaacactgattaaatatgccctgcacatccctcagcaggaattattaataattcc

SEQ ID NO: 2789 - DNA, 1174 bp, Rattus norvegicus
  Genbank Accession No. D90265
ccgcagccttctttgacgatcaccgaaccgtagttgaggccgtgttcctgtgtccgctgctgtgtctggttgtaacctcgccggagctatgtttcgcaaccagtatgacaacgatgtcactgtttggagccctcagggcaggattcatcaaatcgaatatgcaatggaagctgtaaagcaaggctcagcgacagtcggcctgaagtcgaagacacatgcagtgctggtcgcgctgaagagagcacagtcagagcttgccgctcaccagaagaaaattctccacgttgacaaccatattggtatctcaattgcgggtctaactgctgatgccagactgttatgtaactttatgcgccaggagtgtttggattccagatttgtatttgacagaccacttcccgtatctcgccttgtgtctctaattggaagcaagacccagataccaacacagcgatatggccggagaccgtatggtgttgggctgctcattgctggttatgatgacatgggccctcacgttttccaaacctgcccatctgctaactattttgactgcagagctatgtccatcggagcccgttcccagtcagctcgcacttacctggagagacacatgtctgaatttatgcagtgcaatttggatgaactggttaagcatggtcttcgcgccttaagagaaacactccctgcagaacaggacctgaccacaaagaatgtttccattgggattgttggtaaagacttggaatttactatctatgatgatgatgatgtgtctccattcctggatggtcttgaagaaagaccacagagaaaagcacagccttcacaggctgctgatgaacctgcagaaaaagctgatgaaccaatggaacattaagtgataaaggttatgaggacatgaggatgcaggggcatacactggtgacaataatctgtattttaaaccaacagctgtaatgtattgggtggtatgttttagaaatcagtccaactgtgagttttctctaagcagcttcacagaaaccatataatggggtgcattttctttgaaagggtctacataatcattttctaggacgtataggtatctatatcaatgtttttatatgaagaaaataagtgtctttgcagttttaaagacaactgtgaaataaaattgtttcaccacctg

SEQ ID NO: 2790 - DNA, 2749 bp, Rattus norvegicus
  Genbank Accession No. D90401
tcccggtcccgctgcgtgtcccgggcgttcatgcgctcgctttctgccttccagaaggggaactgccctctagggagacgttccctgcctggggtctccttatgtcagggaccaggttaccctgacagcaggaagatggtcattaacacagtagccgtcttcagtgttcgcttcttccaaaccacggcagtgtgcaagaatgatgtgattacagtccagaccccagcgtttgcagagtctgtcacagagggagatgtcaggtgggagaaagctgttggagatgcagttgcagaagatgaagtggtgtgtgagattgagacagacaagacttctgtgcaggttccatcaccagcaaatggcatcattgaagctcttttggtacccgatgggggcaaagttgaaggaggaactcctctattcacactcaggaaaaccggtgctgctcctgctaaggccaaaccagctgaagcccctgctacagcccacaaagcagcgcctgaagcaccggcggcccctcctcctcctgtagcaccagtgcccactcagatgccacctgtgccctcaccctcacaacctccttctagcaaaccagtgtctgcaataaaacccactgctgcccctccactggctgaggcgggagctgctaaaggcctgcgctcagaacatcgggaaaagatgaacaggatgcggcagcgcatcgcccagcgtctgaaggaagcccagaacacctgcgcaatgctgacgacgttcaatgaggttgacatgagtaacatacaagagatgagagctcggcacaaagatgctttcctgaaaaaacataacctgaaattaggcctcatgtcggcatttgtgaaggcctcagcattcgccttgcaggagcagcctgtagtaaacgcagtgattgatgacgcaaccaaggaggtggtgtacagagattatattgacatcagtgtcgcagttgctaccccaaggggtctcgtggttcctgtcatcaggaatgtggaaactatgaattatgcagatattgaacggaccattaatgaactaggagagaaggcccggaagaatgaacttgccatcgaagacatggatgggggcaccttcaccatcagcaatggaggagttttcggctcacttttcggaacacccattatcaacccgcctcagtctgccattctgggcatgcatggcatcttcgacaggcctgtggctgtggggggcaaggtggaagtccgacctatgatgtatgtagccctgacctacgaccaccggctgattgatggcagagaggctgtgactttcctccgaaaaatcaaggcagcagtagaagatccagcagtcctcctcctagacctttaggaggaagccacacatgcctacctactgatcatgcaggaatgaaaaaccagtcttctagcccgtgcaacctcctcagtccaggttaactgagggcaggcaggcactaccattggcctcgagcaaggactccagggcactacgtaaccaggcctagggcatcagtcctttcatgggtctttttatgctccttctggctcttcctctctcctgtgctcttccttctgctctcttggcctgacagagagagagagagagagagagagagagagagagagagagagagagagagcctgtgaatgcccatcaatagtcctgcctttattccagtcctctacaaagacacctttgcttctctccagtaacagtatgctatagggaataccaccagggaccatgtgattgagtttcttgtctttggaaagtgttctcccaaagatgcctagggggaagctttgctccggggctcaaagcagcctgtgtcgcagctgttcttggtctcacttgatgccccctgtgtgggtattgaagataggcaaagcggggctacctcatcctaacctgtcagcggcttcaaggtgcctctctacctctgacaggagcacaggctggaggatttagggataggcacaattgtgctgggtccctgaggctacctgtgtagtgcacagatgggagtgaaacttggcttgccctttacagggctccattgtatgctggcactgggaagattcatgttgtcataactacgtacaactgttgtccatcataccaaccctttccagcttctaggaatcattctaggacggtgttctcacgtaaagcagattttagcatatcatggcagtgggacacctggtgaacggactgttctcaccagatcaggctgatgagaccttttaaattcaaggtggtacgagcatgtgctggggtagggcctgttctctcccaacctgggatgtggcctgtggggagcaaggccttggttcctctggtgttggacacagataaggggaggatggactgtggcgggaaccagcctcaggagttaggagagtgaagagataatgacgtcatcgctacactcacccttcaggggataggtggtagttagaatatttttgaagcatggtgaaatgtaattaactggttatgaaagctcctagcccttgtgtccttcactgagcctgagactgctgacagctgacatggggccattagtgctgaatgcccttttttcttgtaatccaagacttcctgggggaagaggggaagaggtcagtattgagtgcctgcaacatctgctacgtatagctataccattcagaacttgtaatgaaaatatttaaagagactgattttgaatgaaaattaaagggcaaatgttctcaaa

SEQ ID NO: 2791 - DNA, 487 bp, Rattus norvegicus
  Genbank Accession No. E01534
tttttcccagcagccgccaagatggccgaagtggagcagaagaaaaagcgaaccttccgcaagttcacctaccgtggcgtggacctcgaccagctgctggacatgtcctatgagcagctgatgcagttgtacagcgcccggcagagacggcgcctgaaccgaggcctgcggaggaagcagcactcactgctcaagcgcttgaggaaggccaagaaggaggcgccacccatggagaagccggaggtcgtgaagacccaccttagggacatgatcattctgcccgagatggtcggcagcatggtgggtgtgtacaacggcaagaccttcaaccaggtggagatcaaacccgagatgatcggccactacctgggcgagttctccatcacctacaagcctgtgaagcacggccggcccggcattggtgccacccactcctcccgatttatccccctcaagtagtggggacaataaagactcgttttcagcc

SEQ ID NO: 2792 - DNA, 279 bp, Rattus norvegicus
  Genbank Accession No. E13573
atgtgcccgtgtccccggcatcgcggccgcgggcccccggccgtgtgcggttgcggcgacgctcgccccgggctgcgctgggcggcggcgcaggtgaccgcgctgcggctgcaggcgctgggcgacgagctgcaccgacgcgccatgaggcgtcgcgcgcggccccgggacccgctgcccgcgctgctgcccgcgctccgcgcccgctggccctggctgtgcgcggccgcgcaggtggcggcgctggcggcctggctgctcggcaggcggagcgcgtag

SEQ ID NO: 2793 - DNA, 313 bp, Rattus norvegicus
  Genbank Accession No. H31078
  misc_feature (1)..(313): n = a or c or g or t
agacaggactcttctactttatttgagttatttcaaatgacagttacaaaagcttttaatttttataatactcttcataagaaaataaaatttaaataaaaatacattctcaacaatacaacatggttacacaaattcactatattacgttctgataacttacattttcaaacgaagacactgtaaaanccagtattaactagcaacatattaattcccaagttaaaaatggaagcaggtaacatcaaccatgatcagtcatttaactctggaatgngtctngcatttgtcacagatgtgagggccactggga

SEQ ID NO: 2794 - DNA, 355 bp, Rattus norvegicus
  Genbank Accession No. H31144
  misc_feature (1)..(355): n = a or c or g or t
gacgtaaaatagaaacagactttatttctctggaagaagcagatatccatggctgggacanagctttggcaacanaggcgatgggaacacatcaaatggacacaggggaggaacaggcatcaaacaggacaagtactggtgccgctggggtctccctccacacccggggcctggggccctggtccctgccagagaagatcctggcgcctcttctgtttctnagccacttcaggctgtttacanttacaagatctaagaccagccaagcccgagttcacagtgaagccacaggtcacattctgtccaacactccacattcctacaggggttccctgggaaaagggggcctggtcct

SEQ ID NO: 2795 - DNA, 278 bp, Rattus norvegicus
  Genbank Accession No. H31232
  misc_feature (1)..(278): n = a or c or g or t
gcaggcagaacaatgcaggctgcttttattggagcagaagggaatggaggagacaagacaggaggtgggggaggggaagggaggagaagagaggagaggagggtctcctaggctgcggaagggaatcggtttgcaagggcaggcagcagactgtnatgttggtcactttttccactctttcttctcgtaatcccagtgggcagacaggccctgtatggggttgctcttcatgtccaggaggcgctggagctgctgggctttccgttcttccgtcaggg

SEQ ID NO: 2796 - DNA, 403 bp, Rattus norvegicus
  Genbank Accession No. H31287
  misc_feature (1)..(403): n = a or c or g or t
ctttgctgttcacagacctagaacagggcttgtaatccagacagcatcaccccactgtgcacaggaatgcatgaagcacaatggctgtttcttcctccagaaaggcacttacagtttagcttggcccaaaaaggcaggcgaaactgagacaccagtactcaactcacaccttggagctgaagggccagttaaggtggctctagccatacagccccacctncccttcctctgnctnctccagctgtggcccatctggggacaacctgggtccatctcccttcggtcagaccgtgggaggagagacttgggctgcaatcctncctcaaccaggggatgtagcaaggattccccaggggncacaaagtcgctctgaaaggcttcccctggcggaggaggacagcgg

SEQ ID NO: 2797 - DNA, 330 bp, Rattus norvegicus
  Genbank Accession No. H31508
  misc_feature (1)..(330): n = a or c or g or t
ttttagtatattacccaattagtgagtgtttgtatttnctctaaatgttttattgatactgacttttcaggacagaaggtaccctgtatcctctttatgactgacctaggataggntctgacgatctgtgctgtgtgcacattctcaccgagcacacactcagtgggcagcaggctgtgtgcgagaacgcctgtaagtggttggccagctcattcaggtgaccagcctttgctggtttattttcataagaactaaggagaaaactcaaatctcaattatgantgtggggattgccccccctttttaggtaaaataacttaattggcgttt

SEQ ID NO: 2798 - DNA, 440 bp, Rattus norvegicus
  Genbank Accession No. H31707
acagtcatgacattatttatttacaagcacagatgaatccctgacctctcccaagacagtgaccctacctcagcccagttcaatacttcaactggaagtaaagccggaaggaggaattcagggatgcacagggttaggggaacatatcccatattaaatagttatatatatacacaacagttcctgtagttctgtacagagcagtggctgaccccaccccacgggacccgaaatgtggggagaagagactgagggtgttgaggccggagccagcccctggtgaagtgcaatagcagcagcaaggtcctaacggtacacaagagggaggggaacaccccctcccactttccacccccaccctgccctgggaatgtactgagggacaggaatggttctcaaagagcacatacaggaaggacatggctagaaccatctttagg

SEQ ID NO: 2799 - DNA, 518 bp, Rattus norvegicus
  Genbank Accession No. H31802
  misc_feature (1)..(518): n = a or c or g or t
agattaaatgagtttattctcaccgatagccaaaggagctttagagacaaacagtgtgctgtnccagagggagctaacagaagcgtttataaaggtagatgccaaaggtgcccattaaaattatctacggaattcatagctgggcaggaaaattggttttctccccttacttttttttttttaaggtttatttatttaatgatttaaagtatatgagtacactgcagctgtcttcagacacaccagaagagggcactagatctcattacagatggttgtgagccaccatgtggttgctgagaactgaactcaggacctatggaagagcagtcagtgttcttaaccactgagccatctctccagcttgcccaccccaccccccacccccgttgtttctttttcctgtgtataataatgaaaagatcacttactctagtcacataacaatgatggagtttacaaaatcagagagcagggacaccattatctttctctgatctcaccagcaggccactaag

SEQ ID NO: 2800 - DNA, 438 bp, Rattus norvegicus
  Genbank Accession No. H31813
  misc_feature (1)..(438): n = a or c or g or t
ggcttcaatggattttattagccttctttcatgtactgactgggtataggaggccttccagaggaagaggcctgcaagtnagaggctcaggagaagccaaatcactgacacccagagctggttagggtgggatggacaagatctgagcgattcctcttctggaggagggaacgaacagtgctgctgaggcatgtnacccacccagccagacactcttcacagaacagttctggagggtgtggtgaaggatgtcctgctccatgcagggatgggtgtcannngaggaagggaggagtttatcagaaggcaagaggaagtaacaaactgagaggagcggaggaggaggaaagcagttaagctgccttcgtctgcaagcctccaggatggcacggaagatggctgcagccgcgacttctccaggatctggctgatctagtt

SEQ ID NO: 2801 - DNA, 421 bp, Rattus norvegicus
  Genbank Accession No. H31847
  misc_feature (1)..(421): n = a or c or g or t
gcagagantaaatactttattaactgattacagttgaaagtcatgancaaaaaggagtatattaaggcagagccatatatatacatacatatatatagatatatatatgtgtataaccaactgcaaagccggttctctctccacgttcacaacctctgcatcggtcgccctcaggcggtgtgctttctttctcttgattaaaggngcctcttggccactggttctggtccatttgatggtggctcatgggtcacggagtgcgcgactgtgagtttctcagnacatcgcaggcgtcaccacacagctgttggttggtgtgcgaaatctgacaactgaccagtcttcttcagaaaaacatggtatctttaaaagtgattggaatagtcttacctgaaaaaagtgtagacttctgagtcaatca

SEQ ID NO: 2802 - DNA, 373 bp, Rattus norvegicus
  Genbank Accession No. H31897
  misc_feature (1)..(373): n = a or c or g or t
aattggaattcactttaataatttttaagtgacatatggcactgtaaggncaggaaggaaaaagtcacaaagtccacaaactcgtgaaggtgtcagctcaaaaggctagaagtcactgcactgttggntcgacgctcacagtaaacgttttgtaacgaaggcatgttgaatttagtgtcattcattacagagcagagggtgtttctcttatttggtcacgtgtttttcacttaagaaatattttaaaaatggtattcactttttatttcaacacgttcactgggcatctccaaaaccagcagcttctcaaangaaatcaaccagggttgtaaacataagatacaaggttctgactcccgacactcaggtttcg

SEQ ID NO: 2803 - DNA, 336 bp, Rattus norvegicus
  Genbank Accession No. H31907
  misc_feature (1)..(336): n = a or c or g or t
gcggctctgaaatggtttattgttgagttctgaaaacacatgtgggaacagggcaagtccaaccaagactacccttggtgtaacattnccggtccccaccagcagacatcaacatgttcttctgtgtcaaagaggagattccctgagtaaaggcatttccttaaagaatgtccaggcttcagtggctgtcctgggtggagatggctcttgctggctttcaggctagggcactacccatgacttcagagaaaccacttggtgttacaggcctcacctgctgagcttcctgcagtccaggctggatccctttccaggccagagacttctctaatttgg

SEQ ID NO: 2804 - DNA, 349 bp, Rattus norvegicus
  Genbank Accession No. H31976
  misc_feature (1)..(349): n = a or c or g or t
gtgttgggntgtttattaacaaagtgagcaaggggcttcaaggactggtggatccaggacgcttctttttcttccttctttggagagcaccttgtttctggtccaaatnagggagctttcgcttggcagctgcctccaaagacgcccaaagttcatctgtctctgtgtcttctgggggcactaggttgggctcttgaggttcttggggctcatcctcccagttatcccggcctgacaggagaaggcagttcagttgagacttgagataaaccttatgctctagccctcgtggattgcggatcctgtgtatcctcaggactctgtctaagccacaagatgctaacagggg

SEQ ID NO: 2805 - DNA, 341 bp, Rattus norvegicus
  Genbank Accession No. H32189
  misc_feature (1)..(341): n = a or c or g or t
cagaaccatgcctatnatactgggatactggaacgtccgcgggctgacacacccgatccgcctgctcctggaatacacagactcaagctatgaggagaagagatacgccatggggacgctcccgactatgacagaagccagtggctgantgagaagttcaaactgggcctggacttccccaatgtggagagacagaggaggagcggattcgtgcagacattgtggagaaccaggtcatggacaaccgcatgcagctcatcatgctttgttacaaccccgactttgagaagcagaagccagagttcttgaagaccatccctgagaagatgaagctctactct

SEQ ID NO: 2806 - DNA, 437 bp, Rattus norvegicus
  Genbank Accession No. H32867
  misc_feature (1)..(437): n = a or c or g or t
gctgattggcctctacgtctttaagcgcttccccaccagcatgattggcgtgggccttttcaccaacctggtctactttggccttctccagaccttccccttcatcatgctgacatcacctaacttcatcctgtcatgcgggctagtggtggtgaaccattacctggcatttnanttttttgcggaagaatattatcctttctctgaggtcctggcctacttcacattctgcctgtggataatcccgtttgctttcttcgtgtcactctcggctggggagaatgtcctgccctccaccatgcagccaggcgatgacgtggtctccaattacttcaccaaaggcaagcgaaggcaagcgcttaggcatcctggttgttttctccttcatcaaagaggccatcctacccagtcggcagaagatatactgaccctttggg

SEQ ID NO: 2807 - DNA, 396 bp, Rattus norvegicus
  Genbank Accession No. H32977
  misc_feature (1)..(396): n = a or c or g or t
aaaggtttggcactttattaaataagcnccaaaattacatacaaatcaaaagagtaagaaaaataaacactcagcaaaatgtctctnggtagcatccagcaccactgcagttaaagtatggcatagctgtggtatcaccatgctcgctctccccgtccccaaggatggcaggacagggacatcagctttccaaaccaaactgtcatcattcattgctatccctttctttaccatttaacatacagngaacacacttcaatggaatagactaataagccaagagctttattgatgcagcaggcactttacaatggancccaagagagcctgccttctctgagaagacaggatgtctgtacaaactctcatcaggttttttccacttcagaacccaag

SEQ ID NO: 2808 - DNA, 361 bp, Rattus norvegicus
  Genbank Accession No. H33084
  misc_feature (1)..(361): n = a or c or g or t
cacactgagcaccgcagctcctgacagantgtccacccagcagcagggntcgcacttactcccactcaggtttcctaagaccacgttccatggcaggttccaaatagcgtgggccaaccaagtgcaggtgcaaataatcacaggtcggcattggcgtggacaaaggttaaaaggacacagcaagagctgcgtggctcagattcgccagcaggggtgaaggcagccttcctcccaaaggaggctggacagtntgggcagggaaggccacaaagcacagaccgggcaggcaggtgccacttcagctaggcaagcagattaaacacctcantggtgggggatatcctgagggcaagcaccattt

SEQ ID NO: 2809 - DNA, 347 bp, Rattus norvegicus
  Genbank Accession No. H33086
  misc_feature (1)..(347): n = a or c or g or t
gggaaagggttctncattgcacatttaatagttcatgcagcacttggtgacataaataggggatgggggaacagggccacagaatccacagatagtccacagtgcaggcaagacacacatggccagggccacacagcagggagctgatggtcagctggaagggtcacctagacgtgcacagcggggcagacaaaggttgntcacactgtctcatgacatgctggtcatccagaggacactgagcagttntggacactcatgtggccctcgggcctggctggctcatatcacagtccactgttgatggtttagggatgtggggtcaagcctggtttcaatacattatc

SEQ ID NO: 2810 - DNA, 351 bp, Rattus norvegicus
  Genbank Accession No. H33101
  misc_feature (1)..(351): n = a or c or g or t
cggagctggggactgaacccagggccttgtgcttgcnaggcaagcgctctaccactgagctaaatccccaacccctagagcagacactcttaagtggcacagtggtaaccgggctcctagagtgtcagaaccctgacatctttcttttcagagacagagggggccggatggaggggaagcagcctctgctccttaccttactctgcaacactgagaaaccagaaaaaaagacctgggactatattaagactcccaaagtaaaactatatggaagtgtttattttttaaagtctagtaccagagaacaggacagacatgacagttactactcacaaggggcagtgtcccact

SEQ ID NO: 2811 - DNA, 345 bp, Rattus norvegicus
  Genbank Accession No. H33149
  misc_feature (1)..(345): n = a or c or g or t
aatttaaaattatgcttttattaacattggaacagctcttttatatttatagtcttgacaccaaggtaatttaaagagcatttggtcgttgaggaaggcataagtngtagtatgcatccttgttccaaaagtctggacccttccatccacaccagcccttttccaatataacttgcaggncttcagcacctgtatagtgtgggtctagaattaggaatttgatctgccctgtagtttcattccatgcgactcctagtattgtgtgagccaatactcctcccccaatcattactgggagtgnccacatttctgggaaatgggttggctagttcccggtccttgagg

SEQ ID NO: 2812 - DNA, 283 bp, Rattus norvegicus
  Genbank Accession No. H33528
  misc_feature (1)..(283): n = a or c or g or t
cccaaatctaaaactacctttatttgtggctggctcagcataagtngccttcatcagtgagcagaattataaaactgtacaagaggtaaaaaaataggccgtttaacttagtgaccctcatatcatgagctttgaaaatacacataaaattgtacaatctggcagtttataaaatataaagctaaaaagaatattttagttcccacaaagaggagtgaatcacacaatcagcacatatccattaaacanttaactgtccacagagaagacacatggcacaaga

SEQ ID NO: 2813 - DNA, 378 bp, Rattus norvegicus
  Genbank Accession No. H33629
  misc_feature (1)..(378): n = a or c or g or t
gagcaaacttgtatcagtttatttacaattgtaatttataaacagtaacacaaacatctttacattaatattatgaaaaaagtcccatagctgagatggttgaaaaatgagacttcaggacatttcaaagagggtgtcaagaaaatggaagaaatgaaatacaacagtttgggagaagagttataaatatcangtacctcacagggtgcaatctcatgcaaatgtcttcaaccactcaaatacactgtttttatttagatatcagantagagtncttttaattatgttatcttttatncacttgatttccattatgcaaattaaaacactggctactagtggggtacacctagatacttctatcaaccaaccccttgg

SEQ ID NO: 2814 - DNA, 328 bp, Rattus norvegicus
  Genbank Accession No. H34243
  misc_feature (1)..(328): n = a or c or g or t
gtaattttctttgctggataatgctggccacattctgatctgtgtcactaaatttntnacggtgttactcgaaacattttgactatttgantgtactgagatgtcagaaaacaaaacaaggaagagaaatattgttaattaaaatatgctgctgccaaggaagctgcaagtcgaagcaaggactctgtaacccacgagatccaaatgctgcttgcatttcacagtagttaaccatgttaaagagagaatgctttaaaaatagactgttttaaagcccgccgtgcgcagtccatcttgatgttactaaagactgtgttccaaacgtctg

SEQ ID NO: 2815 - DNA, 770 bp, Rattus norvegicus
  Genbank Accession No. J00696
  misc_feature (1)..(770): n = a or c or g or t
nctcttcctgggccggtgcctctgagtgtcttcggcatggcgctgcacatggttcttgtcgttttgagcctcctgcccttgttggaagctcagaacccagaacctgccaacatcaccctaggcatacctattaccaatgagaccctgaaatggctctcagacaaatggttttacatgggagcagctttccgagaccccgtgttcaagcaggcagttcaaacgatacagacggaatatttttaccttacccccaacttgataaacgacacaattgaacttcgggagtttcagaccacagacgaccagtgtgtctataacttcacccatctaggagtccagagagagaatgggaccttatccaagtgtgcaggagcagtgaaaatctttgcccatttgatagtgctgaagaaacatgggaccttcatgcttgcctttaacctgacagatgagaaccgggggctgtccttctatgctaaaaagccagacttgtccccagagctgcggaaaatattccagcaggctgtcaaagatgtgggcatggatgaatcagaaatcgtatttgtcgactggacaaaggataagtgcagtgagcagcagaagcagcagctggagctggagaaggagactaagaaggagaccaagaaggatccttaggccaagcatgaactcagctctctgaactccggggactgtccccatgcccactctacccccactcctgtgcacctcgattctattttccacaataataaaggtttggttaaacaatc

SEQ ID NO: 2816 - DNA, 1574 bp, Rattus norvegicus
  Genbank Accession No. J00703
acaacttcaaagcaaatgaagttcgttctgctgctttccctcattgggttctgctgggctcaatatgacccacacactgcggatgggaggactgctattgtccacctgttcgagtggcgctgggctgatattgccaaggaatgtgagcggtacttagcacctaagggatttggaggggtgcaggtctctccacccaatgaaaatattataattaataatccatcaaggccttggtgggaaagatatcaaccaatcagctacaaaatttgctcaaggtctggaaatgaaaatgaattcaaagacatggtgacgaggtgcaacaatgttggtgtccggatttatgtggatgctgtcattaatcacatgtgtggctcgggcaatagtgcaggaacacacagtacctgtggaagttacttcaatcctaataacagggaattctcagcagttccatactctgcttggtattttaacgataataaatgtaatggagaaattaataactacaatgatgccaatcaggtcagaaattgtcgtctgtctggccttctggatcttgcactcgataaagattatgttcgaaccaaggtggctgactatatgaacaatctcattgacattggtgtagcagggttcagacttgatgctgctaagcacatgtggcctggagacataaaggcagttttggacaaactacataatctaaatacaaaatggttctcccaaggaagcagacctttcattttccaagaggtcattgatcttggtggtgaagcaattaaaggtagtgagtactttggaaatggccgcgtgacagaattcaagtatggtgcaaaacttggcacagttattcgcaaatggaatggagagaagatgtcttacttaaagaactggggagaaggttggggttttgtgcctactgacagagcccttgtgtttgtggacaaccatgacaatcagcgaggacatggtgctggaggagcatccatcctgacattctgggatgctagaatgtataaaatggcagttggatttatgttggctcatccttatggattcaccagagtaatgtcaagttaccgaaggacaagaaatttccagaatggaaaagatgtgaatgactggattggaccacctaataacaatggagtaacaaaagaagtgaccattaatccagacactacttgtggcaatgactgggtctgtgaacatcgatggcgtcaaatcaggaacatggttgccttcaggaatgtagtcaacggtcagccttttgcaaactggtgggataatggcagcaaccaagtggcttttagcagaggaaacagaggattcattgtctttaacaatgatgactgggctttgtcaagcactctacagactggtcttcctgctggcacatactgtgatgtcatttcaggagataaagtcaatggcaattgcactggacttaaagtaaatgttggcagtgatggcaaagctcacttctctattagtaactctgctgaagacccattcattgcaatccatgccgactcaaagttgtaagagtcaaattaaagagatttagattcagcacc

SEQ ID NO: 2817 - DNA, 1069 bp, Rattus norvegicus
  Genbank Accession No. J00705
actggccaatcacaactgggaagatgaaggctctgtgggccctgctgttggtcccattgctgacaggatgcctggccgagggagagctggaggtgacagatcagctcccagggcaaagcgaccaaccctgggagcaggccctgaaccgcttctgggattacctgcgctgggtgcagacgctttctgaccaggtccaggaagagctgcagagctcccaagtcacacaggaactgacggtactgatggaggacactatgacggaagtaaaggcatacaaaaaggagctggaggaacagctgggcccagtggcggaggagacacgggccaggctggctaaagaggtgcaggcgacacaggcccgtctgggagctgacatggaggatctacgcaaccgactcgggcagtaccgcaacgaggtaaacaccatgctgggccagagcacagatgagctgcggtcgcgcctctccacacacctgcgcaagatgcgcaagcgcctgatgcgggatgcggatgatctgcagaagcgcctggcggtgtacaaggccggggcacaggagggcgccgagcgcggtgtgagtgctatccgtgagcgcctggggccactggtggagcagggtcgtcagcgcacagccaacctgcgctggcgccgcccagccccgcgcgatcgcgcccaggctttgagtgaccgcatccgagggcggctggaggaagtgggcaaccaggcccgagaccgcctagaggaggtgcgtgagcagatggaggaggtgcgctccaagatggaggagcagacccagcagatacgcctgcaggccgagatcttccaggcccgcatcaagggctggttcgagccgctagtggaagacatgcagcgccagtgggcaaacctaatggagaagatacaggcctctgtggctaccaactccattgcctccaccacagtgccctggagaaatcaatgatcatccctcacctacgccctgccgcaacatccatgaccagctaggtggccctgtcccaagcaccactctggccctctggtggcccttgcttaataaagattctccaagca

SEQ ID NO: 2818 - DNA, 1567 bp, Rattus norvegicus
  Genbank Accession No. J00719
ttgctcctccttgctctcctcgtgggcttcttgttactcttagtcaggggacacccaaagtcccgtggcaacttcccaccaggacctcgtccccttcccctcttggggaacctcctgcagttggacagagggggcctcctcaattccttcatgcagcttcgagaaaaatatggagatgtgttcacagtacacctgggaccaaggcctgtggtcatgctatgtgggacagacaccataaaggaggctctggtgggccaagctgaggatttctctggtcggggaacaatcgctgtgattgagccaatcttcaaggaatatggtgtgatctttgccaatggggaacgctggaaggcccttcggcgattctctctggctaccatgagagactttgggatgggaaagaggagtgtggaagaacggattcaggaggaagcccaatgtttggtggaggaactgcggaaatcccagggagccccactggatcccaccttcctcttccagtgcatcacagccaacatcatctgctccattgtgtttggagagcgctttgactacacagaccgccagttcctgcgcctgttggagctgttctaccggaccttttccctcctaagttcattctccagccaggtgtttgagttcttctctgggttcctgaaatactttcctggtgcccacagacaaatctccaaaaacctccaggaaatcctcgattacattggccatattgtggagaagcacagggccaccttagacccaagcgctccacgagacttcatcgacacttaccttctgcgcatggagaaggagaagtcgaaccaccacacagagttccatcatgagaacctcatgatctccctgctctctctcttctttgctggcactgagaccagcagcaccacactccgctatggtttcctgctgatgctcaagtacccccatgtcgcagagaaagtccaaaaggagattgatcaggtgatcggctcacaccggctaccaacccttgatgaccgcagtaaaatgccatacactgatgcagttatccacgagattcagaggttttcagatcttgtccctattggagtaccacacagagtcaccaaagacaccatgttccgagggtacctgcttcccaagaacactgaagtgtaccccatcctgagttcagctctccatgacccacagtactttgaccacccagacagcttcaatcctgaacacttcctggatgccaatggggcactgaaaaagagtgaagctttcatgcccttctccacaggaaagcgcatttgtcttggcgaaggcattgcccgaaatgaattgttcctcttcttcaccaccatcctccagaacttctctgtgtcaagccatttggctcccaaggacattgacctcacgcccaaggagagtggcattggaaaaatacctccaacgtaccagatctgcttctcagctcggtgatccggctgaggcagccaggtgccccagttctgttgggaatggcctcatgtttctgcctctgggggacctgctgaaaaccaggctccaaggccactgctccacatct

SEQ ID NO: 2819 - DNA, 1003 bp, Rattus norvegicus
  Genbank Accession No. J00738
tgggcaccatcagcagagagattgtcccgacagagaggcaattctattccctaccaacatgaagctgttgctgctgctgctgtgtctgggcctgaccctggtctgtggccatgcagaagaagctagtttcgagagagggaacctcgatgtggacaagctcaatggggattggttttctattgtcgtggcctctgataaaagagaaaagatagaagagaacggcagcatgagagtttttgtgcagcacatcgatgtcttggagaattccttaggcttcacgttccgtattaaggaaaatggagtgtgcacagaattttctttggttgccgacaaaacagcaaaggatggcgaatattttgttgagtatgacggagaaaatacatttactatactgaagacagactatgacaattatgtcatgtttcatctcgttaatgtcaacaacggggaaacattccagctgatggagctctacggcagaacaaaggatctgagttcagacatcaaggaaaagtttgcaaaactatgtgtggcacatggaatcactagggacaatatcattgacctaaccaagactgatcgctgtctccaggcccgaggttgaagaaaggcctgagcctccagattgcagggcaagatctatttcttcatcctttgttctatacaatagagtgcctctctgtccagaagtcaatccaagaagtgcttaatgggttcctttattctttcttcctggattactccgtgctgagtggagacttctcaccaggactccagcattaccatttcctgtccatggagcatcctgagacaaattctgcgatctgatttccatcctgtctcacagaaaagtgcaatcctggtctctccagcatcttccctagttacccaggacaacacatcgagaattaaaagctttcttaaatttctctttgccccactcatgatcattccgcacaaatttcttgctcttgcagtgcaataaatgattacccttgcactt

SEQ ID NO: 2820 - DNA, 312 bp, Rattus norvegicus
  Genbank Accession No. J00797
gggagagattacctcataccatgtcgcttgcaccaatcaccactctcctgtcgcggcttctctgggcagacggaggggtctggaccaacaggaaaggccttggcccatccccatggtgaccggagctgtatataaggggcgcatccggcccaagtgccggcaggttctcttacatcgaccgcttaagagtcgcgctgtaagaagcaacacctcctcctcgcctccgccatccacccggcagccgcgaagcagcaaccatggtgagcaaaccttcccgagttctcaggagcgggtgggtgtcagcccggctca

SEQ ID NO: 2821 - DNA, 6849 bp, Rattus norvegicus
  Genbank Accession No. J01435
  misc_feature (1)..(6849): n = a or c or g or t
ccctcacagtattaagtacccttaccctaccgctttcctcccaactaatcacatagaagtttaggatatacagttcaagagccttcaaagcccttagaaaacaaacaagtttaacttctgataaggactgtaagactatatcttacatctgttaaatgcaaatcaactgctttaattaagctaaatcctcaactagattggaaggattcaaacctacgaaaatttagttaacaactaaataccctacttactggcttcaatctacttctcccgcctatcagaaaagaggcgggagaagccttagtagaggagattctctacaccttccaatttgcaattcgacatgataatcaccttaaggctttttggtaaaaagggggctcaacccctgtctttagatttacagtctaatgcttactcagccattttacctatgttcgtaaacggttgactcttttcaactaaccctaaagatatcggaaccctctacctattatttggagcctgagcaggaatagtagggacagctttaagtattctaattcgagctgaactaggacagctaggcgcactcctaggagatgaccaaatctataatgtcctcgtcacagcccatgcattcgtaataattttctttatagtaatacctataataattggaggcttcggaaactgacttgtaccactaataattggagcccctgatatagcattcccacgaataaataacataagcttttgactgcttcctccatcatttctactccttttagcatcctccatagtagaagctggagctggaacaggatgaacagtatatccccccttagccggaaacctagcccatgctggggtatccgtagatttaactattttttccctccacctagccggggtgtcttctatcttaggagctatcaactttatcaccactatcattaatataaaaccccctgctataacccaatatcagacacctctctttgtatgatccgtactaattacagccgtcctactacttctctcactgccagtattagcagcaggtatcactatactccttacagaccgaaatctaaatactactttcttcgaccccgctggaggcggaggcccaattctttatcaacacctattctgattcttcggccacccagaagtgtacatcttaattcttctagggtttgaaattatttcacatgtagttacctattactctggaaaaaaagaacccttcggatatataggtatggtatgaaccataatatctattggcttcctaggatttattgtatgagcacatcacatattcactgtaggcctggatgtagacacccgagcctactttacatctgccactataattatcgcaattcctacaggcgtaaaagtattcagctgactcgctacactacatggaggaaatatcaaatgatcccccgccatattatgagccttagggtttatcttcttattcacagtagggggcctaacagggatcgtactatctaactcatcccttgacattgtacttcatgatacatactacgtagtagctcacttccactatgtcttatctataggagcagtattcgccatcatagcttgcttcgtccactgattcccactattctcaggctataccctaaatgacacatgagcaaaagccctctttgccattatatttgtaggtgtaaacataacattttttcctcaacacttcctaggattagcagggatacctcgtcgttactctgattatccagatgcttataccacatgaaatacagtctcctctataggctcattcatctcacttacggccgtccttgtaatgatcttcatgatttgagaagccttcgcatcaaaacgagaagtgctctcaatttcctactcttcaactaacctagaatgactgcatggatgccccccaccttaccacacattcgaagaaccttcctatgtaaaagttaaataagaaaggaaggattcgaaccccctacaactggtttcaagccaatttcataaccattatgtctttctcaatgagatattagtaaaataattacataaccttgtcaaggttaagttatagacttaaatctatatatcttacatggcttacccatttcaacttggcttacaagacgccacatcaccaatcatagaagaacttacaaactttcatgaccacaccctaataattgtattcctcatcagctccctagtactttatattatttcactaatactaacaacaaaactaacacacacaagcacaatagacgcccangaagtagaaacaatttgaacaattctcccagctgtcattcttattctaatcgcccttccctccctacgaattctatacataatagacgagattaataacccagttctaacagtaaaaactataggacaccaatgatactgaagctatgaatatactgactatgaagacctatgctttgactcctacataatcccaaccaatgacctaaaactaggtgaacttcgcttattagaagttgataatcgggtagtcttaccaatagaacttccaattcgtatactaatctcatccgaagacgtcctgcactcatgacccatcccttcactagggttaaaaaccgacgcaatccccggccgcctaaaccaagctacagtcacatcaaaccgactaggtctattctatggccaatgctctgaaatttgcggctcaaatcacagcttcatactcattgtactagaaatagtgcctctaaaatatttcgaaaactgatcagcttctataatttaaactcattgcgaagcttagagcgttaaccttttaagttaaagttagagacaacaaatctccacattgacatgccacaactagacacatccacatgatttattacaatcatctcctcaatagccacactatttaatttatttcaattaaaaatttcttcccaaacctttcctgcacctccctcacccaaaactatagccacagaaaaaacgaataacccttgagaatcaaaatgaacgaaaatctatttccctctttcattacccccacaataataggtctaccaattgttgtgaccattattatgttcccatcaattctattcccatcatcagaacgcctaatcagcaaccgactacactcatttcaacactgactaatcaaacttatcatcaaacaaataatgttaattcacacaccaaaaggacgaacctgagccctaataattgtatccctaattatatttatcggctcaaccaaccttctagggcttcttccccatacatttacccctaccactcagctatctataaacctaagcatagccatccccctatgagcaggagccgtaattctaggcttccgacacaaactaaaaaattctttagcccacttcttaccgcaaggaacccccatctcactaattcccatactaatcatcatcgaaactatcagcctatttattcaaccgatagcactagcagtacgactaacagcaaacattacagcaggccatctattaatgcatctaatcggaggagctaccctagtacttatagacatcagcccaccaaccgctacaattacatttattattctacttctacttacagtacttgaatttgtcgtagccttaattcaagcctatgtattcacccttctagtaagcctgtacctacatgataacacataatgacccaccaaacccatgcataccatatagtaaacccaagcccatgaccactaacaggagccctatcagctcttctactcacatccggcttagtaatatgattccattacaactccacaattctcctatcattaggcctcctgacaaacatcctaactatatatcaatgatgacgagatatcatccgtgaaggaacataccaaggccaccacacccctattgtacaaaaaggcctccgatacggaataatcctgtttattgtctccgaagtattcttctttgccggatttttctgagcattttatcattccagcctagttcctacccacgacctaggcggttgctgacccccaacaggaatcacccctttaaatcccctagaagtaccccttctaaatacatcagtcctcttagcatcaggagtctcaattacatgagcccatcacagcctaatagaaggcaaccgaaaccatataaaccaagccctactaatcaccattctcttaggattatatttcactatcttacaagcctcagagtatttcgaaacatcattttctatctcagacggaatttacggctcaacattcttcatagcaacgggatttcatggccttcacgtaattattggctcaactttcctaattgtctgtctactacgacaactaaaattccacttcacatcaaaacatcatttcggatttgaagccgcagcatgatactgacacttcgtagatgtagtttgactattcctatacgtttctatctattgatgaggatcctactcccttagtataaacaatacaactgacttccaatcagttaattctgaaaaaactcagaagagagtaattaacctacccattatcatcacaattaacatcaccttatcttttatcctcatttcaattgcattctgattgcctcaaataaacttatactccgaaaaagcaaacccatatgaatgtggcttcgacccaacaagttctgcacgccttcctttttcaataaaatttttcttagtagccattacatttctactattcgacctagaaatcgccttactacttcccctcccatgagcgattcaaacaaccaataccgctacaataatagcaactgcctttattttagtcactattttagctcttggcctaagctacgaatgaacacaaaaaggactagaatgaacagaataattggtaattagtttaaataaaattaatgatttcgactcattagattatgataataatcataattaccaacaatgacatctgctttcctaaatttaactatagcctttacattatctctactaggtacttttatatttcgctcccacttaatatctactctcctctgcctagaaggaataatactatcactatttgtcataacttcaacatccacattaaactccaactccataatctccataaccatcccaattaccattctagtttttgcagcctgcgaagtagcagtaggtttagccttactagtaaaaatttcaaatacccacggaacagactacgtacaaaacctcaaccttctacaatgttaaaaatcattttcccatctatcatactcctcccactaacatgactctcagccaacaaaaaaatctgaaccaatgtcacctcctacagctttctagtgagcctattaagcttatcactcctatgacaaaatgacgaaaattacctaaatttctcagttatattctcctccgatccattatccaccccactaatcattctaacaacttgactcctcccactaataatgctcgctagccaaaatcacataaaaaaagaaaatataatgcatcaaaaactttacatctcaatacttattagcctccaaattttactcatcataacattctccgcaacagaactaattttattttatatcctgttcgaagccactctaatcccaacactaattatcattacacgatgaggcaaccaaacagaacgcttaaatgcaggaatttatttcctgttttatacactaattggctccatcccactcttaattgccctcatttcaatccaaaactcaataggaacactcaacttcctaatcctctccctcacaacacaccccctaccctcaacatgatccaacaccattctatgactagcatgtataatagcatttataatcaaaataccattatacggagtccatctatgattaccaaaagcccacgtagaagctccaattgcaggctctataattttagcagcaattctcctaaagctagggggttatgggataatacgagtttccatcattctagaccccctaacaaaatctttagcctacccattcatcatcctctcattatgaggcataattataactagctcggtctgcctacgccaaacagatctaaaatcattaattgcttactcatcagtaagccatatagccctagtcatcacagccattataatccagacaccatgaagcttcatgggagctacaatactaataatcgcccacggcttaacctcatcactcttattctgcctagcaaacaccaactacgaacgaattcacagccgaactataattatagctcgaggattacaaataatcttttcattgatagcaacatgatgattattagcaagcttagccaacctagcactaccacccctaattaacctcataggcgagttattcattgttatagcaacattttcctgatcgaacccctctatcatccttatagcaactaacattgtcactacaggaatatactcaatatatatgattatcacaacccaacgaggaaaactaaccagccacataaacaacctccaaccttcccacacacgagaattaacactcatagctctacacattattcccctcatactattaacaatcaaccctaaactcatcacaggcctaacaatatgtagatatagtttacaaaaaacattagactgtgaatctaacaacaggaaatcaaattccttatttaccaagaaagtatgcaagaactgctaattcatgcacccatacctaaaacatatggctttcttacttttataggatagaagtaatccattggtcttaggaaccaaaaaccttggtgcaactccaaataaaagtaata

SEQ ID NO: 2822 - DNA, 1912 bp, Rattus norvegicus
  Genbank Accession No. J01436
ccggtactcctcagtagccatagcagttgtatacccaaatacaaccaacatcccacccaaataaattaaaaatactattaaacctaaaaacgaacccccaaaccctaaaactattaagcacccaatacatccactaacaatcaatccaaacccaccataaataggtgaaggcttcaacgccaaccctagacaaccagtcaaaaacagtaaacttaaaataaacatataatttgtcattatttctacacagcatttaactgtgactaatgacatgaaaaatcatcgttgtaattcaactatagaaacacctaatgacaaatatccgaaaatctcaccccctattcaaaatcatcaaccactcctttatcgacctccccgccccatctaacatctcatcatgatgaaacttcggttctctactaggagtatgcctcatagtacaaatcctcacaggcttattcctagcaatacactacacgtctgataccataacagcattctcatcagtcacccacatctgccgagacgtaaactacggctgactaatccgatacctacacgccaacggcgcctcaatatttttcatctgcctattcctccatgtgggacgaggactatactatggatcctacactttcctagaaacctgaaacattgggatcatcctactatttgcagtcatagcaactgcattcatgggctatgtactcccatgaggacaaatatcattctgaggagctacagtaattacaaacctattatcagctaccccttacattgggactaccctagtcgaatgaatctgaggaggcttctcagtagacaaagcaaccctaacacgcttcttcgcattccacttcatcctcccattcattatcgccgcccttgcaattgtacatcttcttttcctccacgaaacaggatcaaataaccccacaggattaaactccgacgcagacaaaatcccattccatccatattatacaattaaagacctcctaggtgtatttatattactattattcctaataaccctagtactattcttcccagacctactaggagacccagacaattatacacccgctaaccccctcaacaccccaccccacatcaaaccagaatgatattttctctttgcctacgctattctacgctccattcccaacaaactaggaggggtcgtagccctaatcttatcaatcctaatcttagccttcctaccattcctgcatacctcaaaacaacgcagcttaacattccgcccaatcacccaaatcctttactgaatcctagtagccaacctcctagtcttaacatgaatcggaggccaaccagtagaacacccatttatcattattggtcaactagcctccatcagctatttttcaattatcctcattctcataccaatctctggaattgttgaagacaaaatgttaaaatgaaattaatgtcccgatagtataaaaattactctggtcttgtaaaccaaaaatgaagagtcagtcttctcaggacaatcaagaagaaggaactacctccccaccatcaacacccaaagctgatattctacttaaactacttcttgtcagtacataaaatgatatggacattaaaaaacatttatgtatatcgtacattaaattattttcccaagcatataagcatgtaatatatatctaatgatttaggacatagatttaaactcaactataaattcacaacaacatgtctattctcaaatacattagataatgtctattagacatatctgtgttattagacatgcaccattaagtcataaacctttctcttccatatgactatccctgtccccaattggtctctatttctaccatcctccgtgaaatcaacaacccgcccactcgtccccctcttctcgctccgg

SEQ ID NO: 2823 - DNA, 4689 bp, Rattus norvegicus
  Genbank Accession No. J02585
ctgaacacccatccggtgagacaggagggcaggtttccaagcgccgctccgccacacttgatctcagcgctgggaaagtgaagcgagcaaccgacagccacgatgccggcccacatgctccaagagatctccagttcctacacgaccaccactaccatcacagagcctccttccggaaacctgcagaatggacgagagaagatgaagaaggtgcccctctatctggaagaagacatccgtcctgaaatgagagaagatatccacgaccccagctaccaggatgaggaggggcccccgcccaagctggagtacgtctggaggaacatcatcctcatggccctgctgcacgtgggagccctgtacgggatcacactgatcccctcctccaaggtctacaccttgctctgggggatattttactaccttatcagtgccctgggcatcacagccggggctcatcgcttgtggagccacaggacttacaaggctcggctgcccctgaggatcttcctcatcattgccaacaccatggcgttccagaacgatgtatatgaatgggcccgggatcaccgcgcccaccacaagttctctgagacacacgccgaccctcacaactcccgccgtggctttttcttctctcacgtgggttggctgcttgtgcgcaaacacccggctgtcaaagagaagggcggaaagctggacatgtctgacctgaaagctgagaagctggtgatgttccagaggaggtactacaagcctggcctcctgctcatgtgcttcatcctgcccacactggtgccctggtactgctggggcgaaactttcctgcacagcctgttcgtcagcaccttcttgagatacactctggtgctcaacgccacctggctggtgaacagcgctgcccacctctatgggtatcgcccctacgacaagaacattcaatctcgggagaacatcctggtttccctggggtccgtgggcgagggcttccacaactaccatcacgccttcccctacgactactctgccagtgagtaccgctggcacatcaacttcaccacgttcttcatcgactgcatggctgccctgggcctggcttacgaccggaaaaaagtttctaaggccgctgtcttagccaggattaagagaactggagatgggagccacaagagtagctgagttctgggcttctgagttcctgttccaaaagttttctgggcagagatttaatattctgttgattaactactggataatgctatcggaatgttaatgatgcatttaaactattccggtacagtattatgagaaagctttgatcatgttttgaggtaatgcatattttaattagccaggattaaccatgccacaatacatatatatttctaagcatacatgataaatgcatatacaattgtgcacatcagctttaaataataacgatgaatttgaacattctatacagagagtattaaagccaaggaacatgctgttttgatgctagggcaagcatggtgctctttccctgtttgcactgcatccagcttcgttccttcctctgtcatcaccatcttcaggcaaatagctgaccagccactggcctgtgtccaccttccaaagcccaggcaacctttctgctttctgaaatactgatccttcctcctggatatgtctttccttgttctgaactttgagattgctggctcagacttaagatagaacaaaaaccttcctggaagttcccactggtgaacttcactataggttttgccagagggaatagggaaattatcttgattgtagcaagtagatcaccttgagagaagaattagcacgcacggtgtggtttgtaagtaaggatgggagagagctaggaaaaggtggccatatctaatggcctacttaccaagcccccaggcctctctgcataggcatggagtccttccagtccatattctgaacaacagtttttagtgagatttgaataattaaattattttcagagtgaagggaatgggaaatgcatggtctgtgccaggggcggagagtggggaagggttagcttttggtaactgaagatttcttcaatggaaagactcttaatgttaaatgtgcctagaactggtaactaaacagctgacatttggagggaatgtggtgaaaactatgtaaatataagcaaaatccgcacatgaaaatatttcacttagaaaaagtgttgctaaagaaaaaaattcgaaggacaagaggtgttgcctgggttgccagtttctttcgtggcagggcaggaaatagtgaggttgagaggcagcatctgtaagtagatgctaagaggtacatttctaaatgaagcccttggggaacatctgccagggatctagagagtgctggtttcatccattgttttaatttcctccttggattgagtagaaacgtggcttcttgtggtgttgaaccttccccgacttctttgctttgttgccatctagcctgcccagcactgcctagggagcgcctacccaccctgatttcttctgccagctcctacccaccctgatttcttctgccacttctttctttggcattcatttttctttccctggacaggaagctagttacccgagtgtatcaggagcacctggcttgcctttgtccaggcccattcctcctggtatccttgggtgtggaactgctggacagcttcaggaagcagagccaggtgccacttttctgtggctccagatcctccctacctccacccctatgtgcctctgccacagtaatttcagaaaagcttggtacaccctctagcaacatcttggttcagagagtctctctggcttgtgagttaacagctcagccaaatgctgtgttgtctcagtgaggcaaccactgaacgagagggttggttgttgggctgtctctgttggagtcagagtagacaacatgttcacttcttcctgtctgctttgcaaggtgtctgtgactgatcaaggcaggcagggagtggtatagtacttctgaaaggaagaagttccctatttatctgttaaaagaccagaggcatgggcaagtgctcaggacctcacttcgggaagagggtctgcttcctgaaagccagtgtataaggaaaagcttcgactgaacctggtatctaaggtaccatgaactaacactctatcacacagcccagggcaaacagtggtatagaaaagtctagaagaaaacatcacatcagtattttagaaccatccacctttactgtccctgtagcccaatccagagcctggcttttagatctggctgcgtacagtgccaaatgctcagtttacttgtaagatcagagcctttctttctgtgttaattgaacacatgctctgagctgttttgttgaagtagaaaatctagtagaaaatcactgtagatctgatgacctggaaacctctggaaatgccttcgggtggttttatttttccaggtcacagatgcctgatttataagatgaacaatgaaatcagctttctttctcttctgatcttattccctggatttgatgcagcccatgttccaaagcaaagctacatagagacttcaggctgaggtcctggtgtctttaagcaaggacactctttcagatcctctcagaggcgtatttgtaacagtttccacatgaatgtactaatcatgttgggtgccttatcgctttcctaatctacagtgcctgttagcccagcctcactccttcccttaaccctgagatcccgtagatggagcgggtgtagacaagaggctggctggaggatcatcagtacagtgatttgcagaaatcttttatgggcttcattttggaaaaatttgtttttagtaaatgctcaaatttggtgggaagtaatttgaatgtatttgattgtattgtcctcattacaattgttaattagacacgttctacatgacagtagtactcaggggagttttctccctgggctgctaatatctgggtgtaatctctgaaactgtaggtccagtgaggcggcgtgaaaagttagcaaagccaccatctgctggtggtttaagccaaggcctctcttcttcgccactgacttgctatgttatcctttctcttgtaacaaacccatcccagagatgaggcctttaatcatcccaagaacctcctgggctaagtatctgacagtctcacatctcaacatcgtgtattaagtgtccagaacatcagctcaggaggacacgctgaaactctcactctgggcgagtcctgataaaacaggctcctaatactgacctacctcaagggcagttctgaggtgattagagccttttctttttttaagcaagtgtttggagatgcatggcagaggttttcctgcagacttgtaaagagctagatgtgttctaagaccatctttagtctacattgctcttcccagagatctacaactatgacccagccaaagtgcaagcctacctactcactgccataaaaactattcaggaaaccttttcctggcctgaatgagattttgttttttttttttttatgtggggcggttatttgtgacccaagtgtaatttggatgatttttaattaatatcaactcttgaagcctaatatgtactggatttgagattgcatttgttcctaataaaagtggatctagctgtgctgcctgg

SEQ ID NO: 2824 - DNA, 909 bp, Rattus norvegicus
  Genbank Accession No. J02592
tacagcatgggggatgctcccgactatgacagaagccagtggctgagtgagaagttcaaactgggcctggacttccccaatctgccctacttaattgatgggtcacacaagatcacccagagcaatgccatcctgcgctaccttggccggaagcacaacctttgtggggagacagaggaggagaggattcgtgtggacgttttggagaaccaggctatggacacccgcctacagttggccatggtctgctacagccctgactttgagagaaagaagccagagtacttagagggtctccctgagaagatgaagctttactccgaattcctgggcaagcagccatggtttgcagggaacaagattacgtatgtggattttcttgtttacgatgtccttgatcaacaccgtatatttgaacccaagtgcctggacgccttcccaaacctgaaggacttcgtggctcggtttgagggcctgaagaagatatctgactacatgaagagcggccgcttcctctccaagccaatctttgcaaagatggccttttggaacccaaagtagcaccacaaagtccagacctagggatactcatgagtgccctgctggctgtgggcctagagcatggctctggcgcccaccacatgcagctttctcctcctttccattccctgttcctccatctcctcttcccagcccttgcctcagtcaagcctcagttccctggtctctccatttcttcattagtcccctcccttgtctctgccctgcatccaacccttccctcactgattttcggaggactgtaccagacccctgaatccccagcctggcctgagagattagatctcactgtgctgccctggtccccaggaggacccattttatttgcaataaagtgtgaaccacaaa

SEQ ID NO: 2825 - DNA, 1927 bp, Rattus norvegicus
  Genbank Accession No. J02612
gaggaaacccggaattcagatggtggctgagggtggctgactgaaaaacggacttccagatttcttactcttccacaagggccctcatcacgtgcgcaggtctctaaccttactctctgaaaggatggcttgccttcttcctgctgctcgacttcctgcaggctttctcttcttagtgctctggggctcagttctaggtgacaagctgctggtggtcccccaggatggcagccactggcttagcatgaaggagatagtggagcacctcagtgaacgcggacacgacattgtggtgctagtgccagaagtcaatttgcttttgggagaatccaaatactacaggaggaaaagctttccggtcccctacaacctagaagagttacggacccgctatcgctcctttgggaacaaccactttgctgccagttcccccctgatggctcctctaagagagtacaggaacaacatgattgtcattgacatgtgctttttcagctgccagagcctcctgaaggactcggccaccctcagcttcctcagggagaaccagtttgatgctctgttcacagacccggccatgccctgtggtgtgatcctggctgagtatctcaagctgccttccatctacctcttcagaggtttcccatgctctctggagcacattggtcaaagcccaagccccgtatcctatgttcccagattctacaccaaattctcagaccacatgacatttccccaacggctggccaacttcattgctaacatcttggagaactacctttatcattgtctgtactcaaagtatgagatccttgcctcagacctcctcaagagagatgtgtccctacctgccttacaccagaactctctgtggctgttacggtatgattttgtgttcgaatacccccggccagtcatgcccaacatgatcttcattggagggaccaactgcaagaagaaggggaacctgtctcaggaatttgaagcctatgtcaacgcctccggagaacatggcatcgtggttttctctttgggatccatggtctcagagattccagagaagaaagcgatggaaatcgctgaggctttgggcagaattcctcagacgctcctgtggcgctacaccggaactagaccatcgaaccttgcaaagaacactattcttgtcaaatggctaccccaaaacgatctgcttggtcatccaaaggctcgggcgttcatcacacactccggttcccatggtatttatgaaggaatatgcaatggggttccaatggtgatgatgcccttgtttggtgatcagatggacaacgccaagcgcatggaaactcggggagctggggtgaccctgaatgtcctggaaatgactgccgatgatttggaaaacgcccttaaaactgtcatcaataacaagagttacaaggagaacatcatgcgcctctccagccttcacaaggaccgtcctatcgagcctctggacctggctgtgttctgggtggagtacgtgatgaggcacaagggggcgccacacctgcgccccgccgcccacgacctcacctggtaccagtaccactccttggacgtgattggctttctcctggccatcgtgttgacggtggtcttcattgtctataaaagttgtgcctatggctgccggaaatgctttgggggaaagggtcgagtgaagaaatcacacaaatccaagacccactgagaagtggcaggaagtgaaggagaagtattagtcccttatccaatcagttgaaacttggaaacaagtgttaaatccatgttgcttttattagggaaataattcaccatacactatacacccagaacatttttttttctttttctttttttcggagctggggaccgaacccagaacatcttctttttttaaataaaaacaacccaatcgccggcc

SEQ ID NO: 2826 - DNA, 1856 bp, Rattus norvegicus
  Genbank Accession No. J02657
gtctccctgagaaggctgccatggatccagtcctagtcctggtgctcactctctcctctctgcttctcctctcactctggagacagagctttgggagagggaagctccctcctggtccaacacctctcccaatcattggaaacacccttcagatatatatgaaggacatcggccaatcaataaaaaagttttcaaaagtctacggccctatatttactctgtatttgggcatgaagccctttgtggtgttgcatgggtatgaagctgtgaaggaagctcttgttgatctaggagaggaattttctggaagaggcagttttccagtatctgaaagagttaacaagggccttggagtcatttttagcaatgggatgcaatggaaggagatccggcgtttctccatcatgaccctgaggacttttgggatgggcaagaggaccattgaggaccgtattcaagaggaggctcagtgccttgtggaggaactgaggaagagcaaaggtgccccttttgatcccacctttatcctgggctgtgctccctgcaatgtgatatgctccattattttccagaatcgctttgattataaagatccgacttttcttaacttgatgcacagatttaatgaaaacttcaggcttttcagctccccatggctacaggtctgcaatactttccctgccattattgattacttccctggaagtcataaccaagtacttaagaatttcttctatataaaaaactatgttttggagaaagtaaaagaacaccaagagtccttggacaaggacaatcctcgggacttcattgattgtttcttgaacaaaatggaacaggaaaagcacaatccgcagtctgagtttacccttgaaagcttggtggctactgtaactgacatgtttggagctggcacagaaacaacaagtaccactctgaggtatggactcctgctgctgctgaaacacgtggatgtcacagctaaagtccaggaagagatagaacgtgtaattggcagaaaccggagcccctgcatgaaagacaggagccagatgccctacacggatgctgtagtgcatgagatccagagatatattgaccttgtccccacaaacctgcctcatttagtgacacgtgatataaaattcagaaactacttcattcccaagggtaccaatgtgatagtatcgctgtcatccatactgcatgatgacaaagaatttcctaatccagagaagtttgaccctggtcactttctagatgagagaggtaactttaagaagagtgactactttatgccattctcagcaggaaagaggatatgtgcaggagaagccctggctcgcacggagctgtttttgttcttcaccaccattttacagaattttaacctgaagtctctggttgatgtaaaagacattgacacaacaccagctatcagtggatttggccatttgccccctttttacgaggcttgttttattcctgtgcaaagggcagactctctaagctctcatctgtaatgtctcttctgagggtcctgtctacttcattcttggtactatagtagctttaactcacatatccccatttccttcggatccagtgaacatcaaacctcattgagttgagttccctgagtcaatatatagttctattcctgttccctatatcttgtgacgttccctatatcttgtgacattcccatgcagtacttacatagttagtgctaatacttgtatgacttcattactgttaatactgttttcactatataaaagcaaaatattttagaatatgagaattcagagtcatctgttcccttcatgtgctaaataaatactaatttttggacc

SEQ ID NO: 2827 - DNA, 1687 bp, Rattus norvegicus
  Genbank Accession No. J02669
tcaatcctcactggccactatgctggacacaggactgcttctggtggtcatattggcctccctgagcgtcatgctcttggtgtccctctggcagcagaaaatcagggggagattgcctccaggacccactcctttgcctttcattggaaattatctgcagctgaatacaaaagacgtatacagttccatcacacagctcagtgagcgctatggtcctgtgttcaccatccaccttgggcctcgccgggttgtggtgctttatggatacgatgcagtcaaagaggctttggtggaccaagctgaggagttcagtggacgaggcgaacaggctacctacaatacactcttcaaaggctatggcgtggcattcagcagtggggagcgggcaaaacaactcaggcgcctctctatagccacattgagagattttggtgtgggcaagcgtggtgtagaggagcgtatcctggaggaggcaggctatttgatcaagatgttgcagggcacttgtggagcccccattgaccccaccatctacctgagcaaaacagtctccaatgttattagctccattgtcttcggggaacgcttcgactatgaggacacggagttcctgtcactgctgcagatgatgggtcaaatgaacagatttgcagcttcacccacagggcagctctatgacatgttccattcagtgatgaagtacctgcctggaccacagcaacagatcatcaaggttactcagaaactggaagacttcatgatagagaaagtgaggcagaaccatagtaccctggaccccaattccccaaggaacttcattgactcctttctcatccgcatgcaagaggagaaaaatggcaattcagagttccacatgaagaacctagtgatgacaacactaagcctcttctttgctgggtctgagacagtcagctccacactacgctacggcttccttctactcatgaagcatccagatgtggaggccaaggtccatgaggaaattgagcaggtgatcggcaggaaccgacagcctcagtatgaggaccacatgaagatgccctacacccaggctgtgatcaatgagatccaaagattttctaacttggctcccttgggcattcctcgaaggattatcaagaacacaaccttccgtggcttcttcctccccaaggccaccgatgtgttccctatattaggttctctgatgacagacccaaagttcttccctagccccaaagacttcgacccccagaacttcctggatgacaagggacagttgaagaaaaatgctgctttcctccctttctccactgggaagcgattctgcttgggagatggcctggctaagatggagctcttcctgctgctcaccactattttacagaacttccgtttcaagttcccaatgaaactagaagacatcaacgagtcccccaaacccttggggtttaccaggatcataccaaagtacaccatgagcttcatgcccatctgattctgagttgaatcaaggtggggcaagagggagagagagcctgaagtggggccagggtgcaggtggagagaacaggggaggtgaagatgagggttaagaagggaccacacccatggaagaaacacaaaagacttctcactttggtaaaattgtaacagtcctaataaaaagaaagaaatactcagtcgg

SEQ ID NO: 2828 - DNA, 1501 bp, Rattus norvegicus
  Genbank Accession No. J02679
cagggtcgtcctggcaaccagctgctcagccaatcagcgcttgacactacgatccgcccccaacttctggagccatggcggtgagaagagccctgattgtattggcccacgcagagaggacatcattcaactatgccatgaaggaggctgctgtggaggctctgaagaagaaaggatgggaggtggtcgaatctgacctctatgctatgaactttaaccccctcatttccagaaacgacatcacaggggagccgaaggactcggagaactttcagtaccctgttgagtcatctctggcgtataaggaaggccgcctgagcccggatattgtagctgaacagaaaaagctggaagctgcagacctggtgatatttcagttcccattgtattggtttggggtgcccgccattctgaaaggctggtttgagagagtgcttgtagcaggattcgcctacacgtatgccaccatgtatgacaagggtcctttccagaataagaagaccttgctttccatcaccaccgggggcagcggctccatgtactctctgcagggtgtccacggggacatgaacgtcattctctggccaattcagagtggcattctgcgcttctgtggcttccaggtcttagaacctcaactggtgtacagcattggccacaccccacccgatgcccgcgtgcaggtcctggaagggtggaagaagcgtctggagactgtctgggaggagtcaccactctactttgctccaagcagcttgtttgacctaaacttccaggcaggattcttactgaaaaaagaggttcaagaggagcagaaaaagaacaagtttggcctttctgtgggccatcatttgggcaagtccattccagccgacaaccagatcaaagctagaaaataaggttttccataccatgtagttagacccaggtttctttttccccagcttgcctggcttgctttcagttttcgcctttgttccacaaggataggaaaaggaggaggctcgcctcatgcgtttttggatagttctgccacggcgtgtgacagcaaaatgaacgaggtcagattaggggcctcaggtggcctgggatatgaatcagggagaggtgtagccgcgagcggggaaaatactcttctaggtcttttgtacactataagcttttttcttcgggctagcctggctaaatggcatccaatcctccacccacttgttgctattagttacctctctgtggtttagggcaggagggaattgctcaaacaatggctgagggactaacttgtttagcagttagctaaagcctgtttatgatccatcctggtttcaattactgtgcagtgactgacaagcctcgggggattgctctccagctcttctctgccttgtacatagcacacccaggtcctgggaaatgaatacaaaaacaggtctccgcctcattcttgctattctttctttgtgtgtgtgtgtgtggaaataaatggatatttcacacgtca

SEQ ID NO: 2829 - DNA, 1580 bp, Rattus norvegicus
  Genbank Accession No. J02749
ctaatcggtgggacgcacctccgcgatgcatcggctgcaggtagtgctgggccacctggccggccggtccgagtcgagctccgcgctgcaagccgcgccctgctctgcgggcttcccgcaggcctcggcctccgacgtggtggtggtgcacggacagcgcacccccatcggccgcgccggccgcggcggcttcaaggacaccacccccgacgagcttctgtcggccgtgttgaccgcggttctccaggatgtgaagccaaagcctgagtgtctgggagacatctccgtgggcaatgtgcttcagcccggggccggagccgcaatggcacgcatcgcccagttcctgagtggcatcccagagaccgtgcctctgtcagcagtcaacagacagtgttcatcgggactgcaggcagtggccaacattgctggtggcatcagaaatgggtcttacgacattggcatggcctgtggggtggagtccatgaccctgtctgagagaggcaaccctgggaatatttcctcccgtcttctggagaacgagaaggccagagactgcctgattcctatggggataacctcggagaatgtggctgagcggtttggcatctcacggcagaagcaggatgccttcgcgctggcctctcagcagaaggcagcaagcgcccagagcaaaggctgcttccgtgctgagatcgtgcctgtgacaaccactgtcctcgatgacaagggtgacaggaaaaccatcaccgtgtctcaggatgagggtgtccgccccagcaccaccatggagggcctggccaagctgaagcctgccttcaaggatggaggctctaccacggctggaaactccagtcaggtgagtgatggagcagccgccgtcctgctggcccggaggtccaaggctgaagaactgggcctccccatccttggcgtcctgaggtcctatgcagtggtcggggtccctcctgacatcatgggcatcggacctgcctatgccatccctgcggccttgcagaaagcagggctgactgtgaatgacatagacatctttgagatcaatgaggcctttgcaagtcaggccctctactgtgtggagaagctgggaattcctgcagaaaaggtgaaccccctggggggtgcaatagccctgggccaccccctgggctgcaccggagcaaggcaggtggtcacgctgctcaatgagctgaagcgccgaggcagacgggcttatggcgtggtgtccatgtgcatcgggactgggatgggagccgctgctgtctttgaataccctgggaactgaggccctgactgcaggcactacccagagagtcctatagtagtgtctggagagggatggtacagaagccatcttcgtgggacactcagcagtggagggatttgtcacagcactttaatttagaaaatgtaatcgcaatacgggcacaagggcatccaatccactcctctcagttgaaccaaagacagcgcacgtcacacgtgaccacaggacaacatgtttctgagggacagtggcctcatgaatagtgggcatgaggggcatagtaaatgtatgttatctc

SEQ ID NO: 2830 - DNA, 1055 bp, Rattus norvegicus
  Genbank Accession No. J02810
gctgaagcaaattgagaagaccacagcgccagaaccatgcctatgatactgggatactggaacgtccgcgggctgacacacccgatccgcctgctcctggaatacacagactcaagctatgaggagaagagatacgccatgggcgacgctcccgactatgacagaagccagtggctgaatgagaagttcaaactgggcctggacttccccaatctgccctacttaattgatggatcgcgcaagattacccagagcaatgccataatgcgctaccttgcccgcaagcaccacctgtgtggagagacagaggaggagcggattcgtgcagacattgtggagaaccaggtcatggacaaccgcatgcagctcatcatgctttgttacaaccccgactttgagaagcagaagccagagttcttgaagaccatccctgagaagatgaagctctactctgagttcctgggcaagcgaccatggtttgcaggggacaaggtcacctatgtggatttccttgcttatgacattcttgaccagtaccacatttttgagcccaagtgcctggacgccttcccaaacctgaaggacttcctggcccgctttgagggcctgaagaagatctctgcctacatgaagagcagccgctacctctcaacacctatattttcgaagttggcccaatggagtaacaagtaggcccttgctacactggcactcacagggaggacctgtccacattggatcctgcaggcaccctggccttctgcactgtggttctctctccttcctgctcccttctccagctttgtcagccccatctcctcaacctcaccccagtcatgcccacatagtcttcattctccccactttctttcatagtggtccccttctttattgacaccttaacacaacctcacagtccttttctgtgatttgaggtctgccctgaactcagtctccctagacttaccccaaatgtaacactgtctcagtgccagcctgttcctggtgggggagctgccccaggcctgtctcatctttaataaagcctgaaacac

SEQ ID NO: 2831 - DNA, 1639 bp, Rattus norvegicus
  Genbank Accession No. J02827
tccgcggccaagatctggaggccgagccgtggcctgcgccaggctgccctcttgctgttggggcgacctggggctcggggcttggctagattccaccccagcaggcagcagcaacagcagttcccatccctggatgacaagccccagttcccaggggcctctgcagagtttgtagacaagcttgagttcatccagcccaatgtcatctccggcatccccatctaccgcgtcatggaccgacagggccagatcatcaaccccagtgaagatccccacctgccccaggaggaggtcctgaagttgtacaggagcatgacgctgctcaacaccatggaccgcattctctatgagtcccagcgacagggccggatctccttctacatgaccaactatggcgaggaggggacacatgtggggagtgccgctgccctggagcgaacggacctggtgtttggccagtaccgggaggcaggtgtgctcatgtaccgggactacccgctggagctgttcatggcccagtgctacggcaacgtgagtgacccaggcaagggacgccagatgcccgttcactacggctgcaaggagcgtcacttcgtcaccatttcctctccactggctacgcagatccctcaggcggtaggggcagcctatgctgccaagcgggccaatgccaatcagatcgtgatctgttactttggcgagggggcagccagtgaaggggatgcccacgccggtttcaattttgctgccaccttggagtgtcctatcatcttcttctgccggaacaatggctatgccatctccacaccaacctctgagcagtaccgtggggatggcatagcggctcggggccctgggtatggcatcatgtcaatccgtgtggacggcaacgatgtgtttgcggtgtacaatgccactaaggaggcccgacggcgggctgtggctgagaaccagcccttcctcattgaggccatgacctacaggatcgggcaccacagcaccagtgacgacagctctgcgtaccgttcggtggatgaggtcaattactgggacaagcaggaccacccgatctcgagactgaggcagtacctgctgaaccagggttggtgggatgaggaacaggagaaggcctggcggaagcagtcacgaaagaaggtgatggaggcctttgaacaggctgagcggaagctaaagcccaacccaagcctcctcttctccgatgtgtaccaggagatgcctgcccagctgcgcaggcagcaggagtccctggctcggcacctgcagacctacggggagcactaccccctggaccactttgacaagtgaggccctaaccaccacaaggtgtcctgctctgagtggagctggggggcggcaggacgctgccccccgctgctaaccagtgctgctgacgtgctgagcagccagtgtggcacgcactgcggctcccccaggctacttcactggggcaccacatttgcagccattgctgcagctccatcactcccttcacctgttacagtgccttttaggggtggggaggaaccagggccagggcagaccctttggcagggtggccctggatttgctcagagaaatagctgattggcagagtaagtaaaccacagctctgcctttg

SEQ ID NO: 2832 - DNA, 2144 bp, Rattus norvegicus
  Genbank Accession No. J02844
gggagtcgtggttcccatggtacataatggatacggctttttctaccacatcagagatgacaggtttgtggtgacatgttcatcctggaggtcatgtcttgagactgatgcagaaaagttagtggagatgatttttcatgctttccacgatatgatacatctgatgaacacggctcatctttagagactcagagacatacaggtcacagaaactgggtacagagaatgggatggtgatacgacatggaaggaatgttgacttaaaggaaacctgttaatgcagggattagagagggatgcactctagatttattctaccttaaagccttctgttgcaacagcaatgcaaactcagacatagtgaatagaactatgcaatgtcttaagcctcaacaatgcacatctgtatattttaacaatacaaatcctactctaatgttaaaatatttttgttggcacatgtgtaggttgcaagtcctctgtgactataccatggaaaatcaattggctaagtcaattgaagaacgaacattccagtaccaggactctcttccgcccttgcccgttccttcgcttgaagaatcactgaagaagtaccttgagtcagtgaagccatttgcaaatgaagacgaatacaagaaaactgaagaaatagttcaaaagtttcaagatggagttggcaagacattgcatcagaagttacttgaaagggctaaaggaaaaagaaactggctggaagagtggtggctcaatgtcgcctacttggatgtgcgtattccatcacaactgaacgtgaactttgtgggtccgtctccccactttgaacactactggcctgcaagggaaggcactcagttggaaagaggaagcatactactgtggcacaacttgaactactggcagctgctaagaagagaaaaattgcctgtacataaatctggaaatactcctctagacatgaaccaattccggatgctgttttctacctgcaaggttccgggaatcactagagattcgattatgaattattttaagactgagagcgaggggcattgtccgacccacattgccgtgctgtgtcgaggcagagcgtttgtcttcgatgtcctccatgacggttgtttgatcaccccaccagaacttctcagacaactgacatacatctaccagaaatgctggaatgaacctgttgggcccagtatagcggcattaaccagtgaggagcgaactcggtgggcgaaggcaagagaatatctgattggtcttgatccagagaacttgactttattagaaaaaattcaatccagtttatttgtgtattccatagaagacaccagtccacatgcaaccccagaaaatttttctcaggtctttgaaatgcttcttggtggagatccagcagtgcgctggggtgacaagtcctataatctgatttcctttgctaacggaatatttggctgtagctgtgatcatgctccttatgatgcaatgtttatggtgaacattgctcactatgttgatgagaagctcctagagacggaagggagatggaagggttcagaaaaagtccgggatataccgttgccagaggagctggctttcactgtggatgagaagatactgaatgacgtctaccaagccaaagcccaacacctcaaagcagcatctgatttacagatagcagcatctaccttcacatcttttggcaaaaagctcactaagaaggaggcccttcaccctgacacctttattcagctcgctcttcagctcgcctactacagacttcatggacgccccggttgctgctatgaaacagctatgacaagatacttttaccatggccgaacagagactgtgcgatcttgtacagtggaggccgtcagtggtgccagtccatgcaggatccttctgccagtctccttgaacgtcagcaaaagatgttagacgcttttgcaaagcataacaagatgatgagagattgttcccatggaaaaggatttgaccgtcaccttttaggccttttgctcatagcaaaagaggaaggcctccctgttccagaactgtttgaggatccacttttctccagaagtggaggaggtgggaattttgtgctgtcaacaagtctggttggttttaatacttac

SEQ ID NO: 2833 - DNA, 2573 bp, Rattus norvegicus
  Genbank Accession No. J03145
actccgcttgctcctcctcctacaatgtataaccaggcagagctgaggacagctactcatccacattcggaacaggacctggattgagacaacaactccgcacacaacatgtcagaagacaagatcaccggaaccttggctttcactgtcttcactgcagtgctgggttccttccagttcggatatgacatcggtgtgatcaatgcacctcaagaggtaataatatcccattatcgacatgttttgggtgttcctctggatgaccgaagagctaccattaactatgacatcaatggcacagacaccccactcatagtcacaccagcacatacgacaccagacgcctgggaagaagagactgaaggatctgctcacatagtcactatgctctggtctctgtctgtgtccagctttgcagtaggcggaatggtcgcctcgttctttggtgggtggcttggggacaaactcggaaggatcaaagccatgttggctgcaaacagcctctcgttgactggagccctcttgatggggtgttccaaatttggaccggcacatgctctcatcattgctggaagaagcgtatcaggactgtactgtgggctaatttcaggactggttccaatgtacattggcgagattgctccaaccacactcaggggtgccctgggcactcttcaccaactggctcttgtcacaggcattcttattagtcagattgctggcctcagcttcattctgggcaatcaggattactggcacatcctacttggcctatctgctgtaccagctctcttgcagtgtctgctactgctcttctgtccagaaagccccagatacctttacctaaatttggaagaggaagtcagggcaaagaaaagcttgaaaagactaaggggcactgaggacatcaccaaagatattaatgagatgaggaaagaaaaggaagaggcgtcgactgagcagaaggtctccgtgatccagctcttcacggatccgaattatcggcagcccattgtggtggcactgatgctacacttggctcagcagttctctggaatcaatgggatattttactattcaaccagcatttttcagacagctggcatcagccagcctgtgtatgcaaccatcggcgttggtgccatcaacatgatcttcacagctgtctctgtgctgcttgtggagaaggcggggcggcggaccctgttcctggccgggatgattggcatgtttttctgtgccgtcttcatgtcgctgggactggtgttgctggataagttcacctggatgagttatgtgagcatgacggccatcttcctcttcgtcagtttctttgagattgggccaggtccaatcccttggttcatggttgctgaatttttcagccaaggaccccgtcccacggctctggcactggctgcctttagcaactgggtctgcaatttcatcatcgccctctgcttccagtacattgcggacttcctcgggccttacgtgttcttcctttttgctggggtggtcctggtcttcaccctgttcacattttttaaagttccagaaaccaaaggaaagtcttttgacgaaattgctgcagaattccggaagaagagtggttcggccccaccacgcaaagccactgtacaaatggaattcctggggtcatcagagactgtgtgaggatgagctgcctaaaatccaggaacagaccagaagggaaccaggtgctccctcttaactcgaatccttcatgagtgtaggactacacccaggaggatcatttattccttttgaagaatttgtacagactccgattagaaacgtcaacatatatcattaccaaagaaagtatttttttaacttagagaatctattttggatggtaaaactcttcagtaaaccagaggctgctctgcttctctacagggaaagcacgttataagcttcctcgcctggttctactgaaattggagagctttcaacatatcactgctcttaaaagcacgtgactaagaaatctgaagctacaactgatatatatatatttaaatataattccattggaattttcttagccacagatctgatgctgaaggacctatggctggcaaggctcacactcaaactgacgtctctgttacccacctcggtttctctcacatgtactagactttgtgttttgttttaaactatttttctgcatttttatagagaactcctgagtatgttaagctatatttgtaatgaaaagcctcttctttacagctaccaaaatcttcatgtagtgagagaaaacgtttcagtttctttgatgtatattgtaaggttaaacgctcgagtttttcctagccattgagtctagattatcagttaatattagcatctaaaccatgttagttactctccatttcagtcctttgtattgtacttttacttgtttttttttttaattgcccatggcacacacttaaaaccatcaggagtcaggcattttgcatattgcctccaaaatctaataaactggaccaatcacagggaaatctggaataaagagctgctctatttgttcatttttt

SEQ ID NO: 2834 - DNA, 2052 bp, Rattus norvegicus
  Genbank Accession No. J03190
cgggacactttgcagacatggagactgtcgttcgcagatgcccattcttatcccgagtccctcaggcctttctgcagaaggcagggaaatctctgctgttctatgctcaaaactgccccaagatgatggaagtcggggccaagccggctcctcggaccgtgtccacttcagcagcacagtgccagcaggtcaaagaaacccctccagccaatgagaaagagaaaactgccaaagccgcagtccagcaggctcctgacgagtcccagatggcacagactccagacggcacacagctcccgcctggacacccgtcaccctctacaagccagagctctgggagcaagtgccctttcctggcagcacagctagccagacgggcagcagcgtcttccgcaaggccagtctggagcttcaggaggacgtggcaggaaatgcatgctgtgaggacagaggttgctcaaagcccagtgctccccagcttggtcaatgcaaaaagggatggagaaggtccaagcccactgctgaagaacttccaggacatcatgagaaagcaaaggccagaaagagtgtctcatcttcttcaggataacttgcccaaagtcgtttccacttttcaatatgatcatttctttgagaagaaaattgacgagaaaaaaaatgaccacacctaccgagtttttaaaactgtgaaccggagagcacagatctttcccatggcagatgactacacggactccctcatcaccaataatcaggtgtcggtctggtcgagtaacgactatctaggcatgagtcgacacccacgggtgtgtggggccgtcatagagactgtgaaacagcatggtgccggtgcaggtggaactagaaatatttctggaacgagcaagttccatgtggaactggagcaggagctggctgacctccacggcaaggacgcggcgctcttgttctcttcctgcttcgtggccaacgactccactctcttcaccctggctaagatgatgccaggctgtgaaatttactctgattccgggaaccatgcctccatgatccaagggattcgcaacagtcgagtgccaaagtatatcttccgccacaatgatgtcaaccatctcagagaactgttgcagagatccgacccctcggtccccaagatcgtagcattcgaaactgtccattcaatggatggagcagtgtgccccctggaagagctgtgtgatgtggcccatgagtttggagcgatcacgtttgtggacgaggtccatgcagtagggctctatggggcttcaggtggagggatcggtgatcgggatggagtcatgccaaaaatggacatcatttctggaacactcggtaaagcgttcggctgtgttggaggatacattgccagcacgagtttgctgatcgacaccgtccggtcctacgctgcgggcttcatcttcaccacctccctgccaccaatgctgctggctggagccctggagtctgtgcggatcctgaagagcaatgagggacgtgcccttcgccgccagcaccagcgcaatgtcaagcttatgaggcagatgctaatggacgctggcctcccagtcatccactgccccagccacatcatccctgtgcgggttgccgatgctgctaaaaacacagaaatctgtgatgagttgatgaccaggcataatatctacgtccaggccattaattacccaacagtgcctcgtggggaggagctcctccggatcgcccccaccccgcaccacacaccgcagatgatgaactacttcctagagaagctgctgctcacgtggaagcgagtcgggctggaactgaagccacattcgtcagctgaatgcaacttctgcaggaggcccttacacttcgaagtgatgagcgagagagagaaagcctatttctcaggcatgagcaagatggtgtctgcccaggcctgactgtgactcagttattcacaaaccccagaccattaccatacccaaatagtagccagaattgtctttagatgtgaagtaaattatatattaaatcttaatctatagt

SEQ ID NO: 2835 - DNA, 2415 bp, Rattus norvegicus
  Genbank Accession No. J03572
cacggcgctccttagggccaccgctcggcgcgccgggacagaccctccccactcctgcctgcaggatcggaacgtcaattaacggctgacactgccccccacctcttcccacccatctgggctccagcgaggaacggatctcggggtacaccatgatcttgccatttttagtactggccatcggaccctgccttaccaactcatttgtgccagagaaagagaaagaccccagttactggcgacagcaagcccaagagaccttgaaaaatgccctgaaactccaaaaactcaacaccaacgtggccaagaacatcatcatgttcctgggagatggtatgggcgtctccacagtgacagctgcccgcatccttaagggccagctacaccacaacacgggcgaggagacacggctggagatggacaagttcccctttgtggctctctccaagacgtacaacaccaacgctcaggtccccgacagcgcgggcactgccactgcctacttgtgtggcgtgaaggccaacgagggcaccgtgggagtgagcgcggccactgagcgcacgcgatgcaacaccactcaggggaacgaggtcacgtccatcctgcgctgggccaaggatgctgggaagtccgtgggcatcgtgaccaccactcgggtgaaccacgccactcccagtgcagcctatgcgcactcggccgatcgggactggtactcggacaatgagatgcgcccagaggctctgagccagggctgcaaggacatcgcctatcagctaatgcacaacatcaaggacatcgatgtgatcatgggtggtggccggaagtacatgtaccccaagaacagaactgatgtggaatatgaactggatgagaaggccaggggcaccagactggatggcctggacctcatcagcatttggaagagcttcaaacctagacacaagcactcccactatgtctggaaccgcactgaactgctggcccttgacccctccagggtggactacctcttaggtctctttgagcccggggacatgcagtatgagttgaatcggaacaacctgactgacccttccctctcggagatggtggaggtggccctccggatcctgacaaagaatcccaaaggcttcttcttgctagtggaaggaggcaggattgaccacgggcaccatgaaggcaaggccaagcaggcgctgcatgaggccgtggagatggatgaggccatcggaaaggcgggcaccatgacttcccagaaagacacgttgactgtggttactgctgatcactcccacgttttcacgtttggtggctacacccccaggggcaactccatttttggtctggctcccatggtgagcgacacggacaagaagcccttcacagccatcctgtatggcaacgggcctggttacaaggtggtggacggtgaacgggagaacgtctccatggtggattatgctcacaacaactaccaggcccagtccgctgtccccctgcggcacgagacccacggtggggaagatgtggcggtctttgccaagggccctatggctcacctgcttcacggcgtccatgagcagaactacatcccccacgtcatggcgtatgcctcctgcattggagccaaccttgaccactgtgcctgggccagctctgcgagcagcccctccccaggggccctgctgcttccactggctctgttccccctacgcaccctgttctgagggcccaggtcccacaagagcccacaatggacagccggctcccctccctttgtggcctgccacctggccgcccacactcaacggggaggcccaggcaacctcgagcaggaacagaagtttgctacctgcctcacttccgcccggaaccctccgtgggtcggattcctggctctgccgttgtttctctattcactgccttttggccagcagggtgggtttctctcttgggccggcaggacacagactgcgcagattcccaaagcaccttatttttctaccaaatatactctccagaccctgcaaccatcatggaacattccagatctgaccttctctcccctaccccttctctctggaacactgggtcccatagtcacagccagtccctcaacccaaccctccttggagggaagaccaggtctgctcagggtgagactcccaggaagccacctccggggttggctgtctacccagggtggccaggctgggaagaacaacccagccggacaggacgcacacactccccacccagctccagagactcgccaacccttcactgaagcgactcccctgtttggaatagcaaaaaaaaaaagaaagaaaaaaaagaaaaaaattttaatttctctttttggtgttggttaaaagggaacacaagacatttaaataaaatgttccaaataaaaaa

SEQ ID NO: 2836 - DNA, 573 bp, Rattus norvegicus
  Genbank Accession No. J03627
aagactgcagcgcctcagggcccaggtttcaacagattcttcaaaatgccatcccaaatggagcatgccatggaaaccatgatgcttacatttcacaggtttgcaggggaaaaaaactacttgacaaaggaggacctgagagtgctcatggaaagggagttccctgggtttttggaaaatcaaaaggaccctctggctgtggacaaaataatgaaagacctggaccagtgccgagatggaaaagtgggcttccagagctttctatcactagtggcggggctcatcattgcatgcaatgactattttgtagtacacatgaagcagaagaagtaggccaactggagccctggtacccacaccttgatgcgtcctctcccatggggtcaactgaggaatctgccccactgcttcctgtgagcagatcaggacccttaggaaatgtgcaaataacatccaactccaattcgacaagcagagaaagaaaagttaatccaatgacagaggagctttcgagttttatattgtttgcatccggttgccctcaataaagaaagtctttttttttaagttccg

SEQ ID NO: 2837 - DNA, 1444 bp, Rattus norvegicus
  Genbank Accession No. J03863
ccctctagatcaggacgtcgccggggtggctgtgacttggccaagtgctcgcatgagtcaaatgacaaggaagagacttctgccgtggaacccatgccgcaccggccacctttgccaagaccgcctgtgcctttttctctcgcaggtgcggcggggcatacctgtgatcccagcaattgggagactgagacaggaggatccaaccttcaaagctacatgccatggctgcccaggagtccctgcacgtgaagaccccactacgtgacacgatggcattgtccaaagtggccggcactagtgtgttccttaagatggacagctctcagccctctggctccttcaagatccgaggcattgggcatctctgcaagatgaaggcaaaacaaggctgtaaacatttcgtctgctcttcagtcgtccagatttggggttccagaatgaggggcagaagtcactctggagatgagcagccccacgtgaggtcccaggccctccttcctgatacaccctctccactgacagcgggcaacgcgggcatggcgactgcctatgctgccaggaggctgggcctcccagccactattgttgtgccaagcaccacacctgccctcaccattgagcggctgaagaacgaaggggccacagttgaagtggtgggagagatgctggatgaggccatccaactggccaaggctctggaaaagaacaaccaaggttgggtgtacatctcccccttcgatgaccctctcatctgggaaggccacacttcccttgtgaaggagctgaaggagacactgagcgccaagcccggggccattgtgctgtctgtgggcggtggaggcctgctgtgcggagtggtccaggggctgcgggaggtgggctgggaggatgtgcccatcatcgccatggagaccttcggcgcccacagcttccacgctgccgtcaaggaaggaaagctggtcaccctgcccaagatcaccagtgttgccaaggccttgggtgtgaacactgtgggggcacagaccctgaagctgttttacgaacaccccattttctctgaggtcatctcagaccaggaggctgtgactgctatcgagaagttcgtagacgatgagaagatcctggtggagcccgcgtgtggcgctgccctggctgcagtgtacagcggtgtggtgtgcaggctgcaggctgagggccgactgcaaaccccactggcctcgctggttgtcattgtgtgtggtggcagcaacatcagcctggcacagctgcaggcactcaaggcacagctgggcctgaatgagctactcaagtgatatctgctgctgccctggccaccctgaggggtcaccagcacccctgagtaggctgggtgggcgtccgcctgacagtggcccaccctcctttatccatgtttataatatgcactttttcattgtaaataaaa

SEQ ID NO: 2838 - DNA, 1348 bp, Rattus norvegicus
  Genbank Accession No. J03867
tagaacggtgccaccactgtcttcttcgccaccatgggggcccagctgagcacgttgagccgagtggtactctccccggtctggttcgtctacagcctcttcatgaagctgtttcagcgctcctcaccggccatcaccctcgagaaccccgacatcaagtaccctctgcggctcatcgacaaggagattatcagccatgacactcggcgcttccgatttgcactcccttcgccccagcacatcctgggccttcctatcggccagcacatctacctctccaccaggatcgatggcaacttggtcattcgtccctacacccctgtgtctagtgatgatgacaagggccttgtggacttggtggtcaaggtttacttcaaggacacgcatcccaagtttccagctggagggaaaatgtctcagtacctggaaaacatgaatattggagacaccattgaattccggggccccaatgggctactggtctaccagggcaaagggaagttcgccatccgtgcagacaagaagtccaaccctgttgtcaggacggtgaagtctgtaggcatgattgcaggagggacaggcatcaccccaatgctgcaggtgatccgagccgtcttgaaggacccgaacgaccacactgtgtgctatctgctcttcgccaaccagtccgagaaagacatcctgctgcggcctgagctggaggaactgaggaacgaacattcttctcgcttcaagctctggtacacagtggacaaagcccccgatgcctgggactatagccaaggcttcgtgaatgaggagatgatcagggaccatcttccacctcctggggaggagacactgatactgatgtgtggacccccaccgatgatccagtttgcctgtttgccaaacctggagcgtgtgggccatcccaaggagcgatgcttcaccttctgatggctggatgctggccactcccatgcctgctgctcacgcactcaccacaaccaccttccaccccttccttccccactactgtcctttaccctgacatatgcccacatccatgctggggcctgggttcagcctggcctgcccagccctggtcatccagctgtactggcccctgaggggcccctttgggagcaggcctgtgtatcaggtggcttctgttgaccactttctgaataggcttctgtctggtactaactggccattaccagagatggtccatgaccacccctttatacacacacacatacacatacagagacagagagacagagagacagagatagacagagatagacagagagacagatacagacatagagacagagagagaagagagagagaggagagagag

SEQ ID NO: 2839 - DNA, 2799 bp, Rattus norvegicus
  Genbank Accession No. J03886
ggtcgaccagctagaacgccttgagttcagacacgcagaagcacacgcctacctacctcatggctacagaaaacggagcagttgagctgggaacccagagtctgtcaacagaccacccacctacagacgcagcaggtgatggatctccagcttcagagaaagaacccagcctcccagacacagagaaagacctgggccccactaacacgaagaaagaccctggcgcgccggatccaaagaaaaatccagatccaccctccctgaagaaaactcccgaagcccctggtccagagaaaaagggtgactcggccccagcttcagccagcaaccagggcccttcaggagagggtgatggaggtgggggccctgctgaaggcggtacggggcctcctgcagtcttgccccagcccactgccacagctgatgccagcatccagaagctggacgccacgcaagcgccctcgggcaaccaggaatctggagaggccaaggcaggcaagaaggcagcagaatgccgagaagcaggacgaaggggctcacccgcctttcttcacagccctagctgccccgcgatcatctcctgttctgagaagacactggccatgaagcccttaagcgagacaacagagctcatctttgcaggggtgtctgaaacccctgatccccaagatcctggtccagctaaggacgaaggagggacgaacacgctggcagacgggaaagaagaggcagaggcaggccaggctgagcaggctaaggtgcaaggggacacctcccagaggatcgggttccaggctgttccctcagagagagcagaggtggggcaggccctctgtctcacggccaaggaggaagactgcttccaaattctggatgattgtccaccacccccagcccccttcccacacaggatcgtggagctgaggaccggaaatgtcagcagtgaattcagcatgaactcaaaggaggcattgggaggtggcaagtttggagctgtgtgcacctgcacggagagatccacaggcctcaagctggcagccaaggtcatcaagaaacagacccccaaggacaaggaaatggtgttgctggagatcgaggtcatgaaccagctgaaccaccgcaatttgatccagctgtactcagccattgagacctctcacgagatcatcctgttcatggagtacattgagggcggcgagctctttgagaggatcgtggatgaggactaccaactgacggaagtggataccatggtgttcgtcaggcagatctgcgacgggatcctcttcatgcacaagatgagggtcctgcacttggacctcaagccagagaacatcctgtgtgtgaataccaccgggcacttggtgaagataattgacttcggcctggcaagaaggtataaccccaatgagaagctgaaggtgaattttgggaccccggagttcctgtcaccagaggtggtgaactatgaccagatctctgacaagacggacatgtggagtcttggggtgatcacctacatgctactgagtggcctctctcccttcctgggcgacgatgacacggagaccctaaacaacgtcctgtctgccaactggtactttgatgaggagacttttgaagctgtgtcagacgaggccaaagacttcgtttccaatcttatcacgaaggaccagagtgccagaatgagtgctgagcagtgcctcgcccacccctggctcaacaacctggcagaaaaagccaagcgctgcaaccgtcgtctcaagtcccagatcctgcttaagaaatacctcatgaagaggcgctggaagaaaaacttcattgctgtcagcgcacgcaatcgcttcaagaagatcagtagctcgggggcactgatggctttgggggtctgaaccccaggcgactaaaagcctggatgcactcgcatggtcaaggctgaaaccagagagagccggccagatctctagagcaggctggtcaggacaaatctgcaccaggcccagaggcttggggctccgcaggtccttaggcttaccgcttcccctacgtgaacatggagtgtggcctggaatccatctgtgaccgcctcctcagcaggctgtgtgaccgcttccccctacgtgaacatggagtgtggcctggaatccactctgtgaccgcctcctcagcaggctgtgcctgtcagccccaccagactccaaggacagccaggccaggccattcctagtctctccctagcttgcccctttgaactgctgccccgtaacctttttttcctgcacctggggcactcttgccctggagcgggatggccgggggtccagcaggtgggctgctgtagtggtggtggtggatgggagattctaggagggtagaaatgcagtcagctgcaggggagacagagcaggctttgtgtgagaggacctccatgccctgcctcacactcccaacagatacaaccttgcacacaccatctggctcctggctcccaccttctgtttgtgaccaccaacacataggaacttgtgagagaaagccagcccaggcctggagaggtggtggtggtagcggagagaagtctgggaggcctgagaaccacccccctaagtttacttgaggaccgagtcttccatcctggctactctgtacccatcccaggggcatctgaaaaccccaaataacaggatgaactggccacaaggagtatgaaagccgtcggggcagacccccaaccgctctcagcttgtgccttataaataaacacacaggttggaggcagcctccttcctctgcgcatgc

SEQ ID NO: 2840 - DNA, 1612 bp, Rattus norvegicus
  Genbank Accession No. J03959
ggcccattaccatgacgactatggaaagaatgatgaagtggagtttgtccgaactggctatgggaaggacatggtcaaagttctccatattcagagggatggaaaataccacagcatcaaagaggtggcgacttcggtgcagttgactctgaggtccaaaaaggattacctccatggtgataattccgacatcatccccacagacaccatcaagaacacagtgcatgtcctggcgaagttcaaagggatcaaaagcatcgagaccttcgctatgaacatctgcgagcacttcctctcttcctttagccatgtcacccgagcccatgtctacgtggaagaggtcccctggaagcgttttgaaaagaatggagtcaaacacgtccatgccttcatccacaccccgacgggaactcacttctgtgacgtggagcaggtgaggaacggacctcccatcattcactctggaatcaaagacctcaaggtcttgaaaacaacccagtctggatttgaaggattcatcaaggaccagttcactactctccccgaggtgaaggaccgatgctttgccactcaagtgtactgcaagtggcgctaccagaatcgggacgtggatttcgaggctacctggggcgctgtccgggacattgtcctgaagaaatttgctgggccctatgacagaggtgaatactcaccttccgtgcagaagaccctctatgacatacaagtgctgaccctgagccagcttcctgagatagaagacatggaaatcagccttccaaacattcactactttaacatcgacatgtccaaaatggggctgatcaacaaggaagaggttttgctgcctctggacaaccctacggcaaaataaccgggacggtgaggaggaagctgccttccaggctgtgacgttatggctccagccagttgtgatgcttgggataactgtgtgctcacctgcaaaaatttcaactcaagatactgattgctctgctctgtgtgaagtaattgctcttccgtttctagtttagcaaggggcttgtagctgtgcgcacgtggagccctgcattagcagacacgcaggctccgtggcgtggccttgggcagattcctttaaaactgtgatcggagaatcacagcgatatttctccttgctgttcttgtgccctctgcctcagactctgtctttaggatcgacgttaaccaaatagcgtaaagcactggctgctgccacatccgtgatctgaacatgagatcaaacactgtcatcatcctaggatgtctggtgtaccaaaaacgaataaaaccatgtgaaaaaaaaatcatcctagtgttttgaaaatctctggctgaagctcccaagctgaggagtgatttgcatttgattgaggctccaacaggaaagacagttttgtttgaagggtgagtctcctggtctgtggatcagactgaagggcacatctagaaggggtcacatgaacccaagctggcctcgggagagcgagaaagaccatgaagttgggtgcgtgaggaagatctgggatgaactgggatgggaggtgactattatcaaaatacattatataaaattctcaaatacttaataaaaacc

SEQ ID NO: 2841 - DNA, 691 bp, Rattus norvegicus
  Genbank Accession No. J04143
gaattccgggagaagatcaccagcctgcaccgagaggtggaaaaggtgaagctggatcagaagcgtctggaccaggagctggactttatcctgtcacagcagaaggagctggaagaccttctgagcccgttagaggagtcagtgaaggagcaaagtggcaccatctaccttcagcatgctgatgaggagcgtgagaagacctacaagctggctgagaacatcgatgctcagctcaagcgcatggcccaggacctcaaggacattattgagcacctgaacatggctggtggccctgcagacaccagtgacccactgcagcagatctgcaagatcctcaatgcacacatggactcccttcagtgggtggaccagagctctgccctgctgcagaggagggtggaggaggccagccgtgtgtgtgagagccggcgcaaggaacaggaacgcagcctgcgcattgcctttgactagccatacatgagttgggggtgggggtacctcttttgttgtagggctgctggctttggggtggttgtattgttgagaaaaatgctctttggtttggttccctgttatcagaagtggtttgcgaaggcatgatgtcatggatgtaataacctgtgtgctctggagacaggtgtgaaggtcactgaactctaggccagcatttaaagaacaagggccggaattc

SEQ ID NO: 2842 - DNA, 2259 bp, Rattus norvegicus
  Genbank Accession No. J04187
ctggctactatgctggacacaggactgctcctggtggtcatactggcctccctaagtgtcatgttcttggtgtccctctggcagcagaaaatcagggagagattgcctccaggacccactcctttgcctttcattggaaattatctgcagctgaatatgaaagacgtatacagttccatcacacagctcagtgagcgctatggtcctgtgttcaccattcaccttgggcctcgacggattgttgtgctttatggatacgatgcagtcaaagaggctttggtggaccaagctgaggagttcagtggacgtggcgaactgcctacctttaatatactcttcaaaggctatggtttttcattgagcaatgtggaacaggccaagcgtatcaggcgcttcaccatagccacattgagagattttggtgtgggcaagcgtgatgtacaggagtgtatcctggaggaggcaggctatttgatcaagacgttgcagggcacttgtggagcccccattgacccttccatctacctgagcaaaacagtctccaatgtcattaactccattgtcttcgggaaccgcttcgactatgaggacaaagagttcttgtcactgttggagatgatcgatgaaatgaatatatttgcagcctcagccacagggcagctctatgacatgttccattcagtgatgaagtacctgcctggaccacagcaacagatcatcaaggttactcagaaactggaagacttcatgatagagaaagtgaggcagaaccatagtaccctggaccccaattccccaaggaacttcattgactcctttctcatccgcatgcaagaggagaaatatgttaattcagaattccacatgaacaacctagtgatgtcatcattaggcctcctctttgctgggactgggtcagtcagctccacgctataccatggtttcctgctactcatgaagcatccagatgtggaagccaaggtccatgaggaaattgagcgagtgatcggcaggaaccgacagcctcagtatgaggaccacatgaagatgccctacacccaggctgtgatcaatgagatccaaagattttctaacttggctcccttgggcattcctcgaaggattatcaagaacacaaccttccgtggcttcttcctccccaagggcaccgatgtattccctataataggttctctgatgacagaaccaaagttcttccctaaccacaaagacttcaacccccagcacttcctggatgacaagggacagttgaagaagaatgctgcatttctccctttttccattggaaagcgattctgcttgggagatagcctggctaaaatggagctcttcctgctgctcaccaccatcttgcagaacttccgttttaagttcccaatgaatctagaagacatcaacgagtaccccagtcccatagggtttaccaggatcataccaaattacaccatgagcttcatgcccatctgattctgagttgaatcaaggtggggcaagagggagggagagcctgaagtggggccagggtgcaggtggagagaacagagaagatgaagatgagggttaagaagggaccacacccatggaagaaacacaaaagacttctcagtttggtaaaattgtaacagtcctaataaaaagaaagaaacacccagtaggcagcagtaacaacaactgagactcatggggcaaaggtggctcacctctgcagaagctgtcctgcccttctctcactcagtcctctacacaagagcagcatgtccccaagcccaacgtacaggttcaaaagatagaacttaaaaaatttgaacctaaactgaggtggaaaagacacagttagctaggattgacacattggactctatcaccagcattcaggagggagggaacatggctccctaggaggcctgccagaattacaaagtgaaactcatctcaaaaaaggaacaacagaaaataaaatttcaaattgatttctcttagaccataagagtccagatctgtatccaaagctatttggttatattttttgttattgttgttttgtttacacattgtgtttttctttcggtttgtaagtctgtttgggatatttaatttacatttactgattagtgtgggtggtagggcataccatggctcaaatgtggaaaccaaagaaaagcttttggaagtgtcatctcccttacaatacgtgtgtccaagaactcaaattcagacaataaagcttgatagcaagca

SEQ ID NO: 2843 - DNA, 1602 bp, Rattus norvegicus
  Genbank Accession No. J04503
tgcccggccgccgtcgccaccgccgccccggccgaccgagggacccgcccgcccgcggctgctccggatctagaggatcaagtcataatgggagcatttttagacaagccaaagatggaaaagcataatgcccagggccaggggaacgggttgcgatacggcctaagcagcatgcaaggttggcgagttgaaatggaggatgcacatacggctgtgatcggtttgccaagtggacttgagacatggtcattctttgctgtatatgatgggcatgctggttctcaggttgccaaatactgctgtgagcacttgttagatcacatcaccaataaccaggattttaaaggctctgcaggagcaccctctgtggaaaacgtaaagaacggaatcagaacaggttttctggagattgatgaacacatgagagttatgtcagagaagaaacacggtgcagatagaagtgggtcaacagctgtgggtgtcttaatttctccccaacatacttatttcattaactgtggggactcaagaggtttactttgtagaaatagaaaagttcacttcttcactcaagaccataaaccaagtaatcctctggaaaaagaacgaattcagaatgcagggggctctgtgatgattcagcgtgtcaatggctctctggctgtatcaagagctcttggggattttgattacaaatgtgtccatggaaaaggtcccacagagcagcttgtctcgccagagcctgaagtccatgatattgaaaggtctgaagaagatgaccagttcatcattcttgcatgtgatggcatctgggacgtcatgggcaacgaagagctctgtgactttgtgagatccagacttgaagtcactgatgaccttgagaaagtttgcaatgaagtagtcgacacctgtttgtataagggaagtcgagacaacatgagtgtgattttgatctgctttccaaacgcgcctaaagtctcagcagaggcggtgaagaaggaggcagagctggacaagtacctggagaacagagtagaagaaatcataaagaagcagggggaaggcgtccctgacttagtccatgtgatgcgcacgttagccagtgagaacatccccagcctcccaccagggggtgaactggcaagcaagcggaatgtaattgaagccgtttacaatagactgaacccttacaaaaacgacgacactgattctgcgtcaactgatgatatgtggtaaagctgctcatctagccatggtttcacctttgcctggaagagagagagagatcagcgcatccttgctgagcctttaacatccatcaccgacttaaggaaggggtccgacatgggtgagggactacagcttcagcgatggaacagccagcccagaatggatttttttttttattgtaaatttgagacttatgtaagcgtgatttcaaaccgtaattcatgttgtaaatcagactccagcaatttttgttgtatgattttggttttttgtaaagtgtaattgtccttgtacaaagtgctcatatttaattatgaactgctttaaaatcactatcaatgataaaggaaatttggcttgttgtgtggcaca

SEQ ID NO: 2844 - DNA, 2950 bp, Rattus norvegicus
  Genbank Accession No. J04811
gaattccggagagaccacaagatagaggattattaatttatggggattttttggagatttatatacccaagcaacaactcctagatgctacagaccaagacaccaagaaataaccacgaaattctactttcaaccctagcttctctaccagattttaactaaacaagatcttcttgcaaaggtctcaggtatggatctttggcgggtgttcttaaccctggcactggcagtctccagcgacatgtttcctggaagtggggctacaccagctactcttggcaaagcttccccggttctgcaaagaattaatccaagcctgagggaaagttcctctggaaagcctcgattcaccaagtgtcgttcccctgaactggagaccttttcatgctactggacagaaggggatgatcataatttaaaggtcccgggatctattcagctatactatgctagaagaattgctcatgaatggaccccggaatggaaagaatgccctgattatgtctctgctggagcaaacagctgttacttcaactcatcgtatacctccatttggataccctactgcattaagcttactacaaatggtgatttgttggacgaaaagtgtttcactgttgatgaaatagtgcaacctgatccgcccattggcctcaactggactttactaaacatcagtttgcctgggatccgtggagatatccaagtgagttggcagccaccgcccagtgccgatgttctgaagggatggataattctggagtatgaaattcagtacaaagaagtaaatgaaacaaaatggaaaacgatgagcccgatatggtcaacatcagtcccactgtactcactgagactggataaagagcacgaagtgcgtgtgagatccagacaacggagcttcgaaaagtacagcgagttcagtgaagtactccgtgtaacgtttcctcagatggacacactggcagcatgtgaagaagatttccggtttccatggttcttaattattatctttggaatatttggagtagcagtgatgctatttgtagttatattttcaaagcagcaaaggattaagatgctgattttacccccagtaccagttccaaagattaaagggattgatccagatcttctcaaggaaggaaaattggaggaggtgaacaccatcttgggcattcatgataactacaaacccgacttctacaatgatgactcctgggttgagttcattgagctggatattgatgatgcggatgagaagactgaagagtcagacaccgacagacttctaagcgatgaccaggagaaatcagctggtatccttggagcaaaggatgacgattctggacgtaccagctgttatgaccctgacattttggataccgatttccacaccagtgacatgtgcgatggtacctcggagtttgctcagccgcagaagttaaaagcagaagctgatctcttgtgccttgaccagaagaatctgaagaactcgccttatgatgcttcccttggctctctgcacccctccattaccctgacaatggaagacaaaccacagccacttctgggcagtgaaactgagtcaacccaccaactcccctctacaccaatgagcagtcccgtgtcactggcaaacattgacttttatgcccaagtaagcgacattacaccagcaggtggtgtagtcctttctccaggccaaaagattaaggcagggttagcccagggcaacacccagctggaggtggccgcgccctgccaagaaaattacagcatgaacagtgcctacttctgtgagtcagatgccaaaaagtgcatcgctgcggcccctcacatggaggccacgacatgtgtaaaaccaagctttaaccaagaggacatttacatcaccacagaaagccttaccactactgcccgaatgtccgagacagcagataccgctccagatgctgagcctgtcccagactacaccacggttcacaccgtgaagtccccaaggggccttatactcaacgcgactgctttgcctttgcctgacaaaaagaagtttctctcctcatgtggctatgtgagcacagaccaactgaacaaaatcatgcagtagcctttcctatctttaatggcaaaagaaatgactgggcacgaacgcctaaaccaaaactatgttttaaatctgtgttgggagagcgtgagagtgaatgtggattcaaaaataccttttctggaaacgtcgaaacattatcataacgtggaaaatcaagaatatgtaatcagatagatactcccattgtgaattttaaatattttaagatcgtctttaagactgtttgtggcagtgattgtctgtgctgtgggtcttaactttgtgatactaagttattaaatagctacgtttttcatgtatgtagatcattgctttttttgaaaaagcaaaacaatcaggtggcttttgcagttcaggaaattgaatgcagattttagcacagactgatttctttttcctttttaaatagctaggagctaaaactctaggggagaaggtaaaactagtttggatatgcaaaacatttattttgacataaaattgataaagatatttttaataatttacactgtaagcatgagtattttataatacactacagatatattgttagttcacaacaatccatctacggatgtaacaactacaatgtgtagaggggttgatgctttggtcaatgaacctaaagaaaaatgaacaagttagatttttacaaagcccttttttataactcccaaaacttcttaaatctaaaaatgtctgcattattggaacaaacccattttaaatttgtaaatgaatatttttttaattttgaaaactttaattttttatacaaattaacgtatcatacaccaaacagtaacagaagtgattataataatggaagaaacagtttcttcc

SEQ ID NO: 2845 - DNA, 1164 bp, Rattus norvegicus
  Genbank Accession No. J04943
gtgtctgttctgcggaacagtaggcagttgttttccgtccggcttctctcacactcaagtgcgcgcctccacctcatggaagactcgatggacatggacatgagccctcttaggcctcagaactaccttttcggttgtgaactaaaggctgacaaagattatcactttaaagtggataatgatgaaaatgagcaccagttatcattaagaacggtcagtttaggagcaggggcaaaagatgagttgcacatcgtagaggcagaagcaatgaactatgaaggcagcccaattaaagtaacactggcaactttgaaaatgtctgtacaaccaacagtttcccttgggggcttcgaaattacaccacctgtggtcttgaggttgaagtgtggttctgggcctgtgcacataagtggacagcacctagtagctgtagaggaagatgcagagtcagaagatgaagatgaggaagatgtaaaactcttaggcatgtctggaaagagatctgctcccggaggtggtaacaaagtcccacagaaaaaagtaaaacttgatgaagatgatgatgaggatgatgaagatgatgaggatgatgaagatgatgatgatgatgattttgatgaagaggaaactgaagaaaaggttccagtgaagaaatctgtacgagataccccagccaaaaatgcacaaaaatcaaaccaaaatgggaaagatttaaaaccatcaacaccaaggtcaaagggtcaagagtccttcaaaaaacaggaaaaaactcccaaaacacccaaaggacctagctctgtagaagacattaaggcaaaaatgcaagcaagtatagaaaaagcgcattgaacattcctgggcactactggtaaattaagcccaaagatggggaaagaggaaaaggagaaacaaatatagtaccatcaacaatccagactgaagtcttctattttaatctcaatcccctttcctgattggccatccattcccccttgcaggctggaagcaatcgaaaacctaaagcatttttctttttcactcgggtgatgcagaaaacttgactgcttttctataccacttgtgcatatgccttaactctgaccatgttttaattttaacctttgtatccttagctgctcgaaataaatttttgaatgaaccaat

SEQ ID NO: 2846 - DNA, 1440 bp, Rattus norvegicus
  Genbank Accession No. J05029
cggccgtccgtcccgccatggctgcgcgcctgctcctccgctcccttcgtgtcctgagcgcccgctcggcgacactcccgccgccctccgcccgatgttctcattctggagcagaagcacgtctagaaactccttctgctaaaaaattaactgatattggaatcagaagaatcttttcctcagagcatgacattttccgggagagtgtaaggaagttttttcaagaagaagtgattccctaccacgaagaatgggagaaagccggagaagtgagtagagagctctgggaaaaagctggcaagcaaggcctgcttggcatcaacattgcagagaaacatggcggcatcggtggggacttgttgtcaacagcagttacttgggaagagcaagcatactcaaattgcacaggccctggtttcagcctccattcagatattgtcatgccctatattgcaaattacggcacaaaagaacagatcgagcagtttatcccccagatgacggcgggcaagtgtattggtgccatagccatgacagagcctggggctggaagtgacttacaaggagtaagaacaaatgccaaaaggtctgggagtgattggattctcaatggaagcaaggtgttcatcactaatggctggttaagtgatctcgtgatcgtagtggccgtcaccaatcgtgaagctcgatcgcccgctcatggcattagcctctttttggtggagaatggaatgaaaggatttattaagggcaagaagctacataagatgggaatgaaagcccaggacacagcagaactattctttgaagatgttcgattgccagctagtgccctacttggggaagagaataaaggcttctactacctcatgcaagagctcccacaggaaaggcttttaattgctgatttggcaatttctgcctgtgagttcatgtttgaagaaaccaggaactacgtgagacaaagaaaggcttttggaaaaacagtcgcacacatccagactgtgcagcacaaactagcagaattgaagacgaacatatgtgttaccagagcttttgtggacagctgcctacagctgcatgaaaccaaacgtctggactccgcctccgcttccatggcgaaatattgggcatctgaattacaaaacactgtagcttatcagtgtgttcaactccatggaggctggggttacatgtgggaatacccgattgcaaaagcctacgtggatgctcgagttcagccgatctacggtggtaccaacgaaatcatgaaagagctgatcgcaagacagatcgtcagtgacagctagacatctgcctacatcctgaaatcctactacatcacagctaatccggattcaaatatacttgagataaagtggaacctggaagggggggggggtagtaaagctggttttatgtatgattgttacagagaaa

SEQ ID NO: 2847 - DNA, 2470 bp, Rattus norvegicus
  Genbank Accession No. J05035
acctcagctatggagttggatgagctgtgcctgctcgacatgctggtctacttggaaggtttcatggccttcgtgtccattgtggggctccggtcggttggctctccgtacggccgctactcgccgcagtggcccggcatccgagtgcccgcgcgacctgcctggttcatacaggagctgccctcgatggcctggccgctgtacgagtacattcgtcctgcagccgcgcgactgggcaacctgcctaaccgcgtcctgctggctatgtttctgatccactacgtgcaaaggacgctggttttcccggttctgatcaggggagggaagcccaccctcctggtcacctttgtcttggccttcctgttctgcaccttcaacggctatgtacagagcagatacttgagccagtttgcggtttatgctgaagactgggtgacccatccctgtttcctgacaggctttgccctgtggttagtgggcatggtgataaatatccactcagaccacatcctgaggaatctgagaaaaccaggggaaactggatacaagatacccaggggaggcctgtttgaatacgtatctgcagccaactattttggggagctcgtggagtggtgtggctttgcactggccagctggtccctccagggtgtagtgtttgcactgttcacactcagcacactgctcaccagagcgaagcagcaccatcagtggtaccatgagaagtttgaagattaccccaagtcaagaaaaatactgattccatttgtgctttagtgctctgttagcgctgttgcctcccatgagctgagtctgtctgtctccctggtgactttgctctgagcacttacgaatgaattgttttccttaattctcctgcagcccctttctcaggaaaggctgggggtgggggggtgtcgtcccctggtaaaggacaaagccaatgataaactaatccaccacatgcagttaggggctacactgcctgctggatccgaagcaggtagccctgagtcattatggcgctctctgacttcagcaatcagcagcccttacaatcctgcaagattccacccaagtcagcagcagtcacgggcctccttcactgatgtgtgttctgcctgctcagcccctgccacagaggcctggaggtgtgggagtgtggcctaagcacagtctgccatccttgaccgcagacctcttggacccacccccactccctccagacactggtaagagaagccttcctgcaacatgtcctgtcctcaggaggtgagacagcagagtgcttccattcactcgatgaccccatttttgctcttcctttgggctagaattcattaaggtccttaaaaacaaaacaaaactttttcttaatagtacaaaacaaaatatcaaaacaaaatttgttattttgaatgcacccaaggaccaatcatgtcacacaaagaaagctcagggctagcctgggctgtgtagggagaccctgtttgggaaaaaaaaaatgaagataacaaccagctaactgtccaaagaagtgaccgcagtaataaaagacgccgcccacacaggcaccagcttgggagaaagatgtgcgcctgggattgtaaacccactgttgctctgggcaggctgaggcccactggtgaagagccattcccaccggacccatgcacactgcctcggggcagcgtctgcactcacctctcacccgctgccaccacagctaaagaacagaacggatagaactgtgtgctctgaacccagtgaagatgctgcatgaagacctgcaggcacacctgatggcgtgcacggtgcccaccactcgcctgactcggaccatctctgtgtgcccgctgccacctctgtgtgccctttccagctggctttcccatcagggcttcctcagctcttctgctctcagacagaaactattctctgttcctctggttcgcagaatgtctagatttgacccagaaaacttcatgacacagctacttcattttaacaaagagcagtgtttaatggggaactacccttcaatcctttaccctccccttttctggccaagtaactgcttgaaaacctaaagcactaaacattgtaggtctcctctcaaaacctcaggcctgtctggtgtgttctgaaacgtttgtgtggaaggagatattcagctgagaccctgggaatgtttgctgtgaacttgacctcccttggagggcatggtgctagataaacttggaacctaggactccaggttgctaggcggatgccctgacactaagccacatcacacattagctctgtgatgcctctttctttatgaaggaccaagctgcccacatactaagtgagattaatttaagaggaatcctgtcctaacactgtatacttcattccctacaactcaacttacttgtatgaaccatgattgttaaggaaattaataaactacatttataagtaaaaa

SEQ ID NO: 2848 - DNA, 781 bp, Rattus norvegicus
  Genbank Accession No. J05122
tgtggatctttccagaacagcagttgcaatcactatgtctcaatcctgggtacccgccgtgggcctcactctggtgcccagcctggggggcttcatgggagcctactttgtgcgtggtgagggcctccgctggtatgctagcttgcagaaaccctcctggcatccgcctcgctggacactcgctcccatctggggcacactgtattcggccatggggtatggctcctacataatctggaaagagctgggaggtttcacagaggaggctatggttcccttgggtctctacactggtcagctggctctgaactgggcatggccccccatcttctttggtgcccggcagatgggctgggctttggtggacctcatgcttgtcagtggggtggcaaccgccactaccctggcttggcaccgagtgagcccaccggctgcccgcttgctgtatccttacctggcctggctggcctttgccaccatgctcaactactatgtatggcgtgataactctggtcggcgagggggctcccggctcacagagtgaggacacctagccatcaggaatgcagccctgccagccaggcatcatgggttgaggtcatcctgctttcatgaccattgggcctgctggtctacctggtcttagtccaggaagccaccaggtaggtcaaggtggtcagtgctaagtcccatgcggggacagttgtacctgcttttctgcactgctgcaggcgtgccctaggagcatggggcctttaaagctaaataaagtctttaactt

SEQ ID NO: 2849 - DNA, 2484 bp, Rattus norvegicus
  Genbank Accession No. J05132
gaattcagtcacggactttatgcctttgaaagttgtcaccattttattgtcaccctccatcttaaccactgccttgaccttttccccagtcatggtctccagttcgcactcctcccccaaggtgaactcattgtggatcaccttggacccataggtgatggtggctgagggtggctgactgaaaaacggacttccagatttcttactcttccacaagggccctcatcacgtgcgcaggtctctaaccttactctctgaaaggatggcttgccttcttcctgctgctcgacttcctgcaggctttctcttcttagtgctctggggctcagttctaggtgacaagctgctggtggtcccccaggatggcagccactggcttagcatgaaggagatagtggagcacctcagtgaacgcggacacgacattgtggtgctagtgccagaagtcaatttgcttttgggagaatccaaatactacaggaggaaaagcttcccggtcccctacaacctagaagagttgcggacccgctatcgctcctttgggaacaaccactttgctgccagttcccccctgatggctcctctaagagagtacaggaacaacatgattgtcattgacatgtgctttttcagctgccagagcctcctgaaggactcggccaccctcagcttcctcagggagaaccagtttgatgctctgttcacagacccggccatgccctgtggtgtgatcctggctgagtatctcaagctgccttccgtctacctcttcagaggtttcccatgctctctggagcacatgcttggtcaaagcccaagccccgtatcctatgttcccagattctacaccaaattctcagaccacatgacatttccccaacggctggccaacttcattgctaacatcttggagaactacctttatcattgtctgtactcaaagtatgagatccttgcctcagacctcctcaagagagatgtgtccctacctgccttacaccagaactctctgtggctgttacggtatgattttgtgttcgaatacccccggccagtcatgcccaacatgatcttcattggagggaccaactgcaagaagaaggggaacctgtctcaggaatttgaagcctatgtcaacgcctccggagaacatggcatcgtggttttctctttgggatccatggtctcagagattccagagaagaaagcgatggaaattgctgaggctttgggcagaattcctcagacggtcctgtggcgctacaccggaactagaccatcgaaccttgcaaagaacactattcttgtcaaatggctaccccaaaacgatctgcttggtcatccaaaggctcgggcgttcatcacacactccggttcccatggtatttatgaaggaatatgcaatggggttccaatggtgatgatgcccttgtttggtgatcagatggacaacgccaagcgcatggaaactcggggagctggggtgaccctgaatgtcctgaaatgactgccgatgatttggaaaacgcccttaaaactgtcatcaataacaagagttacaaggagaacatcatgcgcctctccagccttcacaaggaccgtcctatcgagcctctggacctggctgtgttctgggtggagtacgtgatgaggcacaagggggcgccacacctgcgccccgccgcccacgacctcacctggtaccagtaccactccttggacgtgattggctttctcctggccatcgtgttgacggtggtcttcattgtctataaaagttgtgcctatggctgccggaaatgctttgggggaaagggtcgagtgaagaaatcacacaaatccaagacccactgagaagtggcaggaagtgaaggagaagtattagtcccttatccaatcagttgaaacttggaaacaagtgttaaatccatgttgcttttattagggaaataattcaccatacactatacacccagaacatttttttttctttttctttttttcggagctggggaccgaacccagaacatcttctttttttaaataaaaacaatctaattgctggccacacccatcagggaagatactggaatatgtgatctgtttctccagtatcttcagtctggacaatgactgccatctgttggtaacttacagaaagtttagtgttctgccttcagtgacagcaccacagtttcccttactcctgtcagctaatggcttcctcccctggattctcagaccagtgtggccttcccagtgttagtcattcctcactgtgctcatgttttgtgggtgcacggcctttgagctttgggagaaaagaagatgaggctgtgacactggtggccctgtgtttgagataataattattgcttgtctctgaatttgatgaaaactgaagtacattctaaagaaagtatgtcttctattgtgttcccaaaccaagaacttgtcaataaattcatataaattgtggaattc

SEQ ID NO: 2850 - DNA, 2178 bp, Rattus norvegicus
  Genbank Accession No. J05181
cagagcggagctgcggccaggaggaggacgcggccatggggctgctgtcccaaggctcgccactgagctgggaagagacccagcgccacgccgaccacgtgcggagacacggcatcctccagttcctgcacatctaccacgcagtcaaggaccggcacaaggacgtgctcaagtggggtgacgaggtggagtacatgttggtgtcctttgatcatgaaaataggaaagtccagttgttactgaatggcggcgatgttcttgaaactctgcaagagaagggggagaggacaaaccccaaccacccaaccctctggagaccagagtatgggagttacatgattgaagggacacctggccagccgtacggaggaacgatgtccgagttcaacacagtggaggacaacatgaggaaacgccggaaggaggctacttctgtattaggagaacatcaggctctttgcacgataacttcatttcccaggctaggctgccctggattcacactgccagagcacagacccaacccagaggaaggaggtgcatctaagtccctcttctttccagacgaagccataaacaagcacccccgctttggtactctaacaagaaacatccggcatcggagaggagaaaaggttgtcatcaatgtgccaatattcaaggacaagaacacaccatctccgtttgtagaaacatttcctgaggatgaggaggcatcaaaggcctctaagccagaccacatctacatggatgccatgggatttgggatgggcaactgctgtcttcaggtgacattccaagcctgcagtatatctgaggcaagatacctttatgaccagttggccactatctgcccaattgttatggctttgagtgctgcatcgccattttaccgaggctacgtgtcagacattgattgtcgctggggagtgatttctgcatctgtagatgatagaacacgggaggagagaggactggagcccctgaagaacaatcgctttaaaatcagtaagtctcggtatgactcaatagatagctacctgtccaagtgtggagagaagtacaatgacatcgacctgaccatcgacacggagatctacgagcagctcttagaggaaggcatcgatcaccttctggcacagcacgttgctcatctctttattagagacccactgaccctttttgaagagaaaattcatctggatgatgccaacgagtctgaccattttgagaatattcagtccacaaactggcagacaatgaggtttaagcctcctcctccaaactcagatattggatggagagtagagttccgaccaatggaggtacagttgacagactttgagaactctgcctatgtggtatttgtggtactgctgaccagggtgatcctctcatacaaactagacttcctcattccactgtccaaggttgacgagaacatgaaagtggcacaggagcgagatgccgtcttacaggggatgttttatttcaggaaagacatttgcaaaggtggcaacgccgtggtggatgggtgtagcaaggcccagaccagctccgagccatctgcagaggagtacacgctcatgagcatagacaccatcatcaatgggaaggaaggcgtgtttcctggactcatccccattctgaactcctaccttgaaaacatggaagtcgacgtggacacccgatgcagtattctgaactacctgaagctaattaagaagagagcatctggagaactaatgactgttgccaggtggatgagagagtttattgcaaaccatcctgactacaagcaagacagtgtaataactgatgagatcaactatagcctcattttgaaatgcaatcaaattgcaaatgaattgtgtgaatgtccagagttacttggatcaggctttagaaaagcgaagtacagtggaggtaaaagcgacccttcagactagacatccagcaaagtggatggcagctgcagccctgaccccgagcccactcagacgctgtgaagaccaagatggcctacagtgttccagttgcccacaagtgactagaagcttccttcagtaggtgaatctgagtttgtatatgtatatactaaagtatttttatgattattaacaatgtattttaataacactgtatctacagtcatggtgaactggcttgtacattttt

SEQ ID NO: 2851 - DNA, 819 bp, Rattus norvegicus
  Genbank Accession No. K00136
gccacgactctcgctagacagtgaagcacagttgctgctatgtctgggaagccagtgcttcactacttcaatgcccggggcagaatggagtgcatccggtggctcctggctgcagcaggagtggagtttgaagagaagcttatacagagtccagaagacttggaaaagctaaagaaagacgggaatttgatgtttgaccaagtgcccatggtggagattgacgggatgaagctggcacagaccagagccattctcaactacatcgccaccaaatatgacctctatgggaaggacatgaaggagagagccctgattgacatgtattcagagggtattttagatctgactgaaatgattatccaattggtaatatgtcccccagaccaaagagaagccaagaccgccttggcaaaagacaggaccaaaaaccggtacttgcctgcctttgaaaaggtgttgaagagccatggccaagactaccttgtaggtaacaggctgacccgggtagacatccacctgctggaacttctcctctatgttgaagagtttgatgccagccttctgacctctttccctctgctgaaggccttcaagagcagaatcagcagcctccccaatgtgaagaagttcctgcagcctggcagtcagagaaagccagccatggatgcaaaacaaatcgaagaagcaaggaaggttttcaagttttagcggagctgcactgtccaatttcttgtaatccaggctctgatgttttgcaaaaaatgagaagcaattgttgatcctggctattttgcaataataaaaaaatgaacaaatggt

SEQ ID NO: 2852 - DNA, 1362 bp, Rattus norvegicus
  Genbank Accession No. K01721
accttcctcttccagtgcatcacagccaacatcatctgctccattgtgtttggagagcgctttgactacacagaccgccagttcctgcgcctgttggagctgttctaccggaccttttccctcctaagttcattctccagccaggtgtttgagttcttctctgggttcctgaaatactttcctggtgcccacagacaaatctccaaaaacctccaggaaatcctcgattacattggccatattgtggagaagcacagggccaccttagacccaagcgctccacgagacttcatcgacacttaccttctgcgcatggagaaggagaagtcgaaccaccacacagagttccatcatgagaacctcatgatctccctgctctctctcttctttgctggcactgagaccggcagcaccacactccgctatggtttcctgctcatgctcaagtacccccatgtcacagagaaagtccaaaaggagattgatcaggtgattggctctcacaggccaccatcccttgatgatcgtaccaaaatgccatacactgatgcagtcatccacgagattcagagatttgcagatcttgccccaattggtttaccacacagagtcaccaaagacaccatgttccgagggtacctgctccccaagaacactgaggtgtatcccatcctgagttcagctctccatgacccacagtactttgaccatccagacaccttcaatcctgagcacttcctggatgccgatgggacactgaaaaagagtgaagcttttatgcccttctccacaggaaagcgcatttgtcttggcgaaggcattgcccgaaaggaattgttcctcttcttcaccaccatcctccagaacttctctgtgtcaagccatttggctcccaaggacattgacctcacgcccaaggagagtggcattgcaaaaatacctccaacgtaccagatctgcttctcagctcggtgatcgggctgaggcagccaggtgccccagttctgttgggaatggcctcatgtttctgcctctgggggacctgctgaaaagcaggctccaaggccacctgctccacatcttcctattcagttctccaaaagtcccaaggcttgttcttattctgtgaatggcactgaagaagtcaatcgactgtcttattttgacatgtgaccagagatttcatgagacacatctcatgctgagtcacttccctcttcctcctaatagcccacgtccccacttatcagccctccatggtctgtgatctgtgctaatggactctgtatatgtctcagtgctatgtctacagacttacatagtatgtatggtttcaggttaaacagaatcacagagtgtgtg

SEQ ID NO: 2853 - DNA, 960 bp, Rattus norvegicus
  Genbank Accession No. K01933
tgaacccagctgctggcgataaactccccaagtgtgaggcagtgtgtgggaagcccaagcatcctgtggaccaggtacagcgcatcatcggtggttccatggacgccaaaggcagctttccttggcaggccaagatgatctccagacatggactcaccactggggccacactgatcagtgaccagtggctgctgaccactgcccaaaacctcttcctgaatcacagtgagaatgcgacagccaaggacattgcccctaccttaacactctatgtggggaaaaaccagctggtggagattgagaaggtagttctccaccccgagcgctctgtggtggatatcgggctgatcaagctcaaacagaaagtgcttgtcactgagaaagtcatgcctatctgcctgccttccaaagactacgtagcgccaggccgcatgggctatgtgtccggttgggggcggaatgtcaactttagatttactgaacgtctcaagtatgtcatgctgcctgtggctgaccaggagaagtgtgagctgcactatgagaaaagcacagtgcctgagaagaaaggcgctgtaactcctgttggggtacagcccatcttgaataagcataccttctgtgctggccttaccaagtatgaggaagacacttgctatggtgacgctggcagtgcctttgccgtccatgacacggaggaggacacctggtatgcagctgggatcctgagctttgacaagagttgtgccgtagctgagtatggtgtgtacgtgagggcaactgatctgaaggactgggtccaggaaacaatggccaagaactagttcagggctgactagagggctgcacacagtggggcagggcaattcaccctggaagaggaagtagaagggttggggacataatctgagggctgctagccctgcattgctcagtcaataataaaaaacgagctttggaccc

SEQ ID NO: 2854 - DNA, 1799 bp, Rattus norvegicus
  Genbank Accession No. K02422
acccttcagtcgtacagatggcgttctcccagtatatctccttagccccagagctgctactggccactgccatcttctgtttagtgttctgggtgttgagaggcacaaggacccaggttcccaaaggtctgaagagtcctcccggaccctggggcttgcccttcattgggcacatgctgaccctggggaagaacccacacctatctctgacaaagctgagtcagcagtatggggacgtgctgcagatccgcattggctccacacccgtggtggtgctgagcggcctgaacaccatcaagcaggccctagtgaagcagggggatgacttcaaaggccggccagacctctacagcttcacacttatcactaatggcaagagcatgactttcaacccagactctggaccggtctgggctgcccgccggcgcctggcccaggatgccctgaagagtttctccatagcctcagaccccacatcagtatcctcttgctacttggaggagcacgtgagcaaagaggctaaccatctaatcagcaagttccagaagctgatggcagaggttggccacttcgaaccagtcaaccaggtggtggaatcggtggctaatgtcatcggagccatgtgttttgggaagaacttccccaggaagagcgaggagatgctcaacctcgtgaagagcagcaaggactttgtggagaatgtcacctcagggaatgctgtggacttctttccggtcctgcgctacctgcccaacccagccctcaagaggtttaagaacttcaatgataactttgtgctgtctctgcagaaaacagtccaggaacactatcaagacttcaacaagaacagtatccaggacatcacaggcgccctgttcaagcacagtgagaactacaaagacaacggtggtctcatccctcaggagaagattgtcaacattgtcaatgacatctttggagctggatttgaaacagtcacaacagccatcttctggagcattttgctacttgtgacagagcccaaggtgcagaggaagattcatgaggagctggacacggtgattggcagagatcggcagccacggctttctgacagaccccagctgccatatctggaggccttcatcctggagatctaccgatacacatcctttgtccccttcaccatcccccacagcacaacgagggacacctcactgaatggcttccacattcccaaggagtgctgcatcttcataaaccagtggcaggtcaaccatgatgagaagcagtggaaagacccctttgtgttccgcccagagcggtttcttaccaatgacaacacggccatcgacaagaccctgagtgagaaggtgatgctcttcggcttgggaaagcgccggtgcattggggagatcccggccaagtgggaagtcttcctcttcttagccatcctcctgcatcagctggagttcactgtgccaccgggcgtgaaggtggacctgacacccagctatgggctgaccatgaagcccagaacctgtgaacacgtccaggcctggccacgcttctccaagtgaagatggccgagacatcggccgccacccttgttccttttcctttctttttaaataacagctttttcaagatacaattcctccaccatttaattcagctccaatcaattttcaatattgtctacactgttccctgcaaacccatacccattaagatttatgactattcctcctaccctgtttcgcttgctgtgccacgtgctaatctagtttttgactcaatagatttgccaactctggctg

SEQ ID NO: 2855 - DNA, 615 bp, Rattus norvegicus
  Genbank Accession No. K02816
tttcttcgagctcttcaggcagtgattctgacagcgaagttgaaaaaaagttaaagaggaaaaagcaagttgttccagagaaacctgtgaagaagcaaaagcctagtgagagttctagagcactggcatcctccaagcagagtagcagcagcagagatgataacatgttccagattggaaagatgagatatgtcagtgttcgggactttaaaggaaaaattctaattgatattagagaatattggatggactcagaaggtgaaatgaaaccaaggagaaaaggtatttctttaaacatggaacaatggagccagctgaaggaacagatctctgacatagatgacgcagtaagaaagctgtaaagtctgagccatatcaagcctgtactgtcgtagctgttttacttcgctgtcttttcacattggcttttgttttctaaaatgttgtttttcacgctgttgtatatttggattgcagaacaatttgtaagacaaatacttttttttaatgtgcattattaaaatgttctaagtgaagctaattgtcgactttattaaagaggattgctttgtgccccttacctagtgtaaaataaagtcagatcattacaatctt

SEQ ID NO: 2856 - DNA, 2639 bp, Rattus norvegicus
  Genbank Accession No. K03243
gaatgctggcagtgtgggtgctatgtaaaagtatttacatagctttgtagagtgagccaagcccagtctgtttgggatgactcttcacagtgcctcgaatctgtcacacgtcttagtaagcagagtcacagagtttctgtcacatcatcctcctgcctacagggaagtaggccatgtccctgccccctactctgagcccagctgtgggagccagccctgcccaatgggctctctctgattgacttctcactcacttctaaactccagtgagcaacttctctcggctcgttcaattggcgtgaaggtctgtgtcttgcagagaaggttcttcacaactgggataaaggtctcgctgctcaagtgtagcccagtagaactgccaagccccttcccctcctctccctagactcttggatgcaagaagaatccaggcagctccaagggtgattgtgtccaacctagaatgtcttgaaaaagacattaaggggactagagaagacaggggatccaacggttctctgcagcccagcctgactgacatgtaactcttctggttctcaccagccagctggacctgcttagtattctttctgcctcagtttcccagcctgtacccagggctgtcatagttccatttcaggcagtagtaatgaatgagctgacataaaacatttagagcaggggtcagtatgtatatagagtgattattctatatcaggcattgcctcctcggaatgaagcttacaatcacccctccctctgcagttcatcttggggtggccagaggatccagcagacacctagtggggtaacacaccccagccaactcggctgttgcagactttgtctagaagtttcacgtctcagagctgaattcccttctcatgacctttggccgtgggagtgacacctcacagctgtggtgttttgacaaccagcagccactggcacacaaaatgtgcagccagcagcatatgaagtccaagaggcgtcccggccagccctgtccttgacccccacctgacaattaaggcaagagcctatagtttgcatcagcaacagtcacggtcaaagtttagtcaatcaaacgttgtgtaaggactcaactatggctgacacgggggcctgaggcctcccaacattcattaacaacagcaagttcaatcattatctccccaaagtttattgtgttaggtcagttccaaaccgtgctgaccatggctatgatccaaaggccggccccttacgtcagaggcgagcctccaggtccagctgaggggcagggctgtcctcccttctgtatactatttaaagcgaggagggctagctaccaagcacggttggccttccctctgggaacacacccttggccaacaggggaaatccggcgagacgctctgagatctctgatccagaccttccaaaaggaggaagaaaggtaggcagggccattccactctcctctccaaaagtaccactgaggggtccactcacagtctttgccctgacaaccaaggccctctagccatgtgcaactcatgcaaagtctacagaaggaacgggaagggcccatgggtgccggtgttcaagagcctctctttttgtttcaggtggcaccagagtccctgcctctctccacaccattgcaagaatgcctcctcagctgcataatggtctggacttctctgccaaggtcatccagggcagcctcgacagcctgccccaggaagtgaggaagtttgtggaaggcaatgcccagctgtgccagccagagtatattcacatctgcgacggctccgaggaggagtacgggcggctgctggcccacatgcaggaggagggtgtcatccgcaagctgaagaaatatgacaactggtgagtcccttcagcccaaagtctctgcctacaggctccccagctctaccttctcggagtctggagaataaagacccttgcagtagcaaacgcctgagaagcttaggagatcagtcagaatccagacaccctgtgaggttagcatagccagcttctagattccagatagccatgcaaggcggcccctttccctagggccagctcatggcttagcaaatgtctacctggtcaagttcccgttggcttggcttccatacctaagtaacacggtcaacgtccttgtgtctgcaaggccgggaagagcctgaggtaggcaagagaggtacatccccaagggtaccttgctgaaggcatccctgtgactttttcagttggctggctctcactgaccccagggatgtggccaggatcgaaagcaagacggtcatcattacccaagagcagagagacaccgtgcccatccccaaaagtgggcagagccagctgggccgctggatgtcagaagaggacttcgagaaagcattcaacgccaggttcccggggtgcatgaaaggtgggtgaggccagaccccaggcctgacagtgtgctgtgtgcacgttcacgctcccggtagtagcttaagctgcaaagggtggcccgcgtgcgaagctccgcgtctggttctgtctcacggaatatcaaattgttctctgagagtacgggtggctccgacctgtcatctcagacatggaagctgaggcaggggcattcaaagtttaaggcc

SEQ ID NO: 2857 - DNA, 3097 bp, Rattus norvegicus
  Genbank Accession No. K03249
ggtgcaggataccttgagaaaatggctgagtatctgaggctgccccactccctggcgatgatccgcctctgcaacccgccagtcaacgccgtcagtccaactgtaatcagggaagtaagaaatggactccagaaagctggatcagaccacacggttaaagccattgtgatctgtggcgcaaacggaaacttctgtgcaggtgctgatatccatggctttagtgcttttacccctggccttgcattaggaagcttggtagatgaaatacagagataccagaagccggtgttggccgctatccaaggtgtggctctcggaggaggactggagctggccttgggctgtcactatcggattgccaatgcaaaggctcgtgtcggcttgccagaagtcacactggggattcttcctggtgcaagaggaacccagcttctccccagggtcgttggagttcctgttgctcttgacctaattacctcaggaaaatatctttcagcagatgaagcactcaggcttggaattctggatgcagtcgtgaagtcagacccagttgaagaagccatcaaatttgctcagaagattatagataaacccatagaaccccgcaggatctttaacaagccagttccaagcttgcccaacatggacagtgtttttgcagaagccatcgccaaggtacgaaaacagtaccctggtgtcctggctccggagacgtgtgtccgctcaatccaggcctctgtgaagcatccctacgaagtaggcatcaaggaagaggaaaagctgtttatgtacctccgggcatccgggcaggctaaagccctacagtatgccttctttgctgaaaagtctgcaaataagtggtcaactccctcaggagcgtcttggaaaacagcctctgctcaacccgtctcctcagttggcgttcttggcttgggaacgatgggccgaggcatcgccatttcttttgcgagagtggggatctctgtggttgctgtggagtcagacccaaagcagctagatgctgcaaagaagataatcactttcaccttggagaaggaagcatccagagcgcatcagaacggccaagcttcggcaaaaccaaaactcaggttctcctcatccacaaaggaactttcaactgtggatttggtggttgaagcagtgttcgaagacatgaacctgaagaaaaaggtctttgctgagctgtcagccctgtgcaagccaggagcctttctgtgcaccaatacctcggcgctgaacgtggacgacattgcttcttccacagatcgccctcagctggtgattggcacccacttcttctcaccagcccatgtcatgaggttgctagaggtcattcctagccgatactcttcccctactaccatcgccacggttatgagcttgtccaaaaagatcggaaagattggagtagtggttggcaactgctatggatttgttgggaatcggatgttggctccctattacaaccaggggtttttcttgttagaggaaggtagcaagccagaggatgtagacggggtcttggaagagtttggttttaaaatgggacccttcagagtgtcagacctcgcagggctagatgtgggttggaaaattcgcaaggggcaaggccttactggaccatcattgccaccagggacccccgtccgaaagaggggcaacagcaggtactccccacttggcgatatgctctgtgaagctgggcggtttggtcagaagacaggtaaaggctggtatcagtatgacaagccactgggtcgcatccacaaacctgatccctggctttctacgttcctgtcacaatatagagaggttcaccacatcgagcagcgcaccatcagcaaggaggagatcctggagcgttgcttatattccctcatcaatgaggcgttccgcatcttggaggaggggatggctgctcgcccagagcacattgatgtcatctacttgcacgggtacgggtggccaaggcacaagggcgggcccatgttctatgctgcctcagttgggttgcccacagttctagagaaactgcagaaatattacaggcagaaccctgacatcccccagctggagcccagtgactacctcagaaggctggtagcccagggaagccctcctctgaaggaatggcaaagcttggcagggccccacggcagcaaactgtgattcagccttctgcgttttgccacgtatgttggcacctaatttcagtatgattccttcctaaaatccaaacagatcgctctgaagtacaaatcatgattgctgctgctgctgctgctgatagctggtcagtaaaagctcctctccgtatctttctacctcataattccaatggtcagacttcaggaatgtctacagttagtctatacctctgactgcacttctatcggaaaaattcaacgaatgtatgtttactactacaagcattcttctcttttgactgtttgcccactctaacaaaaacgtatacaaaatgttgctaatagaataattcacacctccagttgacaacccaaatggccttagcagatcaacacaggtggcatatacacgcacttgacacattccagctgtgtgaagttactgccacctgttgtaacatggtgctgggttagagcactgttctgagtgaggggaggcaggcagagaaggcaggcagataaggccacacatcatatggatgtggatataaaattccaggatatgcaggtctgtggacaacatagatgagtagcccaaggctgtaactgttcatacatgcatatattttttggtccttttttttttcggagctggggaccgaacccagggccttgcgcttcctaggtaagcgctctaaccactgagctaaatccccagccccgaggctgtaactgttagaggttaaaaatcactactgattagtacagagtatctttgggagctgataaaattttctaaaattactctagtggtggatctgtaacacattgagttcaatggttcaaagtgaattatattttatatatatatatatatatatatatatatacatatatatatagtctatctcaataaagttaataaaatt

SEQ ID NO: 2858 - DNA, 1614 bp, Rattus norvegicus
  Genbank Accession No. K03501
ttgctggtgctcactctcacctgtcttattctcctgtcaatctggagacagagttctgggagaggaaagctccccccaggccctattcctctcccaattattggcaatatctttcagctaaatgtgaagaacatcacccaatccttaaccagtttctcaaaagtgtatggtcctgtatttactctttactttggcacgaagcccactgtgatattgcatggatatgaagcagtaaaagaagccttgattgatcatggggaggagtttgctgaaagaggaagcttcccagtagctgaaaaaattaataaagaccttggaattgtttttagccatggaaatagatggaaagaaataagacgctttaccctcacgactctgcggaatttgggcatggggaaaaggaacattgaggatcgtgttcaagaggaagcacggtgccttgtggaggaactgaggaaaaccaatggctcaccctgtgaccccacgtttatcctgggctgtgctccttgcaatgtcatctgctccattattttccagaatcgttttgattataaagatcaggattttcttaacttgatggaaaaactcaatgagaacatgaagattttgagcagtccctggacacagttttgcagttttttccctgttttaattgattattgtccgggaagtcatacgacattagctaaaaatgtgtatcatattagaaactaccttctgaagaaaataaaagagcatcaagaatcactggatgttacaaatccccgggactttattgattattacctaattaagtggaagcaggaaaatcacaatccacattcggaatttacacttgaaaacttatcaatcactgtgactgatttgtttggtgctgggacagagacaacaagcacaacactgagatatgctctgttgctcctgctgaagtgtccagaggtcacagctaaagtccaggaagagattgatcgtgtggttggcaaacatcgcagcccttgcatgcaggacaggagccgcatgccctacacagatgcccatgatcatgaggtccagaggttcattgacctcattcctaccaacctgccacatgcggtgacctgtgacattaagttcaggaactacctaatacccaagggaacaacaataataacatcactctcatcagtgctgcatgacagcaaagaattccccgacccagagatatttgaccctggccactttttagatgggaatggaaagtttaagaaaagtgactatttcatgcctttctcagcaggaaaacggatgtgtgcaggagagggcctagcccgcatggagttatttttattcctgaccacgattttacaaaactttaagctgaaatctgtacttcacccaaaggatatcgatacaactccagttttcaatggatttgcctctctgccaccattttatgagctgtgcttcattcctctctaaagagatcaaattggctggggatttagctcagtggtagagcgcttacctaggaagcgcaaggccctgggttaggtccccagctccgaaaaaaagaaccaaaaaaataaataaataaataaataaataaataaataaataaataaataaataaataaa

SEQ ID NO: 2859 - DNA, 486 bp, Rattus norvegicus
  Genbank Accession No. L00111
tattctttttttcctcctaggttacacaataaagataaactctaattcttttcatgtataattaaagtcatgtgtcagaaaggctgatggaagacacatatatttgcatccttcttggtactgaaacccttctccctatgacaggaaataaagctaagtgcagaataagctcaccatagttggctattgtgcatcgtgttgtatgtgattctatatccataacatgacagcatggttctggcttatctggtagcaaatctagtccccataaaccaccctgtcgatgttgataactctgctaaacctcaagcggatatgaaaccactgcctcttggtcttctggggacacatggtaatgttgtgactcaatggaaccatatgcttaaagaactgttaatgttgtcacttgtgagcttaatcaaaattaaaaaatatgtattttcgatatcctcaagtggagtctttgctgttacttatactgtgttt

SEQ ID NO: 2860 - DNA, 2350 bp, Rattus norvegicus
  Genbank Accession No. L00191
gtgcccggaagcaagtccaccgccaccatcaacaacattaaaccaggagcagactacaccatcaccctgtatgctgtcactggccgtggggacagtccagccagcagcaagccagtttccatcaattatcaaacagaaattgacaagccatcccagatgcaggtgacggatgtccaggacaacagcatcagtgtcaggtggctgccttcaacttctcctgtgacaggttacagagtgaccaccgctcccaaaaatggcctaggaccaacaaaatctcaaactgtcagtccagatcaaacagaaatgaccattgaaggtttgcaacccaccgtggagtatgtggttagtgtctatgctcagaaccggaacggagaaagccagcccctggttcagactgcagtgaccaccattcctgcgccaaccaatctgaagttcactcaggtgtcacccaccaccttgactgcccagtggacagcgcccagtgttaagctcactggctaccgagtgcgggtgaccccgaaggagaagacaggaccaatgaaagaaatcaacctttctccagacagcacctccgtgattgtgtcagggctcatggtggccaccaagtatgaagtcagcgtctatgctctcaaggacacattgacaagcagaccagctcagggagtcgtcacgactctggagaatgtcagccctccaagaagggcccgtgtgaccgacgctacagaaactaccatcactattagctggagaacgaagacagagacgatcactggcttccaagtcgatgccattccagccaatggccagaccccggttcagaggaccatcagcccggatgtcagaagctatactattacaggtttacagccaggcactgactacaagatccacctgtacacgctcaacgacaatgcccggagctctcctgtggtcattgatgcctccacggccattgatgccccatccaacctgcggttcctgaccaccacacccaactccttgctggtatcatggcaggcaccccgtgccaggattactggctacattatcaagtatgagaagcctggatcccctcccagagaagtggtccctcggccccgccctggtgtcacggaggccaccatcactggtttcccatcaggtctggagccaggaaccgagtacaccatctatgtcatcgcactgaagaacaatcagaagagtgagcccctgattgggaggaaaaagacaggtaaagactcctaaccgaccgttggtttgcagggtgaagttctctacgttttgacacatcgctcctggatttttttttttctagcagaatggcttatatattgtactattaggcacaaatcacctaacatgctctaaaaatgtcttatttatttttctacagccttaagcttcttttaccttgcagaaattcaaattagattgtttgaattggggttgaggtgggggggggctttttaatggtgagagtaaaacctctccgatttgtgttgatttgtttattatttgatttctgaacttcagatatttcagttagttgcaaaggcttaactggagcagagatggctgtctgtggggctcagcggttcaaagctttgtctgtatgagaattcaaactaacattttttcccccatctaaactataaagaaatctgtgaaaagaagaaaaaatccagatttctttctagagtgttctgtgatctgagaaccgctggctgtctgggagcattgatcgggttgatatacagttgttgcctggattgatggtgattggttgcttcttctttgagcttaacgcgctttgcttttttggctctaacctctctcttggctagatgagcttccccaactggttacccttccacaccccaatcttcatggaccagagatcttggatgttccctccacagttcaaaagacccccttcgtcaccaaccctgggtatgacaccgaaaatggtattcagcttcctggcacatcccaccaacaacccagtgttgggcaacaaatgatctttgaggaacatggctttaggcgaaccacgccacccactgcggccacccccgtcaggcttaggccaagaccatacctgccgaatgtagatgaggaggtccaaatcggtcatgttcccaggggagacgtagactaccacctctatcctcatgttccggggctcaatccaaatgcctctacaggacaagaagctctctctcagacaaccatctcttggacgccattccaggagagttctgagtacatcatttcatgccaacctgttggcactgacgaagagcccttacaggtatatattacagcccttattatgagtgtctctctagat

SEQ ID NO: 2861 - DNA, 966 bp, Rattus norvegicus
  Genbank Accession No. L01267
cagcgtccggctctggactgtctatcgctctctgacgttcagtcccgggtcgctgcttgtgcgcgcacgccgcctcacacgacaaacttatggcggagcgcggggaactcgatctgacgggcgccaaacagaacaccggcgtgtggctggtgaaggttcctaaatatttgtcccagcaatgggcaaaagcccctggaagaggtgaagttgggaaactgaggattgccaagaatcaaggaaggactgaggtatcatttactttgaatgaggatcttgcgaatattcatgatatcggtgggaaaccagcttcagtcagtgctcctagagaacatccatttgtcttgcaaagtgttggaggacagacattaacagtgttcaccgagagctcctcagataaactgtcattggaaggaatagtggttcagagggcggaatgccgacctgctgccagtgaaaactacatgaaactaaagagattgcaaatagaagaatcttccaaacctgtaaggctctcacaacaggctgacaaagttgtaaccaccaattacaagcctgtcgctaaccatcagtacaatattgaatatgaaaggaagaagaaagaagatggaaagcgagctcgggcagacaaacaacacgtcctagacatgctgttctcagcctttgagaaacatcagtactataatcttaaggacttggtggacatcacaaagcaacctgtgggatacctgaaagaaatcttgaaagaaatcggcattcagaatgtaaaaggaattcacaagaatacgtgggagctgaagccagagtacaggcattaccaaacagaggagaagagcgactgagagaagcgtgtgcaacagttacaggcagatctctgccaccacacgctgactgcctgcccaccctgacaggacaaagacaactgagtctgtctgccattcctcagtaaactgttaaagctgggactcc

SEQ ID NO: 2862 - DNA, 8806 bp, Rattus norvegicus
  Genbank Accession No. L06096
ccggatcgtccaagtcgccgggctgcgaggtggcactgcgctcctttccgcccagcgcgcctcagtcctctgcaccgagcctggcagctcgcttctgggcgactttgccgcctcgagccccggaggccaaagccatgaatgaaatgtccagctttcttcacatcggggacattgtgtccctgtacgccgagggctctgtcaacggcttcatcagcactttggggctggtggatgaccgttgtgtggtggagcctgcagctggggacctggacaacccccccaagaagttccgagattgcctcttcaaagtgtgccccatgaaccgctactccgcacagaagcagtactggaaagccaagcagactaagcaggacaaagagaagatcgccgatgtggtgttgctgcagaagctgcagcatgcagcccagatggagcagaagcaaaacgacacagagaacaagaaggtgcacggggacgtggtgaagtacggcagcgtgattcagcttctgcacatgaagagcaacaaatacttaacggtgaacaagcggctgccggccctgctggagaagaacgccatgcgggtgacgctggacgcgacgggcaacgagggctcctggctcttcatccagcccttctggaagcttcggagcaatggggataacgtggttgtgggggacaaggtgatcctgaaccctgtcaacgcagggcagcctctacacgccagcaactatgagcttagtgataacgttggctgcaaggaggtcaactctgtcaactgcaacaccagctggaagatcaacttattcatgcagttccgggaccatctggaggaggtgttgaaggggggagacgtggtgcggctgttccatgcagagcaggagaagttcctgacctgtgacgagtaccggggcaagcttcaggtgttcctgaggaccacgctgcgtcagtccgccacctcggccaccagctccaacgcgctctgggaggtggaggtggtccaccatgacccctgccgcggcggagcgggacactggaatggtctgtacaggttcaagcacctggccacgggcaactatctggcggctgaggaaaaccccagctacaagggtgatgtctcagatcctaaggcagcaggaccaggggcccagagccgcacaggccgcagaaacgccggcgagaagatcaagtaccgtctggtggctgtgccacatggcaacgacatcgcgtctctcttcgagctggaccccaccacgctgcagaaaaccgactccttcgtgccccggaactcctacgtgcggctgcggcacctctgtaccaacacctggatccagagcacgaacgcgcccatcgacgtggaggaggaacggcctatccggctcatgttgggcacgtgccccaccaaggaggacaaggaggcctttgccattgtgtcggttcccgtgtctgagatccgcgacctggactttgccaacgatgcaagctccatgctggccagcgctgtggagaaactcaacgagggcttcatcagccagaacgaccgcaggtttgtcatccagctgttggaggacttggtgttttttgtcagcgatgttcccaacaatgggcagaatgtcctggacatcatggtcaccaaacccaaccgagagcggcagaagctgatgcgggacgagaacatacttaagcagatctttggcatcctgaaggctccattccgtgacaaggggggtgaagggccattggtgcgtctggaggaactgtctgaccagaagaacgccccctaccagtacatgttccgcctgtgttaccgggtgctccggcactcccaggaggactaccgtaagaaccaggagcacatagccaagcagttcgggatgatgcagtcacagattggctatgacatcctggccgaagacaccatcacggccctgctgcacaacaaccggaagctgctggagaagcacatcaccaagaccgaggtggaaaccttcgtgagcctcgtgcgcaagaacagggagcccaggttcctggactacctctccgacctgtgcgtgtccaaccgcattgccatccccgtcacccaggagctgatttgcaagtgtgtgctggaccccaagaacagtgacatccttatccagactgagcttcggcccgtgaaggagatggctcagtctcacgagtacctcagcatcgagtactcggaggaggaggtgtggctcacatggacggacaggaacaacgagcatcacgagaagagtgtgaggcagctggcccaggaggcaagggccggcaacgcacacgacgagaacgtgctcagctactacaggtaccagttgaagctgtttgcccgcatgtgcctagaccgccagtacctggccatcgacgagatctccaagcaactgggtgtggagctgcttttcctatgcatggcggacgagatgctgccctttgacctccgcgcctcattctgccacctgatgctacatgtgcacgtggaccgtgacccccaggagctggtgacccctgtcaagtttgcccgcctctggacagagatccccacggccatcaccatcaaagactatgattccaatctcaacgcctcccgagatgacaagaaaaacaagtttgccagcaccatggagttcgtggaggattaccttaacaacgtggtcggcgaggccgtgccctttgccaacgatgagaagaacatactgacctttgaggtggtcagcctggcacacaacctcatctacttcgggttctacagcttcagcgagctgctgcgactcacacgcacgttgctgggcatcatcgactgcattcaggcaccagccgctgtgctgcaggcctatgaggagcctggcggcaagaacgtgcggaggtccatccagggggtgggacacatgatgtccaccatggtgctaagccgcaagcagtctgtatttggtgcctccagcctgcctactggagtgggtgtccccgagcagctggacagaagcaaatttgaggacaatgaacacaccgtggtgatggagaccaagctgaagatcctggagatcctgcagttcatcctcaacgtgcgcctagactaccgcatctcctacctgctgtcggtcttcaagaaggagtttgtggaggtctttcccatgcaggacagcggggcagacggcacagcccccgccttcgattcctctactgccaacatgaatctggaccgcatcggggagcaggcagaggccatgtttggagtagggaagaccagcagcatgctagaggtggatgacgaagggggtcgcatgttcctgcgagtgctgctgcacctcaccatgcacgactacccacctctggtctccggcgccctgcagctgctcttcaaacatttcagccagcgccaggaggccatgcacaccttcaagcaggtgcagctgctcatctcagcccaggatgtggagaactacaaagtgatcaagtcggaactggatcgactgcggacgatggtggagaagtcggagctgtgggtggacaagaaaggcagcgtcaagggcgaggagggggaggcgggcgccagcaaggataagaaggagcggccctcggatgaggagggatttctgcagccacacggggagaagagcagtgagaactaccagattgtcaaaggcatcctggagaggctgaacaagatgtgtggggtcggggagcagatgcgaaagaagcaacagagactgctgaagaacatggacgcccacaaggtcatgctggacctgctgcagatcccttatgacaagaacgacaacaagatgatggagatcctgcgctacacacaccagttcctacagaagttctgtgccgggaaccctggcaaccaggcccttctgcacaagcacttgcagctcttcctcacgcccgggctcctggaggctgagaccatgcagcacattttcctcaacaactatcagctgtgctctgagatcagcgagccggtgctgcaacacttcgtgcactgctggccgacacacgggcgccacgtgcagtacctggacttcctgcataccgtcatcaaggccgagggcaagtacgtgaagaagtgtcaggacatgatcatgaccgagctgaccaacgcaggcgacgacgtggtggtgttctacaatgacaaggcctctctggcccatctgctggacatgatgaaggcagcccgagatggcgtggaggaccacagccccctcatgtaccacatctccctggtggacttgctggctgcctgtgcagaaggcaaaaatgtctacacagagatcaagtgcacttccctgctgcctctagaggacgtggtgtcggtggtgacccacgaggactgcatcacggaggttaaaatggcgtatgtgaacttcgtgaaccactgctatgtagacacggaggtggagatgaaggagatctataccagcaaccacatctggacgctcttcgagaacttcaccctggacatggctctggtctgtaacaagcgggagaagcgcctgtcagaccccacccttgagaagtacgtgctcaccgtggtgctggacaccatcagcgccttcttcagttccccattttcagagaacagcacatccctacagacgcatcagacaattgtggttcagctgctgcagtccaccacccggctgctcgagtgtccttggctgcagcagcagcacaagggctcggtggaggcctgtgtccgcaccctcgccatggtggccaagagtagagccatcttgctgccgatggatctggatgcccacatgagcgctctgctcagcagtgggggcagctgctcagccgcggcccaacgcagcgctgccaactacaagacggccacgaggaccttccctcgggtcatccccaccgccaaccagtgggactacaagaacatcattgagaagttacaggacatcatcacggccctagaagagcggctgaagcctctggtgcaggccgagctctcggtgctggtggacatgctgcactggcccgagctgctctttctagagggcagtgaggcctaccagcgctgcgagagtggcggcttcctgtccaagctcatccgtcacaccaagggtctcatggagtcggaggagaagctgtgcgtgaaggtgctgcggacgctgcagcagatgctgcagaagaagagcaagtatggggaccggggcaaccagctaaggaagatgctgctgcagaattacctccagaaccggaagtccggtccccggggcgagctcactgaccccacaggctctggcgtggatcaggactggtccgccatcgcagccacccagtgccggctggacaaggagggggccaccaagttggtgtgtgatctcatcaccagcaccaagaacgagaagatcttccaggagagcatcggcctggccatccgcctgctggacgggggcaacactgagatccagaagtctttctacaacctgatgacaagtgacaagaagtcagagcgcttcttcaaagtgctgcatgaccgcatgaagcgtgcccagcaggagaccaagtccacagttgccgtcaacatgagtgacctgggcagccagcctcgtgaggaccgtgagccagcagaccctaccaccaaaggtcgcgtgtcctccttctccatgcccagctcctcccgatattcgctgggccctggcttgcaccgggggcacgacgtgagcgagcgtgcgcagaacaacgagatggggacctcggtgctcatcatgcggcccatcctgcgcttcctgcagctgctgtgtgagaaccataaccgggacctgcagaacttcctgcgctgtcagaacaacaagaccaactacaacctcgtgtgtgagaccctgcagttcctggacatcatgtgtggcagcaccacagggggcctggggctgctggggctctacatcaacgaggacaatgtgggcctggtcatccagaccttggagaccctcacagagtactgccagggcccgtgccatgagaaccagacctgcatcgtgactcacgagtccaacggcattgacatcatcacggcgctgatcctcaatgacatcagcccgctctgcaagtaccgcatggacctggtgctgcagctcaaggacaatgcctccaagctgctcctggctctgatggagagtcgacatgacagcgagaatgcagaacgcatcctcatcagccttcggcctcaggagctggtggacgtgatcaagaaggcctacctgcaggaggaggagcgggaaaattccgaagtgagcccacgtgaagtgggccacaacatctacatcctggcactgcagctttccaggcacaacaagcagctacagcacctgctgaagccggtgaagcgcatccaggaggaggaggccgagggcatctcttccatgctcagcctcaacaacaagcagctctctcagatgctcaagtcctcagcccctgcccaagaggaggaggaagacccgctggcctactatgagaaccacacctcgcagattgagattgtgcggcaagaccgaagcatggagcagatcgtgttcccggtacctgccatctgccagttcctgacagaggagaccaagcaccggctcttcaccaccacggagcaggacgagcagggcagcaaagtgagcgacttcttcgaccagtcctccttcctgcacaacgagatggagtggcagcgccggcttcgcagcatgccgctcatctactggttctcccgccgcatgacgctgtggggtagcatctccttcaacctggcagtgttcatcaacatcatcattgccttcttctacccctacgtggaaggcgcgtccacgggcgtgctgggctccccactcatctcgctcctcttctggatcctcatctgcttctccattgccgcgctgttcaccaagcactacagcgtccgtcccctcattgtggcactggtccttcgctccatctactacctgggcattgggcccacgctcaacatcctgggtgctctcaatctgaccaacaagatcgtgtttgtggtgagctttgtgggcaaccgcggcaccttcatccgtggctataaagcaatggtcatggacatggagttcctgtatcacgtgggctacatcctgacgagtgtcctgggcctctttgctcatgagctcttctacagtatcctgctctttgacctcatctaccgagaggagacgctgtttaatgtcatcaagagcgtgacccgcaatggccgctccatcctgctaactgccctgctggccctcatccttgtctacctcttctccatcgtgggcttcctcttcctcaaggatgacttcatcctggaggtggaccggctgcctgggaaccactccagagccagcaccctggggatgccacacggagctgccacatttatgggcacatgtagtggggacaagatggactgtgtctctgaggtctcggtgcctgagatcctagaagaggacgaggagctggacagcacagagcgggcctgtgatactctgcttatgtgtattgtcaccgtcatgaaccacggactgaggaacggtggcggcgtgggcgacatcctccgcaagccctccaaagacgagtcgctcttcccagccagggtggtgtacgacctcctgttcttcttcattgtcatcattattgtcctgaacctcatctttggggtgatcatcgacaccttcgccgacctgcgcagcgagaagcagaagaaagaggaaatcctcaagaccacgtgcttcatctgtggtctggagagggacaagtttgacaacaagacagtgtcctttgaagagcacatcaaactggagcacaacatgtggaactacctgtacttcattgtgctggtccgtgtcaagaacaagacagactacacgggccccgagagctacgtggctcagatgatcaagaacaagaacctggactggttcccacggatgcgcgccatgtccttggtgagcggcgagggcgagggcgagcagaacgagatccgcatcctgcaggagaagcttggctccaccatgaagctggtctcgcacctcaccgcccagctcaatgagctcaaggaacagatgacggagcagcggaagcggaggcaacgtctgggcttcgtggacgtgcagaactgcatgagccgctgagcagagcggagcctcggaggcccccacgggaggccggcttgcccacagctgccgcccttccttcaggtcaggtagaagccaggtgcctgccccatcttcagctcagctgccaccctccctccccaagccaggctctggccagcgggagtgccagagcagagcacggtcctgcttagtaagtacccttgaagagactcggtttaccttagtgccttaggggatgcaagttctccagactgctgtccttcgaagcagtgactggcatttctcagtggccctggcaggtggttaaaagtgggctggctctcacctccaagcactacattgtggctgtcccctgcctgccaccctggctaggaaggtggtagcctgctgttattagcttcctagggctttgatatttaacttattctgggggccatcccaacctcctgtggcctgctggggacagtgtggccccgtcccaggagcctcatgactcaggtggaccttgctcccaggactttctctaggctttgtaggcaagcctcacaagcccagcaacaggcctgggctgtgtgacagtggcttctctctttttggtgtaatgttttacatgtcctgtgtcctggagactaatgtgttaattgccttaaataaattaatagactccaaaaaaa

SEQ ID NO: 2863 - DNA, 2146 bp, Rattus norvegicus
  Genbank Accession No. L07073
cggacccggcaccgaatcactgactcgcccaggtgtcgggaaaatgatccacagtctatttctcatcaactgttctggcgacatatttctagaaaaacactggaagagcgttgtaagccaatctgtgtgtgactatttctttgaagctcaggagaaagctgctgatgttgaaaatgtaccaactgtcatttcaacacctcaccactacctcattagtatctaccgggataagctcttctttgtgtctgtgatacagactgaagtgccacctctctttgtaattgagtttctgcatcgagttgctgacacttttcaggactactttggtgagtgttcagaggctgcaattaaggataatgtggtcatagtgtatgagctcttggaagaaatgttagacaatggattcccactggctaccgaatctaacattctgaaagaactgattaaaccaccaacaattctacgttctgtcgtcaattctattacaggcagtagtaatgttggggacacgctccccactgggcagctgtccaacatcccatggcgtcgagcaggtgtaaagtacaccaacaatgaagcctactttgatgtagtcgaagagatagatgcgattatagataaatcaggatctacagtctttgcagaaattcaaggtgtcattgatgcttgcattaagctgtctggaatgcctgatctctctctctctttcatgaacccaaggcttctagatgatgtcagcttccacccatgcatccggttcaaacgctgggaatctgagagagttttgtcattcattcctcccgatggaaatttccgactcatatcataccgcgtcagctcacaaaatctagtggcaatcccagtgtatgtgaaacataatatcagctttaaggaaaacagctcttgtggtagatttgatataacaattggaccaaaacagaatatgggaaaaacgattgaaggaatcacagtgactgttcacatgccaaaagttgtgctgaatatgaacctgacaccaacacaaggcagctatacattcgatccagtcaccaaggtactagcatgggatgtggggaaaattactccacaaaagctcccaagtcttaaaggactggtaaatttacagtcaggagcacccaagccagaagagaacccaaacctcaacatacagttcaagatccagcagcttgctatttcaggcttaaaagtgaaccgcttggacatgtatggtgagaagtataagccatttaaaggagtcaagtatatcacaaaggccggaaagttccaagtgaggacatgagaagaggccagacttgctcaagatcagtttgttttgcaagtgtcattgcggtttcttactattaggtaccaagtgggtgggaataatatagagcatctgggtcaagctaccctgctaacaaagttgcttagtaatgatgtaggctcctcaggagctttaagctaaggaaagttttctaaagacttagcttattttgtatcttttcacttaggaaaaggtttaggtgatttttttccatgggggccaccagctgaatgctgcccatgggtaacagtcaaggcagaaggctacagtgataacctctctcctaaagcaagtgaactggtctcatcttccagcaggaactgtctcagtctatgaggtgtcagctgtagccaagggtcacaccttctgatcttagccatctcaatcagtgtctgtcccaagagaggagattgcccccacccccaagaagtttacagaaaactgcctcttcaagtgtttgccttactcagcttttcacttgtgccattaagcaagcactgtagcaaaagccacttccacatggcccaggcagggagccctgcagctccatgctccattcctcacctggttaaccttgggtattatattttttataaataagatttttatgtaaagctcagattttgatttacaagaccttgctgcagtaaatattccatcaatcttgagccaccagttcagctgttagatagcacagtcaaatcatttgcatcaaaagggcaaatactttattaagataatgaaagggaacactacttctgctgttaggcacaagtgtctgtgcttttaaacaaattcaagtagtaaaagagaaaatcaagc

SEQ ID NO: 2864 - DNA, 456 bp, Rattus norvegicus
  Genbank Accession No. L07398
acactgtttactctacattcactaattcacaaggtccttatcatgaaatgcagctggatcaacctcttcttgatggcactagcttcaggggtctacgcagaagtacagctgcagcagtctgggcccgagcttcggagacctgggtcctcagtcaagttgtcttgtaaggcttctggctacagcattacagattaccttatgcactgggtaaagcataggccagaacacggcctggaatggataggatggattgatcctgaggatggtgaaacaaaatatgctcagaagttccaaagcaaggccacactgactgcagatacatcctccaacacagcctacatgcaactcagcagcctgacgtctgaggacacagcaacctatttttgtgctccccatactatgggtataactccctttgcttactggggccaaggcactctggtcactgtctcttca

SEQ ID NO: 2865 - DNA, 4377 bp, Rattus norvegicus
  Genbank Accession No. L07736
agtcggtcgactccgagctcagtgaggacctaaagcagaggactgtggtgcggaggacagtgcttgctccggggagtgcagagcaataggtccccactcaagatggcagaggctcaccaagctgtggccttccagttcaccgtcacccccgatggcattgacctccgcctgagccacgaagccctcaaacagatctgcctgtcggggctgcactcctggaagaagaagttcatccggttcaagaatggcatcatcactggtgtgttccccgcgaatccgtccagctggcttatcgtggtggtgggtgtgatttcatccatgcatgccaaagtggacccctccctgggcatgatcgcaaagatcagtcggaccctagacaccactggccgcatgtcaagccagacgaagaacattgtgagcggcgtcctctttggtacagggctctgggtggcagtcatcatgaccatgcgctactcgctgaaggtgctgctctcctaccacggctggatgtttgcagaacacggcaaaatgagccgcagcaccaagatctggatggctatggtcaaggtcctctcaggtcggaagcccatgttgtacagcttccagacgtctctgccacgcctgcctgtcccagctgtcaaagatactgtgagcaggtacctggaatctgtaaggccactgatgaaggaagaagacttccagcgcatgacagcactggcccaggattttgctgtcaacctcggacccaaattgcagtggtatttgaagctaaaatcctggtgggccacaaattacgtgagtgactggtgggaagaatatatctacctgcggggccgagggccgctcatggtcaacagcaactactacgccatggagatgctgtacatcaccccaacccatatccaggcagcgagagctggcaacaccatccacgccatactgctgtatcgtcgcacattagaccgtgaggaactcaaacccattcgtcttctgggatccaccattccactctgctcagcccagtgggagcgactcttcaatacttcccggatccctggggaggagacagacaccatccaacatatcaaggacagcaggcacattgttgtgtaccacagagggcggtacttcaaggtctggctctaccacgatgggaggctgctgaggccccgagagctggagcagcagatgcagcagatcctggatgatccctcagagccacagcctggggaggccaagctggccgccctcactgctgcagacagagtgccctgggcaaagtgtcggcagacctattttgcacgagggaaaaataagcagtccctggatgcggtggaaaaggcagcgttcttcgtgacgttggacgaatcggagcagggatacagagaggaggatcctgaggcatccatcgacagctacgccaaatccctgctgcatggaagatgctttgacaggtggtttgacaagtccatcacctttgttgtcttcaaaaacagcaagataggcataaatgcagagcactcctgggcggacgcgcccatcgtgggccatttgtgggagtatgtcatggccaccgacgtcttccagctgggttactcagaggatggacactgtaaaggagacaccaaccccaacatccctaagcccacaaggctacaatgggacattccaggagagtgccaggaggtcatagatgcatccctgagcagcgccagtcttttggcaaatgatgtggacctgcattccttcccatttgactctttcggcaaaggcttgatcaagaagtgccggacgagtcccgatgccttcatccagctggcgctgcagctcgcacattacaaggacatgggcaagttctgcctcacatatgaggcctccatgacccggctcttccgagaagggaggacagagactgtacgctcctgcactatggagtcctgcaactttgtgcaggccatgatggaccccaagtcaacggcagagcagaggctcaagctgttcaagatagcttgtgagaagcaccagcacctgtaccgcctcgccatgacgggcgccggcatcgaccgccatctcttctgcctctatgtggtgtccaagtatcttgcagtcgactcacctttcctgaaggaggtattgtctgagccatggaggttgtctacgagccagactcctcagcagcaggtggagctctttgactttgagaaaaaccctgactatgtgtcctgtggagggggctttgggccggttgccgatgacggctatggtgtctcctacattatagtgggagagaatttcatccacttccatatttcttccaagttctctagccctgagacagactcacaccgctttgggaagcacttgagacaagccatgatggacattatcaccttgtttggcctcaccatcaattctaaaaagtaaacccctgagccacacggaaggaaaacggaccctcgtgatacaaaccaaatgaatagatgttgctcctgaccataggacaggcagaaaattgctcttataaaactcagttttccttccagaaggtttaccgtcagtctccctagaacaacagtaggcttcacgtgtgaattgtgaccctactacatccagagatgccttggctccaggaatattgggcacagtcccctgatgtcttttgaatcggctcctactggataaagggatttaaatgctggtgaattcctggattctgggggttgtttcttcacatgtgttggaggtgacagacttcctcagtggtgaccctgtgaatacttgggcgtctgactccacccaggcagtgtgagcatcaccttgtggaaagagaaagtgtcttcagagccagcagaggcaacagctgtagctaacacatctgtaacacactaatggaatggttaggcctggggattaaggttctgctatgagtgacagccactgtccctttggaagttcacatttccaggaagcagagtaccacctccccagtgccaccttcctcacacatcttcaaaacccagtgccttaaagaaggggcccattggcaagcgggaccatagagaagacttagcatctgtgaagcctttgggtggatatgtgaggatgctgcttccccttactggttcctgcataaagatgtccctaagtaagcacttcccccacccctagaaaatgaggtccttggtgaaggcagggatgctggagtctcattgcctgccagttccattaagccacaaaatagcagacatgtgtccacagagggaggggcttggtagtcaaaggctgcatagctggacaacagcgggagagtgtggcttgctgtatttgacagctgttggcaagaggagtgagaccctggtcaccaagtcagacatactgacacaggcagccaaagctcacggagccaggagatatagatagatactggcttgtattctggcagatacacccctgggcttatcttctaatcccacccagtcagattccaaccagagtcaaattccatagaaggctaggtcattttggcgacagactcagggatctcaagtaatgggtgcttttacccacatgccatccctcagtgggagtgcctttcttgaaagcatccaatgggctaaagcagctctaccaagtctgtttggtatttaatgtaaacattagcattaatggagtggtctctcctacctgtcaccatcctgtcctgacaagcttagctctccgaggtttacatcatgtatttattttccagtgcccctttggccttgtttgattcctgcccctgtgccagaagtggcccagaagtgaggggtggggtgaccagcagtgcagagaggtgctggctgaacagttcatgtgtgtcttatgggtatacatgtataaattttgtaatgtaaaaaaaaaaatcatacctaaaagggccaaagttttttttttttttactaaaaccaagaaaacaaaagacaacataaagacataagcagaaacaaactgttgtaagtcagagcggcctgactctcgctgctgtgaccactcaccaacctgtgttactcagagtagcccggctagtgcccgagtgggacattcctctctcaggtttccagtgtccttgctgctcctgagcagttaccaatgcaatttcgcattccttacaaggcagaagagtgggctctcactgtatgtgttcaaaggaggaggtaagactattgtgtatttaatttaatgtggaacaaaatatagtcttaccgcagccaaggttcaaatttggtgttctaatctgtccattgcatgtaaataccatatctgtttggatataaatcttagaagtgcatgtgtgagcgaatgtagctggccattaataaaacattaatactgtctact

SEQ ID NO: 2866 - DNA, 3665 bp, Rattus norvegicus
  Genbank Accession No. L07925
ccaccaggcctaacaactagaggaggcttacggccctcggaaaccacgcccccatcagtcagtccccaccctcagctgacatcagcgagtccggccctgggcgcagagcgcaggcagcgcggagccgcgccggccggccctgcgcccacgccgccccgggtctcgcggcccgccggccacccgcgccaccgggagtcgtccatggtgcagcgcatgtgggccgaggcgtccgggcccatagggggcgccgagccgttgtttcccggctcccggcgcagccgcagcgtgtgggacgccgtgcgtctggaggtgggcgtccctgacagctgtccagtggtgctgcacagcttcacgcagctcgaccccgatctgccgcgcctggagagctctacgcaggagattggggaggagctgatcaacggggtcatctactccatctccctgcgcaaggttcagctatacccaggagccaccaagggccagcgctggctagggtgcgagaatgagtcagctctgaacctctacgagacttgcaaggtgcgcacggtgaaggccggtactctggagaagctggtggaacacctggtgcctgccttccagggcagtgacctttcctacgtcaccgtattcctgtgcacctacagagccttcacaaccactcagcaggtgctagacctgctgttcaaaagatatggctgcatccttccctactccagtgaggacggcggaccacaggaccaactcaaaaatgccatctcttccatcctgggcacctggctggaccaatactccgaggacttctgtcaacccccggactttccctgcctcaagcagctggtggcttatgtgcagctcaacatgcctggctcagacctggagcgccgtgctcaccttctcctggcccagctggaggacctggagcccagtgaggttgagcctgaggccctgtccccagctccagtgctgtctctgaaaccagcttcacagctagaaccagctcccgccctgcttctgacgcccagccgagctgtggcatccactccagtacgagagccagccccggtgccagtactggcatccagcccggtggtggcgccagcctctgagctagaaccagctctggagccgcccctagaccctgagccaaccctcgcacctgctccagagctggaccccactgtctcacagagcctccacctcgagcccgctcccgtgcccgctcctgcattagagccttcctggcctctgcctgaaaccacggagaacggactgtgtgcaaagcctcacctactgctgttccctccagacttggtggctgaacagtttacgctgatggacgcagagctattcaagaaagttgtgccctaccactgcctgggctccatctggtcccagcgggcaaagaagggcaaggagcacctcgcgcccaccatccgtgccactgtcgcccagttcaacaacgtggccaactgtgtcatcaccacctgccttggggaccagagtatgaaagcttcggacagggcccgggtggtggaacactggatcgaggtggccagggagtgcagggtgctcaagaatttctcctccctctacgccatcctctctgccctacagagcaatgccatccaccgcctaaagaagacatgggaagaggtctccaggggcagctttcgagtgttccagaaactgtcagaaatcttctctgatgagaacaactactccttgagcagagagctgctcatcaaggaaggaacctccaagtttgccacgctggagatgaaccctaggagaacccagaggcggcagaaggagacaggtgtcatccagggcactgtcccctacctgggcacattcctcactgacctggtgatgctggacacagccatgaaggactatctatatgggagactgatcaactttgaaaagaggaggaaggagttcgaagtcatcgcccagatcaagttgctccagtcggcctgcaacaactacagcattgttcccgaggagcactttggagcctggttccgagccatgggacggctcagcgaggctgagagctacaacctgtcgtgtgagctggagcccccgtctgagtcagccagcaacaccctgaggagcaagaaaagcacagctatcgtcaagcgctgggagcgacgccaggctcccagcacggagctcagcaccagtagcagtgcacactccaagtcatgtgaccagctccggtgcagcccctacctcagcagcggggacatcacggacgcactcagtgtgcactcagctggttcatccacgtctgacgtggaggagatcaacatgagctttgttccagagtctcctgatggccaggaaaagaagttctgggagtcagcctcccagtcgtccccagagacctctggcatcagctcggcctccagcagcacctcctcttcgtcagcctctaccacaccggtgtctaccacacgcacccacaagcgctctgtctcaggggtctgcagctacagctcctcactgccactctacaaccagcaggtgggcgactgctgcatcatcagggtcagcctggatgtggacaacggcaacatgtacaagagcatcctggtgaccagccaggataaggctccgactgtcatccggaaagccatggacaaacacaacctagatgaggacgagcccgaggactatgagctgctgcagatcatctcagaggaccacaagctgaaaattccagagaacgccaatgtgttctatgccatgaactctgccgccaactatgacttcatcctaaagaagcgggccttcactaagggggctaaagtcaagcatggagccagctccactctccctcgaatgaagcagaagggactcaggattgccagaggcatcttctaaggacgtctcccaggggctggctggctggctggggactaagcacttacagactagagtggcccaggccacaggtacctctgccctcctgccagcccaggctactcccagactccactttcaccccgaacctgtcctgctgccgggattgacacctgccactgacaggctgacctggcctccggggaccgctcaccgccttaggtgccttctgctctctgcaaccagaggactagctgactttgccaaggggtgctgccagctgggcatggagcctcgcctgccctggacaatgtccaccacactttcctgtcacctccccaagtgcagatcactgccacccatgctcccagatgctccaggacacccacacacccagcggggctgccaactgcgttctctccttgtgcccataggccatggcctgggaccttcatggaggtcctagcctttcttaggctgcaccaaagattccaccttcaggcctacagagtgagggagtctcgcccaccacgagcccaagccctcccatggatcagagagagaagccctctcatggaccgcctggttggcattgaaccccataccactgaaagtgccattcaccaccgctgcgtcccgggtgtacaagactacatgcaatgggaggtttgtggggagggggaagacgactggatatttgtataaaacgtaaaaagtttactgattggggtggggcaatatttatttgttgtaaatagaaaatgctagacttgaatattatattaaaatcccgtttc

SEQ ID NO: 2867 - DNA, 1497 bp, Rattus norvegicus
  Genbank Accession No. L09648
cgcccgtagagagaccgaagcgctcggttcccccggggggaccgcagcctgggcgtgtgggggcacaggcccgggggatgctgggctcagtgaagatggaggcccatgacctggccgagtggagctactacccggaggcgggcgaggtgtattctccagtgaatcctgtgcccaccatggcccctctcaactcctacatgtccttgaaccctcttagctctccctaccctcccggagggcttcaggcctcccctctgcctacaggacccctggcacccccagcccccaccgctcccctggggcccaccttcccaggcctgggcgcaggcagcggcaccggaggcagtgcttccgggtatggcgccccagggcccgggcttgtacacggaaaggaaatggccaaggggtaccggcggccactgactcatgccaaaccaccttattcctacatctctctcatcaccatggctatccagcaggcaccaggcaagatgctgaccctgagtgaaatctaccaatggatcatggacctcttcccgtactaccgggagaaccagcaacgttggcagaactccatccggcactcgctgtccttcaatgactgcttcgtcaaggtggcacgctccccagacaaaccgggcaaaggctcctactgggccttgcatcccagctctgggaacatgtttgagaacggctgctatctccgccgtcagaagcgcttcaagctggaggagaaggcaaagaaaggaaacagtgccacatccgccaccaggaatggaacagtggggtcagccacctctgccaccactacagctgccactgcagtcacttccccggctcagccccagcctacgccgccgtctgagcccgaggcccagagtggggaagatgtggggggtctggactgcgcctcgcctccttcatccgcaccctatttcactggcctggagctcccaggggaactgaagttggatgcgccctacaacttcaaccaccctttctctatcaacaacctgatgtcagaacagacatcaacaccttccaaactagatgtggggtttgggggctacggtgctgagagtggggaacctggggtctactaccagagcctctattcccgctctctgctcaatgcatcctagcggcgcaactgggagaaatgcggtgatgggggtttgctgtgacagatgaccggttcttcggccctgatctttctggttacactctgcttatccagttaattaacatcgtatttggtctattactgtgatatgacccattggctactgtggtaactgcatggactcttcggtgggcctagggttggggtattgtgaaggcagatgcatttgggagtgttacgaaggtggccatgtcggacataccgtgaaggcaattagactggtgtactataaaagctgcatgttaagtgagtgatccactgggtgcctgatggccgcgatgtcggaggacatattgtttggccctttggatgct

SEQ ID NO: 2868 - DNA, 1344 bp, Rattus norvegicus
  Genbank Accession No. L10416
cggcacgaggacatgggcacacagcagaaggacgtcaccatcaagtcagatgcgcctgacaccctgctgctcgagaagcatgctgattatatcgcctcgtacggctcaaagaaagatgattatgaatactgcatgtccgaatacttgagaatgagcggcgtctactggggcctgacagtgatggacctcatggggcagcttcatcggatgaataaagaggagatactggtgtttatcaagtcgtgccagcatgagtgtgggggagtcagtgccagcatcgggcacgacccccaccttctctacacgctcagtgctgtccagattctcactctgtatgatagcatccatgtaatcaacgtagacaaagtggtagcctatgttcagagtctacagaaagaagatggttcctttgctggagacatctggggagaaatcgatacaagattctcattttgtgcagtggcaactttggctctcttgggcaaacttgatgctattaatgtggaaaaggccattgaatttgttttgtcctgtatgaactttgatggtggatttgggtgcagaccaggctctgaatctcacgccggacagatctattgttgcacaggattcctggccataactagtcagttgcatcaagtgaactccgacctacttggttggtggctttgtgaacgacagttgccctctggcggactcaatggaagacccgagaagttaccagatgtgtgctattcctggtgggtgttggcctccttaaagataatcgggaggcttcattggattgacagagaaaagcttcgaagcttcatcttggcatgtcaagatgaagagacaggagggtttgcagacaggccaggagacatggtggatccctttcacaccttgtttggcattgctggattgtcacttctgggggaagagcagatcaagcctgtcagccctgtcttttgcatgcctgaagaagtgctacagagggtgaatgtccagcctgaactagtgagctagtccgaggggaagagccttcggtgtgcagtatcagttactgtggttatcaaacccagaagtgacttaatattttgtatatcatatgtcaatgataaattatataagtattgtaaaataaatgtcatatttagatctttagtgttctgagtacagtttctgtcaatactgtttgttaatgtctaacagcagcaaacttaaaaagctagtatttaactgccatctccctgtgtccttttgacctgtaacaatgacgggaaatgatttctgttaataaagatgatcaaagtgagtgaaactcatgatttaaataaaagatgcataaaatcgagctcgtcc

SEQ ID NO: 2869 - DNA, 1944 bp, Rattus norvegicus
  Genbank Accession No. L10652
ggtgaagaaggagcgggccctcgccgctcgttctcgctccctctttctctctctcttcttctctctctctttccctctcgggcaacatggcgggcgtggaagaggcatcgtctttcgggggccacctgaatcgcgacctggatccagacgacagggaagagggaacctccagcacggccgaggaagccgccaagaagaaaagacggaagaagaagaagggcaaaggggctgtgtcagcagggcaacaagaacttgataaagaatcgggaacctcagtggacgaagtagcaaaacagttggagagacaagcactggaggagaaagagaaagatgatgacgatgaagatggagatggtgatggtgatggtgcagctgggaagaagaagaaaaagaagaagaagaagagaggaccaagagttcaaacagaccctccctcagttccaatatgtgacctgtatcctaatggtgtatttcccaaaggacaagagtgtgaatacccacccacccaagatgggcggacagctgcttggagaaccacaagtgaagagaaaaaggcgctagaccaggctagtgaggagatttggaacgacttccgagaagctgccgaagcacaccggcaagttaggaaatacgtcatgagctggatcaagcctgggatgacaatgatagaaatatgtgagaagttggaagactgttcccgaaagctcataaaggagaatgggttaaatgcaggcctggcctttcccactgggtgttctctcaacaactgtgctgcacattacactcccaatgctggtgacacgacagtcttacagtacgacgacatctgtaagatcgactttggaacgcatataagtggtagaataattgattgtgcttttactgttacttttaatcccaaatatgacatattattaaaagctgtaaaagatgccaccaatactggaataaagtgtgcggggattgacgtccgtctctgtgatgtcggcgaggccattcaagaagttatggagtcctatgaagtggaaatagatgggaagacctaccaagtgaaacccatacgtaacttaaatggacattcaattgggccatatagaattcatgctggaaaaacagtgcccattgtgaaaggaggggaagctacaaggatggaggaaggagaggtgtatgccattgagacctttggtagcacagggaagggcgtggttcatgacgatatggaatgttcacactacatgaaaaattttgatgtgggacacgtgccaataaggcttccaagaacaaaacacttgttgaatgtcatcaatgaaaactttggtacccttgccttctgccgaaggtggctggatcgcttgggagaaagtaaatacttaatggctctgaagaacctgtgtgacttgggcattgtagatccatatccaccactctgtgacattaaaggatcatacacagcacagtttgaacataccatactctgcgcccaacctgtaaagaagttgtcagcagaggagatgactattaaaacttagtccaaagccaactcaacgtctttattttctaagctttgttggaacacattataccacaagtaatttgcaacatgtctgttttaacagtggacctgtgtaatgccgttatccatgtttaaaggagtttgatcaaagccaaactgtctacatgtaattaaccaaggaaaaggctttcaagactttactgttaactgtttctcccgtctaggaaatgctgtactgctcactagttaggaattacttaaacgttttgttttgaagacctaagagatgctttttggatatttatattgccatattcttacttggatgctttgaatgactacatacatccagttctgcacctatgccctctggtattgctttttaaccttcctggaatccattttctaaaaaataaagacattttcagatc

SEQ ID NO: 2870 - DNA, 400 bp, Rattus norvegicus
  Genbank Accession No. L11035
ctggggaccttgctgttggttctgtgccttcggtcggagtgggtaagagtcaacagaagactgataaagcagcaggttaagcaaaactctccatcgctgattgttcaagagggagggacagctatactgaattgtgactatgataatgacatgtttgactattttgcttggtacaaaaaataccctgccaacagccccacattcctcatatctgtacgttcgaataaggataagaatgaagacggaagattcacagttttccttaacaaaaccggcaaacacttctcattgcacatcacagcctcccagcctgaggactctgcagtgttcctctctgcggcaacagcaagtggagacagactcacccttgggaaaggaactcagctgaccatccagccct

SEQ ID NO: 2871 - DNA, 643 bp, Rattus norvegicus
  Genbank Accession No. L11319
aaagggcagcggttcctcttggtgattgtatcgcgccctcttgctgctaattaccgcgttctccattcctccacatgctgtctctagactttctagatgatgtacggcgaatgaacaagaggcagctgtactaccaagtcctaaattttggaatgattgtctcctcggcactaatgatctggaaggggctgatgttgataaccggaagtgagagtccaattgtagtggtgctcagtggcagcatggagcctgcgtttcacagaggggatctccttttcctcacgaaccgagttgaagatcctatacgtgtgggggaaatcgttgttttcaggatagaaggaagagagattcccatagtgcatcgagtcttgaagatccatgaaaagcaagatgggcatatcaagtttttaaccaaaggagataataatgccgttgatgaccgaggcctctataaacaaggacaacactggctggagaagaaagatgttgtagggagagcaagagggtttgttccgtacattggaatcgtgacgatcctcatgaatgactatcctaaatttagttatgcagtactgtttctgctgggtttatttgtgctggtccatcgtgagtaagaagccggcctcgctggtcctgggaggct

SEQ ID NO: 2872 - DNA, 1842 bp, Rattus norvegicus
  Genbank Accession No. L11694
cgccagagccgcagcttctctcgccccgcagcccgtcgccaccatggtgaagatcgtgacagtgaagacgcaggcatatccggatcagaagccgggcaccagcgggttgcggaagcgagtgaaggtgttccagggcaacgctaactatgcggagaatttcatccaaagcatcgtctccaccgtggagccggcgttgaggcaggaggctaccctggttgtgggcggggacggtcgcttctacatgaccgaggccatccagctcatcgtacgcatcgccgcagccaacgggattggccgcctggttattggacagaatggaatcctctccactcctgctgtatcctgcattatccgaaaaatcaaagccattggtgggatcattctgacagctagccacaatccaggagggcccaatggagattttggaattaaattcaatatttctaatgggggtcctgctccagaagcaatcactgataaaattttccaaatcagcaagacaatcgaagaatatgccatttgccctgacttgaaggtagacctcggtgttctggggaagcagcagtttgacttggaaaacaagttcaagcccttcacagtggagatcgtggactcagtcgaggcctatgccacaatgctgagaaacatctttgatttcaacgcactgaaggagctactctctggcccaaacagactgaagatccgcatcgacgccatgcacggagttgtgggaccgtacgtcaagaagatcctctgtgaagaacttggtgcccccgcaaactcagctgtgaactgtgttcccctggaggattttggaggccaccaccctgaccccaacctcacctacgctgctgacctggtggaaaccatgaagtcaggagagcatgatttcggggctgcctttgatggtgatggggataggaacatgattctgggcaagcacgggttctttgtgaacccttctgactctgtggctgtcattgcagccaacatcttcagcattccgtatttccagcagactggggtccgcggcttcgcacgcagcatgcccaccagtggtgctctggaccgggtagcaaacgccacaaagatcgcttcgtatgagaccccaactggctggaagttttttgggaatttgatggatgcaagcaagctttccctctgtggagaggagagctttgggactggttcagaccacatccgagagaaagatggactgtgggctgtcctggcctggctctccattctggccacccgcaaacagagggtggaggacattctcaaagaccactggcagaagtttggtcggaacttcttcaccaggtatgactacgaggaggtggaagccgagggggcaaacaaaatgatgaaggacctggaggccctgatgctggaccgctcctttgtggggaagcagttctcagcaaacgataaagtctacacggtggagaaagctgataacttcgaatatagtgacccagtagatggaagcatttcaaaaaatcagggcttgcggcttatttttgcagatggttctcgtatcatcttcagactgagcggcaccgggagtgctggggctaccatccggctctatattgatagctacgagaaggacgctgccaagatcaaccaggacccccaggtcatgctggcacccctgatctccattgctctgaaagtgtcccagctccaggagaggacaggccgcactgccccaactgtcatcacctagagagatggctggatgtggcacatcctccccaggaactgtccacactgcctgattgaagagcacagacagaacagtgtattcgacctggcctttagactcatcttatttta

SEQ ID NO: 2873 - DNA, 826 bp, Rattus norvegicus
  Genbank Accession No. L12382
gcggcttgcggagcgggaggcagcggccggagagccaggcggaacctgcgggggcggaggcggcggtggcagccggggcgcagatagcaggaacaggatcaagccctccataccagggaccaggctaaaaccagattaccactgcccctacctgggccctgttgacttaaagcagccactgtaatcatgggcaatatctttgggaaccttctgaagagcctgatcgggaagaaggagatgcgcatcctgatggtgggcctggatgctgcaggaaagaccaccatcctctataagctgaagcttggcgagattgttaccaccattcccaccatcgggtttaatgtggagacagtggaatataagaatatcagcttcacagtatgggacgtaggtggccaggacaagattcggcccctctggagacactacttccagaatacccaaggcttgatatttgtggttgacagcaatgaccgggagcgagtgaacgaggcccgggaagagctgatgaggatgctggcggaggatgagctccgggatgctgtgctgcttgtgtttgcaaacaaacaggatttgccgaatgctatgaatgctgctgagatcacagacaagctgggcctgcactctctgcgccaccgcaattggtacattcaggccacctgtgccaccagcggggacgggctctatgaaggcttggactggctggccaatcagctcaaaaacaagaagtgagagccaggcagccctctctgactaccccacccactcctgaaacatacctgttgtctccttaccccaatttccccctttcttcctcatgaaatgt

SEQ ID NO: 2874 - DNA, 214 bp, Rattus norvegicus
  Genbank Accession No. L13025
acctagtgagtgtaaggccagcctggaatcaataagagttggtttcaaagaagcaggaggagaaggaggaacaggaacaggaggaggagcagggggaggagaaaaaggaggaggaggaggaggaggaagaggaggaggaggaggaggaggaggaggaggaggaggaggaggaggaggaggaggaggagaagaagaagaagaagaagaagaagaa

SEQ ID NO: 2875 - DNA, 1317 bp, Rattus norvegicus
  Genbank Accession No. L13039
ggtttttttcaaaatgtctactgtccacgaaatcctgtgcaagctcagcttggagggtgatcattctacacccccaagtgcctatgggtcggtcaaaccctacaccaacttcgacgctgagagggatgctttgaacattgaaacagcaatcaagaccaaaggcgtggacgaggtcaccattgtcaacattctgactaaccgcagcaatgcacagaggcaggacattgccttcgcctaccagaggaggaccaaaaaggaactgccatcggcgatgaagtcggccttgtctggtcacctggagaccgtgatgttaggcctgttgaagacacctgctcagtacgatgcctctgagctcaaagcctccatgaagggcctggggactgatgaggactccctcatcgagatcatctgctcaagaaccaaccaggagctgcaggagattaaccgagtgtataaggaaatgtacaagaccgatctggagaaggacatcatctctgacacatctggagaattccgaaagctgttggtcgcccttgcaaagggtaaacgggcagaggatggttctgttattgactacgagctgattgaccaggatgcccgggagctctatgatgctggggtgaagaggaaaggaaccgatgtccccaagtggatcagcatcatgactgagcgcagtgtgtgccacctccagaaagtgttcgaaaggtacaagagctacagtccttatgacatgctggagagcatcaggaaagaggtcaaaggagacctggagaacgccttcctgaacctggttcagtgcattcagaacaagcccctgtactttgctgaccggctgtatgactccatgaagggcaaggggactcgagacaaggtcctgattagaatcatggtctctcgcagtgaagtggacatgttgaaaatcagatctgaattcaagaggaaatatggcaaatccctgtactacttcatccagcaagacactaagggtgactaccagaaggcgctgctgtacctgtgtggtggggacgactgaagggcttggcatggtggattgcccagaagtggccctacctgtgccccaacctaatgttctagagaatcagcctgccactaatggacccctgaactcctccctgtgaagatgacgacagagctgccgacccatcccccatcttagctgcctttgcctggctttcccctcattctctcctttatgccaaagaaatgaacattccagggagttggacgtaccgtctgtgacatgagacacttcctcatatgtgtcgtgaataaaccatttttactttagaaaaaacc

SEQ ID NO: 2876 - DNA, 303 bp, Rattus norvegicus
  Genbank Accession No. L13202
ctggtgaagccaccctactcttacatcgcgctcatcaccatggccatcctgcagagcccgcagaagaagctgaccctgagtggcatctgcgagttcatcagcaaccgcttcccgtactaccgggagaagttccccgcctggcagaacagcatccgccacaacctgtcgctcaacgactgcttcgtcaagatcccccgcgagccgggcaacccgggcaagggtaactactggaccctggacccccagtccgaggacatgttcgacaacggcagcttcctgcggcgccggaagcgcttcaagcgc

SEQ ID NO: 2877 - DNA, 2410 bp, Rattus norvegicus
  Genbank Accession No. L13619
tacgctgctttggtggcgtgcacctctcacggtgtgcctagccgccgatgcccaggctgcacgatcacgtctggagctacccaagcgcgggcgctgcgaggccgtacagcctcccgcgaggcatgattgcggcggccctctgtccgcagggccccggagcccccgagcccgagcccgcgccccggggccagcgagagggaaccgcaggcttcagcgcacgacccggcagctggcaccacgacctggtgcagcggagcctcgtgctcttctcatttggcgtggtcctggctctggtgctcaacctgctgcagatccagcggaatgtcacgctcttcccggacgaggtgatagccaccatcttctcctccgcctggtgggtgcccccgtgctgtggcacggcagccgctgttgtcggcttattgtatccctgtattgacagtcacctgggagaaccacacaagttcaagagagagtgggccagtgtcatgcgatgtatcgcggtgtttgttggcatcaaccatgccagtgccaaattagatttcgccaataatgtgcagctgtccctgactctggcagccctatccttgggcttgtggtggacgtttgatcgatcccgaagtggcctggggctcgggatcaccatcgccttcctagccacgctgatcactcagtttcttgtttataatggcgtctaccagtacacgtccccagatttcctctatatccgttcttggctcccttgtatatttttctcaggaggtgtcacagtgggaaacataggacgacagttagctatgggtgttccagaaaagcctcacagtgactgagtttgagcacatgattcagggcggaagcagaatgtggagacactggtcctgggtgtggtgaagaggatctttttctcaatgttccatttagactgggctgatgataaatgactcctaaagatgcgttcacgtagtctaaatagcaagtggaggcaaggactacttacctaaagtcttaccttgctcacccaccctcacacctgtctgcactggaacattctatcccaggctgtatgtgagagttgggtaagggggccggtttcccgagtattagatttcactcatcattcaaagcaaaatgccatatttcaaagccttgaatcaaaatgaattaccaactagcagttttatatcagtgcccaaaggagagaggttgatggtgcttaacagagatgaagtatgtgcagtaagaatatttatccagaattaaaatatagggttgtgtaaagaggggctaagggcagcagtaagttggaggaagatcatgctccccggaggacccagtgcagccacatctccaggtctcgctcaggctggcgctcacacgtgggtctcatcagtgtgggaactatgctgtttactgacaggaggcttgtagacaatcttactgacagcccaggacaacacaaagtcaggattctgcattgcgatgctggacttttcatctcaatttaagtgaagttttatccaagatctggagcatctaagagtgaatagctgtctgctgtttcagtcgtaatgagccgaaattgtgtctctgtcactccagagtggagaggacttttccacagccctatggagcttgcaatctgtgattgccttgtaaaaggttgagtgtgcacgtcactgcgttcggtgcgcagtgtcctgtgtgtgttggacagcgtagaacacatgggaccttgcaagtattgggtcttcaacttcaagtgcaatgtgtatgaaaccaatctgagccttgtattctcttaaatatttattatttttttttaaccgcgcgagctgttctggagaagggttctcgggtcatttcagagctgtgtgaggcacactcagcaatactgtgtcagccgtgacgctccccagtcacaccctccactacaccctagtcctttgacatactccaggtttgtaagtttagtgatttttacttacaaatttacccttttttgcattctaaaattgtgtttaaattatatggaagtacttggtgtaggcagtcattggtccccgggcagcagaagctctgcctgtggaatcgggtttgggttcactctgcagggctcctcatagaggctttgcttatttgttttgaggaaaatgtctggagtaaacctttgttttctgaaactactttagctaaaagaaaatgggtgttctagactttggaatggttcttaaagtttcctggaaataaaaataatgattggcacttcaaagacattctttagccaagacttcagtgtctagcagaaaccacaagtgactagaagagcaagtgatcttggtgatgcacttgattgtatacaatgagtattttttctcttaaactggaaataaatctgttagaaataatatagcca

SEQ ID NO: 2878 - DNA, 1579 bp, Rattus norvegicus
  Genbank Accession No. L13635
tagaggagttgagttcgtgtgtgtagggaggcagacagctccgacgcagactacggacctctccaggtctcagccgtcaaagaccctgtccggtagggagtggctcgctttgagggcaaggcttctcggatcgaggcttcttcatggccgctcgggtcgcgagcggccgggcgttcgctctttgcggaggacggcgtctaacagagcgcagttgattgaggaaacactagccggggatcatgagtggctgtcgagtgttcattgggagactaaatcccgcagcgagggagaaagatgtggaaagattcttcaagggttacggacggatcagagatattgatttgaaaagaggttttggttttgtggaatttgaggacccaagggatgcagatgacgctgtttatgaacttgatgggaaggaactttgcagtgaaagggttactattgaacatgctcgggctcggtctcgaggtggaagaggtagaggacgatactccgaccgttttagcagtcgcagacctcgaaatgatagacgaaatgctccacctgtaagaacagaaaatcgacttatagttgagaatttatcctcaagagtcagctggcaggatctcaaagatttcatgagacaagctggggaagtaacctttgcggatgcacatcgacctaaactaaatgaaggggtagttgagtttgcctcttatggtgacttaaagaatgctattgagaaactttctggaaaggaaattaatgggagaaaaatcaaattaattgaaggcagcaaaagacacaggtcaagaagcaggtcacgatctcggaccaggagttcctctaggtcccgtagccgatcccgttcacgcaggagcaagtcttacagccgatcaaggagcaggagccggagccggagcaagtcccgttctggtagtaggtctcccgtgcctgagaagagccagaaacgtggttcttcgagtagatctaaatctccagcatctgtggatcgccagaggtcccgatcccggtccaggtccagatcagttgacagtggcaattaattaaactgtaaataacttgccctgggcctttttttaaacaaaacaaaacaaattcccaaaccatacttgctaaaaattctggtaagtatgtgcttttctgtggggtgggatttggatggggttgggctggatttctttgtagatgtggaccaccaaggggttgttgaaaactaattgtattaaatgtcttttgataagccttctgctcacacttttgtgactgtctgaagtatatagtttgtgtatattgatagagctcttttataactaaagcatttaattttttgtactagaaaaacttttgaatattttagttcattgttcagatatgttaacataagattagtttaattgctcaattaaactaatgaatagctttggacactttaaaagagctctaaatttgcttgtatataaaagcttagtttgagttttccttgttagggtcaagggtgtcttcttgcccattaacagctgtagatagacttaaagcagctgtttgttactgataataaaatactaagtattat

SEQ ID NO: 2879 - DNA, 209 bp, Rattus norvegicus
  Genbank Accession No. L14002
cagatactctcgacctcttacatttggagagttttgagcagacaggaagaagacggagcctgggagcagctgttctccaatagtcaaattaagactgttcctctctgagctctgtacttcaaccagcacctttaggcagaagccatcaaatcagaaatgtctgttaataattaaagtctatgattgccaccaaaaaaaaaaaaaaaaaa

SEQ ID NO: 2880 - DNA, 242 bp, Rattus norvegicus
  Genbank Accession No. L14004
tcctgtcactcatgtggacctcagataagagcacagatactctcgacctcttacatttggagagttttgagcagacaggaagaagacggagcctgggagcagctgttctccaatagtcaaattaagactgttcctctctgagctctgtacttcaaccagcacctttaggcagaagccatcaaatcagaaatgtctgttaataattaaagtctatgattgccaccaaaaaaaaaaaaaaaaaa

SEQ ID NO: 2881 - DNA, 1356 bp, Rattus norvegicus
  Genbank Accession No. L14462
cccggagctgtcgatcggggacaaagcgcggccgcccgcgccccccgagccgcccgagccggggccagccccccgcgactgacatgatgtttccgcaaagccggcactcgggctcctcccacctcccccagcagctcaagttcaccacctccgactcctgcgaccgcatcaaggatgagttccagctgctacaagcgcagtaccacagcctgaagctggagtgtgacaagctggccagcgagaagtcagagatgcaaaggcattacgtcatgtactatgagatgtcttacggattgaacatcgagatgcacaaacaggctgaaattgtgaagaggctgaatgggatttgcgcccaggttctaccctatttgtcccaggagcatcagcagcaggtcctgggagctatcgagagagccaagcaggtcacggctcccgagctgaactccatcatccgacagcagctccaggctcaccagctgtcccagctccaggcgctggccctgcccctgacaccgctgcctgtcgggctccagccgccatccctccctgcggtcagcgcaggcacaggcctgctgtcactctctgctctgggctctcagacccacctctccaaggaggacaagaacggacacgatggggacacccaccaggaggatgatggagagaagtccgattagctcctggggagagggagggggaggggggataccaggggagacaggcacagagagcacagtgttctgagggccacactgcacacagctcggtccctacccaagcttccacctccagtcctggttccagctgtgcaccctgggcctaggagacgccagagggacagcccaggctacagggaaaattccccaccttcaacatttccccgggctacagccaccaatctcggcccagaatgtacacaacgctagccgcccctttccaccctgtgcaccccgaatttgccccctttccccttctctgcttcctgcactgcacacctgctaggcccagacccctccccccagctcacccagctctggttccctcaaccgcggaaagaaagcattggctcgggactgcagtgggggtgggcaccccacaaacttccctctccccttccccaaataaacgtgagggttaaaagtcggtttgtttattatttctttttcgtcccagtactctatagctaccatctaagagagaaaaagaaggaagccctggagcgagcgagggtctgtctgtgcatatagttagatttttctggtcgcctcgctttgcaccgagaggtggagggccgctgtactgagggtggggtctagctgtgccttcaaaataaaaacatgaaaaggtcaaaaaaaa

SEQ ID NO: 2882 - DNA, 1376 bp, Rattus norvegicus
  Genbank Accession No. L14936
gggggtgccgcgccggccgcagagccctgatgctggcccggaggaagccggtgttaccggcactcaccatcaaccctaccatcgctgagggcccgtcccccaccagcgagggcgcctccgaggcacacctggtggacctccagaagaagttggaagagctggacctggatgaacagcagaggaagcggctggaggccttccttacccagaaggccaaggttggtgagctcaaggacgacgactttgagagaatctcagaactgggtgcaggcaatggcggcgtggtcacaaaggcccggcataggccctctggcctcatcatggccagaaagctgatccacctggagatcaagccagctgtccgcaaccagatcatccgggagctgcaggtgctgcatgagtgcaactcaccgtacatcgtgggcttttatggggccttctacagcgacggcgagatcagcatctgcatggagcacatggacggtggctcactggaccaggtactgaaggaggccaagcgcattcccgaggacatcttagggaaggtcagcattgcggtgctccggggcctggcgtacctccgcgagaagcaccagatcatgcatagagatgtgaagccctccaacattctggtgaactctcgtggagagattaagctgtgcgacttcggagtgagcggccagttgattgactccatggccaactcatttgtagggacacgctcctacatgtccccagaacggctgcagggcacccactactctgtgcagtcggacatctggagcatggggctgtcgctggtggagctggccatcgggaggtaccccatccccccacctgatgccaaggaactagaggccagctttggccggcctgtggtggacggggcagatggagagccccatagtgtctcaccgcggccccggccccctggacgccccatcagtggtcatgggatggacagccgaccagccatggccatctttgagctgctggactacatagtgaatgagccacctcccaagctgcccagtggtgtgttcagctcagacttccaggagtttgtgaataaatgtctcattaagaacccagcagagcgtgcagacctcaagctgctgacgaaccatgccttcatcaaacgctctgagggggaggacgtggacttcgctggctggctatgcagaaccctgcggctgaagcagcccagcacacccacgcgtactgcagtgtgacagccatcgctcagcagtctgtgtccttgtcctgtggcacagcggccgcctttggggacagcagtggtgtgtgttgtggcaggggacctgtgcctgtgcatttggaaaagcaaacaaagtggagaaagagagaaaaaaaaaaaa

SEQ ID NO: 2883 - DNA, 2455 bp, Rattus norvegicus
  Genbank Accession No. L16764
agagaagcagagaagcagagcaagcggcgcgttcccgaacctcgggcaagaccagcctctcccagagcatccccaccgcgaacgcacccttctccagagcataccccagcggaggccacccttccccagagcatccccgccgccaagcgcaaccttccagaagcagaccgcagcgacatggccaagaaaacagcgatcggcatcgacctgggcaccacctactcgtgcgtgggcgtgttccagcacggcaaggtggagatcatcgccaacgaccagggcaaccgcacgacccccagctacgtggccttcaccgacaccgagcggctcatcggggacgccgccaagaaccaggtggcgctgaacccgcagaacaccgtgttcgacgcgaagcggctgatcggccgcaagttcggcgacccggtggtgcagtcggacatgaagcactggcccttccaggtggtgaacgacggcgacaagcccaaggtgcaggtgaactacaagggcgagaaccggtcgttctacccggaggagatctcgtccatggtgctgaccaagatgaaggagatcgccgaggcgtacctgggccacccggtgaccaacgcggtgatcaccgtgcccgcctacttcaacgactcgcagcggcaggccaccaaggacgcgggcgtgatcgcgggtctgaacgtgctgcggatcatcaacgagcccacggcggccgccatcgcctatgggctggaccggaccggcaagggcgagcgcaacgtgctcatcttcgacctggggggcggcacgttcgacgtgtccatcctgacgatcgacgacggcatcttcgaggtgaaggccacggcgggcgacaccgacctgggcggggaggacttcgacaaccggctggtgagccacttcgtggaggagttcaagaggaagcacaagaaggacatcagccagaacaagcgcgcggtgcggcgcctgcgcacggcgtgcgagagggccaagaggacgctgtcgtccagcacccaggccagcctggagatcgactctctgttcgagggcatcgacttctacacgtccatcacgcgggcgcggttcgaggagctgtgctcggacctgttccgcggcacgctggagcccgtggagaaggccctgcgcgacgccaagctggacaaggcgcagatccacgacctggtgctggtgggcggctcgacgcgcatccccaaggtgcagaagctgctgcaggacttcttcaacgggcgcgacctgaacaagagcatcaatccggacgaggcggtggcctacggggcggcggtgcaggcggccatcctgatgggggacaagtcggagaacgtgcaggacctgctgctgctggacgtggcgccgctgtcgctgggtctggagaccgcgggcggcgtgatgacggcgctcatcaagcgcaactccaccatccccaccaagcagacgcagaccttcaccacctactcggacaaccagcccggggtgctgatccaggtgtacgagggcgagagggccatgacgcgcgacaacaacctgctggggcgcttcgagttgagcggcatcccgccggctcccaggggcgtgccccagatcgaggtgaccttcgacatcgacgccaacggcatcctgaacgtcacggccacggacaagagcaccggcaaggccaacaagatcaccatcaccaacgacaagggccgcctgagcaaggaggagatcgagcgcatggtgcaggaggccgagcgctacaaggcggaggacgaggtgcagcgcgagagggtggctgccaagaatgcgctcgagtcctacgccttcaatatgaagagcgccgtggaggacgagggtctcaagggcaagatcagcgaggctgacaagaagaaggtgctggacaagtgccaggaggtcatctcctggctggactctaacacgctggctgagaaagaggagttcgtgcacaagcgggaggagctggagcgggtgtgcaacccgatcatcagcgggctgtatcagggtgcgggtgctcccggggctgggggcttcggggcccaggcgcccaagggaggctctgggtcggggcccaccatcgaggaggtggattagaggcttttctggctctcagggtgttggctagagacagactcttgatggctgctggtgcacgattcttatcaagttactccttctctccggagttcagtttaaagttacagccttttatacggtaattgatttgagtttgttacattttgtatgctcgtgggttttttatatattcaaattaaggttgcatgttctttgcgtttaatctaagtagctgtgtaaaaatggtgtttccttcctgcgaacacctcagcactgccaccctgtgtacagttttttccttgcatccctacaaactgagaaaaaaagttatcttttgtaacttaaacattcaaaataaaatgttacaagt

SEQ ID NO: 2884 - DNA, 831 bp, Rattus norvegicus
  Genbank Accession No. L17127
ggcacgagtgactaagatggaagcgttttgggagtcacggactggccactgggcggaggtccggggcagttttaccggcgtcccgtcacccccagctgcctcatggatccgatgtctgcgcctgcgaggtccatcactcggacccagaatccgatgctgactgggacatccgtactaggggtgaagttcgactgcggagtggtgattgctgcagacatgctgggctcctacggctccctggctcgtttccgcattatctctcgtattatgcgagtcaacgacagcactatgctaggtgcttcaggagactatgctgatttccagtatttgaagcaagttctcggccagatggtgattgatgaggagctgttcggagatggacatagctatagtcctagagctatccattcatggttgacaagggccatgtacagtcgccgctccaagatgaaccctctgtggaacaccaaggtcattggaggctatgctggtggagaaagctttcttggttatgtggacatgcttggtgtagcttatgaagccccttcactagccactggttatggtgcatacttggctcagcctctgcttcgagaagttctagagaagcaaccggtgctgagtcagacagaggcccgagagcttgtggagcgctgcatgcgagtgctgtactaccgagacgctcgttcgtataaccggtttcaagttgctactgtaactgaaaaaggtgtggagatagaaggaccactgtcagcacagaccaactgggacattgctcacatgatcagtggctttgaatgaaatccagatgaagtgtccagagttaagctt

SEQ ID NO: 2885 - DNA, 952 bp, Rattus norvegicus
  Genbank Accession No. L19698
cggccaggttgacagttgggcagaagctcttggttcctcttcaagtggtaatgccttcatgccaactttgccgaagtaacctggatgatatttgtcaaagttgatcctgtggtgatgcatgcctccagcattcccgcggcctcctgggtgcttgcggtgcttaccgatgcgaccgtggccgtggctcacgtggccccggagtttccgtcttcctaccagtctggatggcatggcggtgcagattcttttcagtcctctgaagactgcacacaggatggctgcaaacaagcccaagggtcagaattctttggccttacacaaagtcatcatggtgggcagtggtggtgtgggcaagtctgctctgactctgcagttcatgtatgatgagtttgtagaagactatgaacctaccaaagcagacagctacaggaagaaggtagtgctggatggggaggaagtgcagatcgacatcttagatacagcagggcaggaagactacgctgcaattagagacaactacttccgaagtggggaaggattcctctgtgtcttctctatcacagagatggagtcctttgcagctacagcggacttcagggaacagattttaagagtaaaagaagatgagaatgtcccatttctcctggttggtaacaaatcagatttagaagataaaaggcaggtttctgtagaagaggcaaaaaacagagctgaccagtggaacgttaactatgtggagacgtctgctaaaacgcgcgccaacgttgacaaggtattttttgatttaatgagggaaatacgagccagaaagatggaagacagcaaagaaaaaaatggaaaaaagaagaggaaaagtttagccaagagaatcagagaaagatgctgcattttataatcaaagcccaaactcctttcttatcctgacctgaccatactaataaatataatttat

SEQ ID NO: 2886 - DNA, 4724 bp, Rattus norvegicus
  Genbank Accession No. L19933
cagccgctgctcctctggacacctcagcctgaggcctctccgtgagttacggggacaccatcccccaccagggcggaggctggaggccactgccaagcatggcgcccacctggagacccagcgtggtgtctgtggtgggtcctgtggggctcttccttgtactgctggccagagggtgcttggctgaagagccacccagatttatcagagagcccaaggatcagattggtgtgtcaggaggcgtggcctccttcgtgtgccaggccacaggtgaccctaagccacgggtgacctggaacaagaagggcaagaaagtgaactcacagcgctttgagaccattgactttgacgagagctcgggggccgtgctgaggatccagccacttcggacaccccgggatgagaacgtgtacgagtgtgtggcccagaactcggtgggggagatcacagttcatgcgaagctcaccgtcctgcgagaggaccagctgcctcctggcttccccaacattgacatgggcccccagttgaaggttgtagagcgcacacgcacagccaccatgctctgtgctgccagcggaaaccctgaccctgagatcacctggttcaaggacttcctgcctgtggaccccagtgccagcaatgggcggatcaagcagcttcggtcaggtgccctgcagattgagagcagcgaggagacagaccagggcaagtacgagtgtgtggccaccaacagcgctggggtgcgctactcatcacctgccaacctctacgtgcgagtccgccgtgtggccccccgcttctccatcctgcccatgagccacgagatcatgcccggtgggaatgtgaatatcacttgtgtggctgtgggctcacccatgccctacgtgaagtggatgcagggggcagaggacctgacgcctgaggatgacatgcccgtgggtcggaatgtcctcgaactcacggatgtcaaagactcagccaactatacttgtgtggccatgtccagcctgggagtgatcgaggccgttgctcagatcactgtaaaatctctccccaaagcccctgggactcccgtggtgacggagaacactgctaccagtatcactgtcacatgggactcaggcaatcctgaccctgtgtcctactacgtaattgagtataaatccaaaagccaggatgggccgtatcagatcaaagaagacatcaccaccacgcgctacagcatcggcggcctgagccccaactctgagtatgagatctgggtgtcagctgtcaactccatcggccagggcccccccagtgagtcggtggtgacccgcacaggcgagcaggcaccagccagtgctcccaggaatgttcaggcgcgcatgctcagtgccaccaccatgattgtgcagtgggaggagcccgtggagcccaatggcctgatccgtggctaccgcgtctactacaccatggagcccgagcatccggtgggcaactggcagaagcacaatgtggacgacagtcttctgaccactgtgggcagcctgctagaggatgagacctacactgtgagagtgctcgccttcacatcggtgggcgatgggccactgtcagaccccatccaggtcaagacccagcagggagtgcccggccagcccatgaacttgcgggctgaggccaagtcagagaccagcattgggctctcgtggagtgcaccacggcaggagagtgtcattaagtatgaactgctcttccgggagggcgaccgaggccgagaggtggggcgaaccttcgacccaaccacagcctttgtggtggaggacctcaagcccaatacggagtacgcgttccggctggcggctcgctcgccgcagggcctgggcgccttcaccgcggttgtgtgccagcgcacactgcaggccatctcccccaagaacttcaaggtgaagatgatcatgaaaacttcagtgctgctaagctgggagttccctgacaactataactcacccacgccctacaagatccagtacaatggactcacactggacgtggatggccgcactaccaagaagctgatcacgcacctcaagccacacaccttctataacttcgtgctcaccaaccgtggcagcagcctgggaggcctgcagcagacggtcaccgccaggaccgccttcaacatgctcagtggcaagcctagtgtcgccccaaagcctgacaacgatggttccattgtggtctacctgcctgatggccagagtcccgtgacagtgcagaactacttcattgtgatggtcccacttcggaagtctcgtggtggccagttccctatcctactaggtagtccagaggacatggatctggaggagctcatccaggacctctcccggctgcagaggcgcagcctgcgccactcaagacagctggaggtgcctcggccttacatcgccgctcggttctccatcctgccagctgtcttccatcctgggaaccagaagcaatatggtggctttgacaacaggggcttggagccaggccaccgttatgtcctctttgtacttgctgtgctgcagaagaatgagcctacatttgcagccagtcccttctcagaccccttccaactggacaacccagacccgcagcccattgtggatggcgaggagggcctcatctgggtgatcgggcccgtgctggccgtggtcttcatcatctgcatcgtaattgccatcctgctgtacaagaacaagcctgacagcaaacgcaaggactcagagccccgcaccaaatgcttattgaacaatgcagacctcgccccccatcaccccaaggaccctgtggaaatgcgacgtatcaacttccagacgccaggtatgctcagccacccgcccattcccatcacagacatggctgaacacatggagagactcaaagccaacgacagcctcaagctctcccaggagtatgagtccatcgaccctggccagcagttcacttgggaacattcgaacctggaggccaacaagccaaagaaccgatacgccaatgtcatcgcctatgaccattcacgagtcatcctgcagcctttagaaggcatcatgggtagtgattacatcaatgccaactatgtggacggctatcggcggcagaacgcatacatcgccacgcaggggcccctgcctgagacctttggggacttctggcggatggtgtgggagcagcggtcagccactgtggtcatgatgacacggctggaggagaaatcacgggtcaaatgtgaccagtactggcctaaccgaggcaccgagacatacggcttcatccaggtcaccctactagatactatggagctggccaccttctgtgtcaggaccttttctctacacaagaatggctctagtgagaagcgtgaggtacgacattttcagttcacagcatggcctgaccacggggtacccgagtaccccacacccttcctggcgtttctgcgcagagtcaagacctgcaacccgcctgacgctggcccagttgtggtccactgcagcgcgggtgtggggcgtactggctgcttcattgtaattgatgccatgttggagcgcatcagaacagagaagacggtggatgtgtacggacacgtgacactcatgcggtcacagcgcaactacatggtgcagacagaggatcagtatagcttcatccacgaggcactgctggaggctgtgggctgtggcaataccgaggtccccgcgcgcagcctctacacctatatccagaagctggcccaggtggagcctggcgagcatgtcacaggaatggagcttgagttcaagaggcttgccagctccaaggcacacacttcgagattcatcactgccagcctgccttgcaacaagtttaagaaccgcctggtgaacatcctgccgtacgagagctcgcgtgtctgcctgcagcccattcgtggtgtcgagggctctgactacatcaatgccagcttcatcgacggctacagacagcagaaagcctacattgcaacgcagggtccactggcagagaccacagaggacttctggcgtgccctgtgggagaacaactccactattgtggtaatgctcaccaagctccgcgagatgggccgggagaagtgccaccagtactggccagctgagcgctctgcccgctaccagtactttgtggttgacccgatggcagagtataacatgccacagtacattctgcgtgagtttaaggtcacagatgcccgggatggccagtcccggaccgtccgacagttccagttcacggactggccagagcagggtgcacccaagtcaggggaaggcttcattgacttcatcggccaagtgcataagaccaaggagcagtttggccaggatggccccatctcggtgcactgtagtgctggagtgggcaggaccggagtattcatcactctgagcatcgtgctggagcgaatgcgctacgagggggtggtggacattttccagacagtgaaggtgcttcggacccagcggcctgccatggtgcagacagaggatgagtaccagttctgcttccaggcggcgttggaatacctgggcagctttgatcattatgcaacataagccatgggccccgcccaacacctcgacccagctccaagtgccctgaatgtgagcccagccctcggtgctgggtgggaggcggcccagggaggaaacctcctctccctggagacaggcact

SEQ ID NO: 2887 - DNA, 1227 bp, Rattus norvegicus
  Genbank Accession No. L19998
ggaattcgcaacgcctacacaaagatccctatcactgagcacccggaggcaaggctcagaaccccaggatcagcaacatggagttctcccgtccaccgctagtgcatgtgaagggtatcccactcatcaaatactttgcagagacaattgggccattgcagaacttcacagcctggcctgatgacttgctgatcagcacatacccaaagtctggtactacctggatgagtgagatcctggatatgatctatcagggtggcaagctagagaagtgtggccgcgcccccatctatgcccgggtacccttccttgagttcaaatgtccaggggttccctcaggtcttgaaactttggaagagacaccagccccacggctccttaagacacatctgcccctgtccttgctccctcagagtctgctggatcagaaggtcaaggtgatctacattgcccgaaatgcaaaggatgtggttgtctcctattataacttctacaacatggccaagctgcaccctgatccaggcacctgggacagcttcttggagaacttcatggatggggaagtgtcctatgggtcgtggtaccagcacgtgaaggagtggtgggagctgagacacactcaccctgttctctatctcttctatgaagacataaaggagaaccccaaaagggagatcaagaagattctagagtttttggggcgctctctacccgaggagactgtggattccattgttcaccacacatctttcaagaaaatgaaagagaactgcatgactaactacacaaccatccccactgagattatggaccacaatgtttctcccttcatgaggaaaggtactactggggactggaaaaataccttcactgtagcccagaatgagcgctttgatgcccactatgctaagacaatgacagattgtgacttcaagtttcgttgtgaactatgagtggattatggctatactgggaaccaaggcaaactgacacagcccatcatgatctcaagtaaaatgtgatgtgttcaatctacttgttgtatgcctagaggaaatctgagctaagagaataggattggggatgtggctgaggcagagggttttatcaacgcatgtcaggaaagcaatcagtcccaacacctaaaaagaacctaaagtacaaacatgcaaaaaatagtaagataaactatattttacctgaaagaataaatgccactgggaaatg

SEQ ID NO: 2888 - DNA, 2094 bp, Rattus norvegicus
  Genbank Accession No. L20900
ggcacgagctccgatctccgctgagaggctcctgggggccggggctccgaggaaaatggttcgatgttattaaaaatgaatcttaagaagaaaaatgaatcacagcagttaaactatggagttctgctacttgtaagaagtggagaagcctgagattacatcactgacccttgatcctccactgagctaaaacaccagctggtaattgcctatgattttatagacttccctccatctgctgggtccaagtgtccgtctgactgctctggtaccggagcatctttatttctgcatctaaacttgtaaaaagcacatcgaatcttgttccccaggagaaaatcttcaatgtaaccattttcaatgtatccgatgatacaagcgcattgtaatctccaggtagaagcagctttatcagtggaaagggtttaatagaacatatcctatcatgctttttctctgccccttctcaaatcatcagcagtagaaaagagaagaaaacatgtcaggacacaaatgttattcctgggagttgcaggatcggtttgctcaagataagtcagttgtcaataagatgcaacagaaatattgggaaacgaatgaggcctttatcaaagccacagggaagaaggaagatgaacatgtcgttgcttctgatgcagacctggatgccaagctagagctgtttcattcgattcagagaacctgtttggacttgtctaaagcaattgtgctctatcaaaagagaatatgtttcttgtctcaagaagaaaatgaactgggaaaatttctccgatcccaaggcttccaggacaaaacccgagcaggaaaaatgatgcaagccacaggaaaggccctctgcttttcctcccagcaaaggttggccttgagaaaccctttgtgtcgatttcaccaagaagtagagacttttagacatcgggccatctccgatacctggctgacagtgaaccgcatggagcagtgccggacagaatatagaggggcgttattgtggatgaaggacgtgtctcaggaactggatccagacctctacaagcaaatggagaagttcaggaaggtacagacacaagtccgcctcgcgaagaagaactttgacaaattgaagatggatgtgtgtcaaaaggtggatcttcttggagcaagcagatgtaacctcttatctcacatgctagcaacatatcagaccactctgctccacttttgggagaaaacttctcacaccatggcagccatccatgagagcttcaaaggctatcaaccatatgaattcacaacgttaaagagcttacaagaccctatgaaaaagctagtcgagaaagaaaagaagaagagctcccggagggaaaaccgggaggctgtggcacaggagccgaggcagttaatttcattggaggaagagaaccagcacaaagaatcctctacttgccagaaggaggagggaaaaagcgttccgtcgtctgtagacaagagttctgcagatgatgcatgctcaggacccatagatgaactattagacgtgaaacctgaggaagcttgcctgggtcccatggcagggaccccagaacctgaaagtggggacaaggacgacctcctgctgttgaacgagatcttcagcacttccagcctggatgaaggggagttcagcagggagtgggctgcggtgttcggagacgaccggctgaaggaaccagcccccatgggggcccagggagagccagaccccaagccccagataggctctgcgttccttccttcacagcttttagaccaaaacatgaaagatctccaggcctctctccaagagcctgccaaggctgcctcggacctgactgcctggttcagcctctttgctgacctcgaccccctatcaaatcctgatgctattgggaaaaccgataaagaacacgaattgctcaatgcatgagtctgcaaccttcaacaggggagccctccggccactccgcaacacctcatccagggcttgcagaagtctaacgtgctcagtacgctgttttaatatttacatgccattttaataaaacgagagggtcaaggccctgtttctatcgctataaa

SEQ ID NO: 2889 - DNA, 606 bp, Rattus norvegicus
  Genbank Accession No. L22190
tctagagtcgatctgcccagcagacaccagcaggatgaagctactcaccagcctggtcttctgctccctgctcctgggagtctgccatggagggtttttttcatttgttcacgaggctttcctaggggctggggacatgtggcgagcctacactgacatgaaggaagctggctggaaagatggagacaaatacttccatgctcgggggaactatgatgctgctcaaaggggtcccgggggagtctgggctgctgagaaaatcagtgatggaagagaggcctttcaggaattcttcggcagaggacacgaggacaccatggctgaccaggaagccaacagacatggccgcagtggcaaagaccccaattactacagacctcctggcctgcctcagaaatactgagcatcctcctattagttcagaaggctgtgttgggggcctgagggtggggtctgggcttcctatctaggaacactgaagatgctctctgggaatacatagtatacctctcatgtgtgtatcccacaagggtttcagaactgagttactcgagcagtagtaactgcttgaggaggagagggtaataaacaggaatttggaactgg

SEQ ID NO: 2890 - DNA, 1382 bp, Rattus norvegicus
  Genbank Accession No. L22191
gaattccggccttccctccgtggctccggcgctgcccggtcccctcgggcggcagctgccatgggcaccgacagccgcgcggccggagcacttctggcgcgggccagcaccctgcacctgcagaccgggaacctgctcaactggggccgcctgcggaaaaagtgtccgtccacgcacagcgaggagcttcgagactgtatccaaaagaccttgaatgaatggagctcccaaatcagccctgatttggtcagggagtttccagatgttttggaatgtaccatgtcccatgcagtggaaaagataaaccctgatgaaagagaagaaatgaaagtttctgctaaactgttcattgtaggatcgaattcttcatcatcaactagaaatgcagttgacatggcatgctcagtccttggagttgcacagctggactctgtcatcatggcttcccctccaattgaagatggagttaatctttccttggagcatttgcagccttactgggaggaattagaaaacttagttcagagcaagaagattgttgctataggcacctcggatctagacaaaacacagttggagcagctgtaccagtgggcacaggtaaaacccaatagtaatcaagttaatcttgcctcctgctgtgtgatgccaccagatttgactgcatttgctaaacagtttgacatacagctactgactcacaatgacccaaaagaactgctctctgaggcaagtttccaggaagctcttcaagaaagcatccctgacattgaagcccaggagtgggtgccactgtggctgctgaggtactcggtcatcgtgaaaagcagaggaatcatcaagtcaaaaggatacattttgcaagccaaaagaaagggttcttaactacagctcaagctcacaactcaggggccttgtatttatctggaacataagataaaaattcatgataaaattgagatgtgtaaaaaaaaatctagctctcgcctacaaaaagcgtcactgaggcgtgaatgtggtggtttggcaatgtgttgagtttaagtacctccctggcgtctgcagcagcgcactcacaggaagcattgtattctcttcattaaactcttggtttctaactgaaatcgtctataaagaaaaatacttgcaatatatttcctttatttttatgagtaatagaaatcaagaaaatttgttttaagatatattttggcttaggcatcagggtgatgtatatacatattttttatttctaaaattcagtaactgcttcttactctatacttctataactaagcaattacattacagttgttaagacatactggaagagatttttttcctgtcgtttgacaaaataatctatctcagagtcggaattc

SEQ ID NO: 2891 - DNA, 1363 bp, Rattus norvegicus
  Genbank Accession No. L22339
aacctgtcaagtccccattctaagatgtccttggaaaaaatgaaagaccttcaccttggtgaacaggacctacagccagaaaccagagaagtgaatgggattctcatgtccaagttgatgagtgataactgggacaaaatctggaacttccaagcaaagcctgatgatctccttattgcaacctatgcaaaagcaggtaccacctggacgcaggaaattgtggacatgatccaaaatgatggggatgttcaaaaatgccaacgggccaacacctatgaccgacatcctttcattgagtggactttgccttcacccctcaactcaggtctggatctggctaacaaaatgccatcacctagaaccctgaagactcatctgcctgttcatatgctgccaccttccttctggaaagaaaactcaaaaattatctatgtggccagaaatgccaaggactgcctggtatcttactattacttctcaagaatgaataaaatgctgcctgaccctggtaccctgggagaatacattgaacagttcaaagctggaaaagtgctgtggggctcctggtatgaccatgtaaagggatggtgggatgtgaaagaccaacaccgtattctgtatctcttctatgaagacatgaaagaggaccctaaaagagaaattaagaagatagcaaaattcctggaaaaagacatatcagaggaagttcttaataaaatcatctaccacacctcctttgatgtaatgaaggaaaacccaatggccaactataccactctaccctccagtatcatggaccactctatatctcctttcatgaggaaagggatgcctggagactggaagaactactttactgtggcacaaagtgaggattttgatgaagactaccggaggaagatggcagggagcaatattaccttccgcacagagatctgagagcagtgaggaagagagaagccctagatttcctgactatatgctttagctatttgagcttcattcctgagttttgtatgtcctgtgatactatttcatcaaaatgtaatcagaccttccacactaggtgattatccttattgatacctactatacaaccatgcacttttactgcacttacgcaaataacagataccttcactagcctgtaattgtcttgtttcacggcaaatctcatgaatagagagacacacaaaacaggttagacataagaaagtaaataagaaaagccaaacgaatgagaagtgagcactgtgcattaaccaaaggctatttaattttcttaacaattgtcttcatctgttctctttaacgaaatacctaatttgtttataaagaataaaaatgatttcttatgcaaaac

SEQ ID NO: 2892 - DNA, 1821 bp, Rattus norvegicus
  Genbank Accession No. L23128
gaacacactttatcagcaagggtgagggcaagaggctagcaggatgtaggccggagaattgtcagacctgttggtggcttctgccgagaagaatttagaacataaaatagatgatggatttgggacaatagattctgcacccagagcttctgtcacttggttacttttaaaattaagattgcctggtgttagttgggttctgagattatccaatccctgtcgctctggtttacaaagttgtccaagatcagcccagacccatatgctctgggttcctaaggctgctgcgcgctggctcagtgcccttctccagatcctgctcctgaatgcctgcttctcctggacttggacccttgtgggctcacactccctgcggtatttctccactgtcatgtcctggcccggcctccgggagccaaggataatagtcagcggctacatagataatatggagttcctgcgcttggacagcgacgccgaaactccaagggtgaagcccctagtaccatggctggagcaggaggggctggaatacttggagcagcagattcatagaatcaggactcaagcacaacagtctgaaaggaacctgatgacgctggttcgtttttacaataagagcatggacgacttccacacactacagtggcagcaaggctgcgatgtggggtcagatgggcgcctgcttcactggtacgaccagctcgcctttgatggcatagatcaccccaccctgaacaaagacctgcgtttctggacagcgtggaccagcactgtagctcagatctctcagcccgagttagaagctcgcctgaaggacaactgctcagagctgctgcagaaatacccagaaaaggagaaggagaggctgctgcgttcagacccgccaagggcacatgtgacccggcaccccagacctgaaagtgatgtgaccctgaggtgctgggccctgggtttctaccctgctgacatcaccctgacctggcagttgaatggggaggacctgatccaagaaatggagtttgtggagaccaggcctgcaggggatggaaccttccagaagtgggcatctgtggtggtgcccctagggaaggagcagaagtacacatgccttgtggagcatgaggggctgtcagagccgctcaccctgagatgggagcctgcccaggactccaccactacaatcattctaattattctacccactgtctctgcaattgccctctgcgttgctgctgtggcaacttgcatatgcctgaagaagaaggcaggtgaaagaggaaggcacgacacccaggaagcagatggagacagtccccaagactctagcaagattgttgtggatgatcaggagatggaggatcccttttggaatactgagaactacagaactcatctaggataccgctctgggactttaggatttctaagcttgtcaccctaaaagaggtaccagcctgtcctccctgctccagcagaacactagagtccccctgcctctccttcatgaccagggcaggagcaggccagttcttaccacactggacagaaactggtccctcctttctgtcttgaagatctgtccacctctctcttctctaagtggcttcttgtctggcattttgccatgttgtcaagggacccagagaaggggccaagctccatcctctcacacacctcattctggctactacccccaatgtttcagtgacatttaatcaggtcaagttgggaccaatgactttgatgcagaaaagaattgtggactagtagagatggggtttaataaaaaaaattctatttttggtaaaaaaaaaagtc

SEQ ID NO: 2893 - DNA, 3711 bp, Rattus norvegicus
  Genbank Accession No. L23413
gaagctgctgcacctggagcacccacccctctgtagaggggagttgatcagaggcccacataaccgtaattacttgtgagcctctgattatagtacaacttgctggattagctcaccggattagccgctcaggtaacactcatttgactggggaaacccatgactcagctatcttttgggtaaataatttaacagtgagcccagcggagtattctccacgggtcagcctcagaagtgcctctgtctgttaagagaagccagggtgattggaggatcagcccgccagcaagctgctgcccccagatattgcaaagcctacagagccggcctggtgtcccagattagccaaagagcctggtgtgacaggatggatgcttctcctgagcccccgcagaagggcgggacactggtactggtccgacggcagccccctgtgtcccagggcttgctggaaacactgaaggccaggctgaagaagagctgcacctgcagtatgccatgcgctcaggctctggtgcaaggtctgtttcctgtcatacgctggctgccccagtaccgccttaaggaatacctggcaggtgatgtcatgtcgggattggtcattggcattatcctggtgccacaggccatagcctactcactgctggctgggttgcagcccatctacagtctctacacttccttcttcgccaaccttatctacttcctcatgggtacctcccgccacgttaatgtgggcatcttcagcctgctgtgtctcatggtgggtcaggtggtggaccgagaactccagttggctggctttgacccctcccaggattctctagggcccgggaacaatgacagcaccctcaacaacacagccacactgacagttgggctacaggactgtgggcgggactgccatgccattcgtatcgccactgccctcactctgatggccgggctttatcaggtcctcatggggatcctccggctgggcttcgtgtctacctatctctcgcaacccctgctcgatggctttgctatgggagcttctgtgaccatcttgacttctcaggctaaacacctgctgggcgtgcggatccctcggcaccagggcctaggcatggtgatccacacttggctgagcttgctgcagaacgtgggacaggctaatctgtgtgatgtggtcaccagtgccgtgtgcctggcagtgctgctgacagctaaggaactctcggatcgctatcgacactatctgaaagtgccagtgcccacagagctattagttattgtggtggccacgattgcgtcccattttggacagctccatacacggtttggctcgagtgtggccggcaacattcccactggttttgtggccccacagataccagaccctaagataatgtggagtgtggccctggatgccatgtccctggccctcgtgggctcagccttctccatctccttggcagaaatgtttgcacgtagtcatggctactctgtcagtgccaaccaagagctgctagctgtgggctgttgcaacgtgctgcctgccttcttccactgttttgccactagtgctgctctgtccaaaactctggtgaagatagccactggctgccagacccagttgtccagtgtggtcagtgctgctgtggtgttgctggtgctgctggtgctggcgccattgtttcacgatctgcagcggtgtgtgttagcttgcatcattgtcgtcagcctgaggggggcgctgcgcaaggtgaaggatctcccacaactttggcggctaagccctgcggacgcactggtctgggtggctactgcagcgacctgtgttctagtcagcatcgaggctgggctgttagctggggtgttcttctcactgctcagcctggcaggccgcacgcagcgtccacgggctgcccttctggctcgaattggagactcgaccttctatgaggatgctgctgagtttgagggcctcctgcccccgcccgaggtgcgagtgttccgtttcacaggtccgctctactatgccaacaaggatttcttccttcggtcactctacagtctgacagggctggatgctgggtactcagccaccaggaaggatcggggcacagaggtgggtgtcagtaacagaagtcttgttgaccgcaaggatctgggttcagtgagcagtggggatgggctggttgtacccctggcatttggtttccacacagtggtcattgactgtgcaccactgctgttcctggatgtggctggcatggccacattgaaggacctgcgcaaaaactacagggccctggacatcaccctgcttctggcttgctgcagtccctcagtgagagacacactgagaaaagggggcttccttggggaagaccagggaactgcagaggagctgctgttccccagtgtacacagcgctgtggagacagcatgtgcccgccgtgaggagctgatggctgctgactctgccctctagcagggcccgcttcctcaagagccaagacctgtgtccacgagccagtcctgagctcttttgtaggagtgacatgaatgataaagtcattatagataaatccttggaccgcctttgccctggagaagccagggaactccaagtaggaaaggaaagtgcagtacccttaacacattggaggattccaaacattcagtgattgaggcgctctacctctgagcccactgctgccccctggtgcctattcaaccctagtagttgcacccacacacatgattccctcagccaacacagtgcccagtttgatagtctgtttatgttgtcatctgaaacagagtcctgcaaattatatgacctccatgatgccaaaaggacactttcccattccctgaaccatcgggtaccagatgtgagctggatatgtggccacacctcaagggtctgaatttccgaaaggcctccttaggcctggtgctcatcttgattggacccttgcaaaggcagccacctgctccagagtcacagtccagtgtcactgtctaaccgatgtgactgacataacctcaacctgactttcgggcacaatgtcccaatacagcttatactggtaaccacaacgtggcgtatgtatggtacaaagccaggcacagtagacacttaccccattctgctgtacttctaagaaaacctcaggaggaaaccacctgtgctccatccagggcctgcctttggcacagccaagcagacattcccctcctcctctgcccaacaggatgctctaactggaagcacaccccagccctgtgcactaccatgattctcccccacccacagcccagcattgtgttccacagctggccccaaaaacgtcagctccaccatctcggctctcttaaaacaagctctgaccagcaattcccagggtacccatttcagcgtcacccacctggctgtgatgaggtccagcagccagtgtatccggacctgctcaatgccactgtgaggcacagcacctatgtaggcaaggttcagttgctggtcccaactaaggtcgtactggtcagcctggtcgtgaggcagtggggggctagggataggacaaagaagtgaagtgtttgtcctaagcaggggcctgcatcataccagactttacacatgttatcacctgactacctagacccttgaggatgaactgtgtatctccagaatgtatgataaagtagcccactaaccag

SEQ ID NO: 2894 - DNA, 2015 bp, Rattus norvegicus
  Genbank Accession No. L24207
gcagagcatcagaggcccagctagagggacaacacagaggagtaatttgctgacagacctgcagggatggacctgctttcagctctcacactggaaacctgggtcctcctggcagtcgtcctggtgctcctctacggatttgggacccgcacacatggacttttcaagaaacaggggattcctgggcccaaacctctgcctttttttggcactgtgctgaattactatatgggtttatggaaattcgatgtggagtgccataaaaagtatggaaaaatatgggggttgtttgatggtcaaatgcctctgtttgccatcacggacacagaaatgatcaagaatgtgctagtgaaggaatgcttttctgtcttcacaaaccggcgggattttggcccagtggggattatggggaaagccatctctgtatctaaggatgaggagtggaagagatatagagccttactgtcacccacgttcaccagtggaagactcaaggagatgttccctgtcatcgaacagtatggagacattttggtaaaatacttgaggcaagagaaaggcaaacctgtccctgtgaaagaagtgtttggtgcctacagcatggatgtgatcaccagcacatcatttggagtgaatgttgattccctcaacaacccgaaggatccttttgtggagaaagccaagaagctcttaagaattgatttttttgatccgttgttcttgtcagtagtactctttccattcctcacgccagtatatgagatgttaaacatctgcatgttcccaaaagattcaatagaatttttcaaaaaatttgtgtacagaatgaaggaaacccgcctggattctgtgcagaagcatcgagtggattttcttcagctgatgatgaatgctcataatgattctaaagacaaagaatctcatacagccctatccgatatggagatcacagcccagtcaatcatttttatttttgctggatatgaacccaccagcagcacactttcctttgtcctgcattccctggccactcacccagatacacagaagaaactgcaggaggagatcgacagggctctgcccaataaggcacctcccacctatgatactgtgatggaaatggaatacctggatatggtgttgaatgaaaccctcagattgtatccaattggtaatagacttgagagagtctgtaaaaaagatgttgaaatcaatggtgtgtttatgcccaaagggtcagtggtcatgattccatcttatgctcttcaccgtgatccacagcactggccagagcctgaggaatttcgcccagaaaggttcagcaaggagaacaagggcagcattgatccttatgtatatctgccctttggaaatggacccaggaactgcattggcatgaggtttgctctcatgaatatgaaactcgctctcactaaagttctgcaaaacttctccttccagccttgtaaggaaacacagatacctctgaaattaagcagacaaggacttcttcaaccaacaaaacccattattctaaaggttgtgccacgggatgaaatcataactggatcatgattttccctcaaggagttctgctgaattcgtcagaaatgtggtgtctaagaacaccagaccctttaatttatgtcatgaataaaattcagatgaaattagggcttaatcgactttgttttgattcggtacatctttgatctttctcagtgtctacaatgtacccatctaatataaaggaaatgacaagtcagtgacagaacaggacttaacctttggtgattctcatgggactacctccatttgtttctggttgtctctgttaatttcttttgatagtaaccttgtctctgtaatttgatcaagaattttcatgaaaatgtgaactattgtgacacctttaattgtagatttggtatcagatgttttagatgcattattctacactaaatgttacatggaaaaaatgtgaataaacacttctttaaaaatccccaggggca

SEQ ID NO: 2895 - DNA, 814 bp, Rattus norvegicus
  Genbank Accession No. L24896
gaattccctggcctggctggcaccatgtgtgcatcccgcgatgattggcgctgtgcgcgctccatgcacgaattcgcagccaaggacatcgatgggcacatggtttgcctggataagtacaggggttgcgtgtgcatcgtcaccaacgtggcctcgcaatgaggcaaaaccgacgtaaactacactcagctagtcgatctgcatgcccgatacgccgagtgtggtttacgaatcctggccttcccttgcaaccagttcgggaggcaggagccaggaagtaatcaagaaatcaaggagtttgcagccggctacaatgtcaggtttgacatgtacagcaagatctgtgtaaatggggacgatgcccacccactgtggaaatggatgaaagtccagcccaagggcaggggcatgctgggaaatgccatcaaatggaactttaccaagtttctcattgataagaacggctgcgtggtgaagcgctatggtcccatggaggagccccaggtgatagagaaggacctgccgtgctatctctagccctacaagtgtgtgcccctgcaccgagcccccctgccctgtgacccctggagccttccaccccggcactcatgacggtctgcctgaaaaccagcccgctggtggggcagtcccgaggacctggcgtgcatccccgccggaggaaggtccagaggcctgtggccccgggctcgagcttcaccttggctgccttgtgggaataaaatgtagaaatgtgcaaaaaaaaaaaaaaaaaaaaaaaaaaaaaaaaaaaaaaaaaaaaaaaaaaaaggaattc

SEQ ID NO: 2896 - DNA, 1402 bp, Rattus norvegicus
  Genbank Accession No. L24907
gaattcggcacgagccaggccccagccgagcgccaacgctgaataggcaaactgaccaggagccctggctgtggctggggggcagtgggccatgccaggggcagtggaaggccccaggtggaagcaggcagaagacattagggatatttatgacttcagggatgttctgggcacgggtgccttctcagaagtgatcctggcagaggacaagaggactcagaaactggtggccatcaaatgcattgccaagaaggccctggagggcaaagaaggcagcatggagaatgagatcgccgtcttacacaagatcaagcaccccaacattgtagccctggatgacatctatgagagtgggggccacctctacctcatcatgcagctggtttcaggtggagagctgtttgaccgaattgtggagaaaggaggctacacagaacgggatcggagccgcctcatcttccaggtgctggatgctgtcaagtacctgcacgacctgggcattgtgcaccgggatctcaagccagagaacctgctatactacagtctggatgaagactccaaaatcatgatctctgactttggcctctccaagatggaggacccaggcagtgtgctctccacagcctgtgggactccaggatatgtggcccctgaggtcctggcccagaagccctacagcaaggccgtggactgctggtccataggagtcattgcctatatactgctctgtggctacccgccgttctatgatgaaaatgatgccaaactttttgaacagattttgaaggctgagtatgagtttgactctccttattgggacgacatctctgactctgccaaagatttcatacgtcatttgatggagaaagacccagagaagaggttcacctgtgagcaggccttgcagcacccctggattgcaggagacacagctctggataagaatatccaccagtcagtgagtgagcagatcaagaagaactttgccaagagcaagtggaagcaagctttcaatcgtaccgctgtggttcggcacatgaggaagctgcagctggggcaccagccaggagggacagggacagacagctagccacggagagctgctgacacccacagctggggggccagcagctggctgctgctgtcgagactgctgtgtggagccaggctcagaactccccctgcaccacccccaagctctagggccatggactgaacatcaaggagtcagggtttcgtccgtgaggggttggaggcagcctgcttcctcctcaccccagaactggggagtttctgaccccatacttcttccctcccctctcactcttcactgcattttccatacaaatgtttctattttattgttccttcttgtaataaagggaagctctgtgccgaattc

SEQ ID NO: 2897 - DNA, 2245 bp, Rattus norvegicus
  Genbank Accession No. L26267
agggagattctgaatccccctgagaaagaaacacaaggtgaggggcccagcctgttcatggccagcaccaagaccgaagcaattgccccggcatccaccatggaagacaaggaagaggatgtggggtttcaggataacctctttcttgagaaggcgctgcagctcgccaagcggcatgccaacgccctcttcgactacgcggttacgggagatgtgaagatgctgctggcggtacagcgccatctcaccgcggtgcaggatgagaacggggacagtgtcctacacttagccatcatccaccttcatgctcagctcgtgagggatctgctagaagtgacatctggttcgatctctgatgacatcatcaacatgagaaacgatctgtatcagacacctttgcacttggccgtgatcaccaagcaggaagatgtggtggaggacttgctgagggttggggctgacctgagtcttctggaccgctggggcaactctgtcctgcacctagctgccaaagaaggacatgataaaatcctcggggtcctactcaagaacagcaaggcagcactccttatcaaccaccccaacggggaaggtctgaatgccattcacatagctgtgatgagcaacagcctgtcatgtctgcagctgcttgtggctgctggggcagaagtcaacgctcaggagcagaagtctgggcgcacggcactgcacctggccgtggagtacgacaacatctcgttggccggctgcctgctcctggagggtgacgccctcgtggacagcaccacctacgatgggacgacacctctacacatagcggctggaagagggtccaccaggctggcagctcttctcaaagcagcaggagcagaccccctggtggagaactttgagcctctctatgacctggacgactcttgggagaaggctggagaagatgagggagtagtgccaggcaccacacccctggacatggctgccaactggcaggtatttgacatactaaatgggaaaccatatgagccagtgttcacatctgatgacatactcccacaaggggacattaagcagctgacagaagacacgaggctgcaactctgcaagctcttggaaattcctgatcccgacaagaactgggccactctggcgcagaagttaggtctggggatattgaacaatgccttccggctgagtcccgccccttctaaaactcttatggacaactatgaggtctctggggggaccatcaaagagctggtggaggccctgcgacagatgggctacacagaggccattgaagtgatccaggcagccttccgcaccccggaaaccacagcctccagccccgtgaccactgctcaggcccacttgctgcctctctcgtcctcctccacaagacagcacatagatgagctccgagataatgacagcgtgtgtgacagtggtgtggagacatccttccgcaaactcagcttctcggagtccctcactggagatggcccactgctatctctgaacaaaatgcctcacaattatgggcaggatggacctatagaaggcaaaatttagcctgctggcggttccccacactgtaaaccaaagccctgaaaggccatcatatcgttccgaaggagaaggcaaaaaacgcatcccaaggtgctggaaggtcaccggcctgcagggtcaatcttgatgtcattcgaggccttccgaatttggcttcctttcttggctctgaaatgaaatttagttgtcatatacagatggtgtctagcaatcacggctgcactcggtgtggcttggggtatggtggcttgagcttttccagctgctattggattacacttgctttgtgttgtcactgctgtccctctgctgggtccccgctgtcattaaggtatcgcagtccccacctggtgttctttctagccatctacagtacagtcatgcactcaaattaagattaaggaaaaagatatttttaagtgagtaacttcatgcgcaataaaaaaaagacatggctttttctaatgtggtttatctgtgatttaaaaaaaaaaaacacatgaacttaacaatatttaaaacctgctacaatcagtgctgaaaatagtattttcccccttttctgcattttactattgtaaatatgttttctaaatcaaatactttaaaagaagaaatgttggatttataaatgctattttttattttacttttataataaaagtacaagcacactgtt

SEQ ID NO: 2898 - DNA, 1464 bp, Rattus norvegicus
  Genbank Accession No. L26268
atgcatcccttctacactcgggccgccaccatgataggcgagatcgccgccgcggtgtccttcatctccaagttcctccgcaccaaggggctcacgagcgagcgacagctgcagactttcagccagagcctgcaggaactgctggcagagcattacaaacatcactggttcccagaaaagccgtgcaagggatcaggttaccgttgtattcgcatcaaccataagatggatcctctgattggacaggcagcccagcggattggactgagcagtcaagagttgttcaggcttctcccaagtgaactcacactctgggttgacccctacgaagtgtcctacaggattggagaggatggctccatctgtgtgctgtatgaagcctcaccagcgggaggtagctctcaaaacagcaccaacgtgcaaatggtagacagcagaatcagctgtaaggaggaacttctcttgggcagaacaagcccttccaaaaactacaatatgatgactgtatcaggttaagatatagtctatggatggatcatcttataatggatggatagatttgattttttgctttgggtgggctcctcttggggatggattatggaataaccatgtcacagctgtgaagatctggcacaagatagagtggtaataatttttttttttaaagtgacagtgccatagtttggacagtacctttaagtgatttaagtagcctgtgagtccaagtaaaggatcactttatttggtagggagtgaagtcgcagggtggtttcagtttctcccagaccttatacccaatttgtcacaccagtccctttaaggaaattctgtatttcaaagaaccctcttttgcagtcagtcaaccttgcaggggaatttgcactatttacacttgaaagttaccagtaacttttttttggcagctcaataggaaagctcaatgttctaagcatggtagtactggaaatattacacggagacttttacctagcacttaaaaatgtataaatgtacataaagacacttagtacgcatgacctgggggaaatggtcagaccttgtgtttttggctttgagagtagcaagtgaccggaatctgccatgacaacaggcttttaaaagacccttacaaagacactgtctcaactgtggttagcaccagccagctctctgtacattcgcttgtagttttctaagattgagtgagtaaacttcttatttttagaaagtggaggtctggtttgtaactttccttgtactcaattgggtaagagtctttttccacaaaccgccatctattttgtgaactttgttagtcatcttttatttggtaaattatgaactggtgtaaatttgtacagttcatgtatattgattgtggcaaagttgtacagatttctatattttggatgagaaatttttcttctctctataataaattgtttcttatcttggcatttt

SEQ ID NO: 2899 - DNA, 2638 bp, Rattus norvegicus
  Genbank Accession No. L27843
cacaatcttcaatgagtagacatattcctcagttctgtggtgttctcggtcacacatttatggagtttctgaagggcagtggagactactgccaggcacagcacgacctctatgcagacaagtgaactgtagaaattcattactactccaccaagaagcccccataagagtggatagcctggacacagtcgtgttgaattgaaatctgcagagcattttccaagagctcagacctggatggggtaaacctcagtgcacttcctctgtatcgcctcagtattcctggattgaagagtcactgcttcttgtgaggaggttcatttcattgcccgtttctcccgactcatactcaaagcactgagaatttcaagtggagtatattgaatattgaagtagacttcaggttgttttttggttttgttttggttttttgttttgttttgttttgttttgttttggttttcagtttttgtttggaatcatttctgtattcaattttttaattctttcataaccctattgggtgtttttttaaactaaattaacatggctcgaatgaaccgccctgctcctgtggaagtcacatacaagaacatgagatttcttattacacacaatccaaccaatgcgaccttaaacaaatttatagaggaacttaagaagtatggagttaccacaatagtaagagtatgcgaagcaacttacgacactactcttgtggagaaagaaggcattcatgttcttgactggccttttgatgatggtgcaccaccatccaaccagattgttgatgactggttaagtcttgtgaagattaagtttcgtgaagaacctggttgctgtattgctgtccattgtgtcgcaggccttggcagagctccggtgcttgttgccctagcattaattgaaggtggaatgaaatatgaagatgcagtacaattcataagacaaaagcggcgcggagcttttaacagcaagcaacttctgtacctggagaagtaccgtcctaaaatgcggctccgcttcaaggattccaacggtcatagaaacaactgttgtattcaataaaactggggtgcctgatgccattgccttggaagaggaacttcagatgggacctgatttgttatttacccaatgtgtccacttacctgtggaagctccaggggaatattgaaaaagttttaccaggccacaagcttgacagaattgcaacctctataattgggctatgatcaacacgtttggacacttagcaaaagatttttgctggtcagcatttaaaatgtgcttattatttgtaccaattgacctttcctaaaataaggtattgagtaatgtcattaaatgtactcctgtgccagaatattattagtctataaggaatttagaaggattaggtgccaaaatacccagcacaatacttgtatatttttagcatcatacagaaccaaaattccaagaactaagaactctccagaccttccatggtgtattccttcagtcatttcaaacaccgcagggcttctcttgttatctgcctgctcactctatgtttacatctcccacacttacaccagaacacatcaggtttgcttagctatcttttaagtcttgcaatgattatttaatgtctctgtcttattttgtgctgttttgggaaacctccatttgaaaatcaactttgttacagaagcacatatcttcaataatgtctccagacaaaaagccttatagttaatttaatgtttgcactcgggtgcaacctgacagggagggcctgaacaagaaaggagaggaggctattaaatatttttagtaatatgttgcctttgtcttgtgcagaacatgtagagtatgctctttaatttagtaaatatttttaagacgtagagatacattgttgtagctaaccacttaatcaaaatttctgaaattcttgtgttttccatacctatctgaggttttccaacttgtttgaattatggttttccccttctcttcccaatctcttgcaaaaaagtaaaagtgggatctgctagtgaactgagcagaaatattttatacgccttttgagctatgtaacttaataattggatacttgatcatttgttttattatgtaatcgataaaatggtgatgtgtattaatgttagttcaaccatatatttatactgtctgggaatgtgtggttatagttctgtgggagaaatagtttgtcagtgttcaccagcttgtaaaaacttagtgcgagagcttcaacatctaaataaatgatgaaacgcattcgtcactgaggtcactttgcttaaaattaacttaatttgtagaaaacagtggattcaattattatcatttcagtttatggacaaatttgttagggttaccaagtgcgtttaaaaattgctctttaaaggtctagataattgtgaatcaattgaatgttgggtaccaagggaaaacggtttgtaatagttgatgaccttgatttttaattcaattccaccagtcacttgtagctttatgcagtttccaatccacttttctcatttttaagtttattacttacctgtatatattttgaaattaatttgaacctgcgtatttggcacatgatggcttataaattttaactttc

SEQ ID NO: 2900 - DNA, 4153 bp, Rattus norvegicus
  Genbank Accession No. L31894
tcgggcgccgcgcgagcctgccgctgccatgcctccgcgcgcgccgccagcgcccgggccccggccgccgccccgggccgccggccggcacgggctctcgccgctggcgccgcgcccctggcgttggctgcttctgctcgctctgcccgccgtctgctccgcgctgccgccgccgcgccccgtctacaccaaccactgggcagtgcaagtgctgggcggccccggcgcggcggaccgcgtggctgcggctcacggctacctcaacttgggccagattggaaatctggacgattactatcatttttaccacagcaagaccttcaagagatcaaccttgagtagcaggggcccccacaccttcctcagaatggacccacaggtaaaatggctccagcaacaggaagtgaaacgcagggtcaagagacaggcgcgaagcgactctctttatttcaatgatcccatttggtccaacatgtggtatatgcattgtgctgataagaacagtcgctgtcggtcagagatgaacgtccaggcggcatggaagcgcggctacacaggaaagaacgtggttgtcaccatcctcgatgacggcatagaaaggaatcacccagacctggcccccaactacgattcctatgcaagctacgatgtcaacggaaacgattatgacccatcaccgagatatgatgccagcaacgagaacaaacatggtactcgctgtgcgggagaagtcgctgcttcagccaacaactcctactgcatcgtgggcatagcatataatgcaaagataggaggcatccggatgctggacggtgacgtgaccgacgtggttgaggccaagtctctgggcatcagacccaactacattgacatttacagcgctagttgggggccagatgatgatgggaagaccgtggatgggcccggccgtctggctaaacaggctttcgagtatggcattaaaaagggccgccaaggtctgggctccatttttgtctgggcctctgggaatggtgggagagaaggggaccactgctcctgtgatggctacaccaacagcatctacaccatctctgtgagcagcaccactgagaacggccacaaaccctggtacctggaggaatgtgcttccaccttggctaccacctacagcagcggggccttctatgaacggaagatcgtcaccacggacctgcgtcagcgctgcaccgacggccacactgggacatctgtctcagctcccatggtggctggcatcattgccctggctctagaagcaaacaaccagttgacctggagggacgtgcagcacctgttagtaaagacgtcacggccggctcatctgaaggcgagtgactggaaagtcaacggagctgggcataaagttagccatctctatggatttggcttggtggatgctgaagcgctcgtcctagaggcaaggaagtggacggcagtgccatcccagcacatgtgcgtggccaccgcagacaaaaggcccaggagcatccccgtagtgcaggtgctgcggaccacagccctgaccaatgcctgtgcagaccactctgaccagcgtgtggtgtacctggagcatgtggtagtccgaatctctatctcacatccacgacggggtgacctccagatccacctgatttctccctctggaaccaagtctcaacttttggcaaagagattgctggatttttccaatgaggggttcacgaactgggagttcatgactgtccactgctggggagaaaaggctgaaggtgaatggaccctggaagtccaggatataccatcgcaggtccgcaacccagagaaacaaggaaagttgaaagaatggagcctcattttatatggcactgcagagcacccataccgcaccttcagctcccaccagtctcgctcacggatgctggagctttcagtcccggaacaggagcctctcaaggctgagggaccaccaccgcaggcagagactccagaagaagaggaagagtacacaggtgtgtgccatccagagtgtggtgataaaggctgcgatggtcccagtgcagaccagtgcttgaactgcgtccacttcagcctgggaaactccaagacaaacaggaagtgtgtgagcgagtgccccttgggctactttggggacacagcagcaagacgctgccgtcgatgccataagggatgtgagacatgcacgggcaggagcccaacacagtgcctgtcttgtcgccgtgggttctatcaccaccaggaaacgaacacatgtgtgaccctgtgtcctgccggactttatgctgatgaaagtcagagactctgcctcaggtgccacccgagctgtcagaagtgtgtggatgaacctgagaagtcgactgtgtgcaaggagggattcagcctcgcacggggcagctgcattccggactgtgaaccaggtacctacttcgattctgagctcatcagatgtggggaatgccatcacacctgccggacctgcgtggggcccagcagagaagaatgtattcactgtgcaaaaagcttccacttccaagactggaaatgtgtgccggcctgtggtgagggcttctacccggaggagatgcctggcttaccccacaaagtgtgtcgaagatgtgatgaaaactgcctgagctgcgagggctccagcaggaactgcagcagatgtaaagctggcttcacgcagctggggacctcctgcatcaccaaccacacgtgcagtaacgccgatgagaccttctgcgagatggtaaagtccaaccggctctgtgaacggaagctcttcatccagttttgttgccgcacctgcctcctggctgggtagggcgggcgccagctgccacagagggcagggtcctcctgtctgcccttttgcccagctaccttcctacagatggccagccatagcccattccttggggtggccctgagtctgacagctgtgccctcccccccccagagctgggtcccactgcagcatctctgagcacctgaactaggtggaggtggcccttaaggataaggctaaatcggcaaaaatccccctgaactctgcttgctggctgcagtctaaagctggactcgaaataggaacagagtgaattatgagactcatgcctgcagcttgggagtggcttctgggaccctagtttactgaaacttcaagaccaaagcagaaaaagagagatgcctggcatcccatcaagtcctcctcccacacattcgtgtgaccgtgacagatctcaccgagttggctggcaggaccccatgctgtcctcacctataatgaagggcctcgcttcctccccatgcatcactggccaccaaacagcctgagggatggtttgatgagactgtaaataaaataggtttcagggcataagatgtatgaccactggggatagaacctatgtctacacagctccttccgaaactacagccccctgactggaaggtccggcaccagactgaagtaggtctactcatcctctcctcagcattctcctctgagtgagctgagctgtccaagtgactgttcaacctgtgtcccagggcctcctgggcctgagccaccagtcatctacagatacagagcctgtggaggagggtccaaaggagctacttaaggctagccgaaagacctctaatggccaagcagttcctccttatgcaaagccagccccaaatcactaatcgccagccctccatggcacacaactgcttctcaagtgcatttggcctccacactcaggactctgttctcgggtggacactgctctggcccagtatagtacaagcctacgttgatagagctggattgatttttctgccaagcctgtgtgggcattttataagctacgtgttctaatttttaccgatgttaattattttgacaaatatttcatatattttcattgaaatgcgcagatctgcttggtccagttccctttaacgtgggaataacatttgccttaaatttttccaacctcgtctctctccatatggtcctgctctcctctctgaatataatgtgttttgtcttgtcacctgtaagtggcaaggactcagctgttgtctgttgaatccacaacttcaaataagaaatcagtgaagcaaatctaatgttaaccctgag

SEQ ID NO: 2901 - DNA, 711 bp, Rattus norvegicus
  Genbank Accession No. L32591
gggactcgcacttgcaatatgactttggaggaattctcggccgcagagcagaagatcgaaaggatggacacggtgggcgatgccctggaggaagtgctcagcaaggctcggagtcagcgcaccataactgtcggcgtgtacgaggcagccaagctgctcaacgtagacccggacaacgtggtcctgtgcctgctggctgcggatgaagatgacgaccgggacgtggctctgcagatccatttcaccctcattcgtgctttctgttgcgagaacgacatcaacatcctgcgggtcagcaacccgggtcggctggcagagctgttgctactggagaacgacaagagccccgctgagagcgggggcctggcgcagaccccggacttacactgtgtgctggtgacgaacccacattcatcacaatggaaggatcctgccttaagtcaacttatttgtttttgccgggaaagtcgctacatggatcagtgggtgccagtgattaatctccccgaacggtgattccccgaacggtgatggcatctgaatggaaataactgaaccaaattgcactgaagttttgaaatacctttgtagttactcaagcagtcactccccacgctgatgcaaggattacagaaactgatgtcaaggggctgagttcaactacaggagggctaggagatgactttgcagatggacagagaggtgaaaata

SEQ ID NO: 2902 - DNA, 3700 bp, Rattus norvegicus
  Genbank Accession No. L33869
ccaagaggaagaaacatgaagtttttgctgcttagtgcacttttatttttgcatagttccttagcttggacaagagaaaagcattattacatcggaattactgaagcagtttgggactatgcttctggcagtgaagaaaaggaacttatttcagttgacacggaacagtccaatttctatcttcgaaatggtccagatcgtattggaagaaagtataagaaggccctttattctgagtacacagatggcacctttacgaagactatagacaaaccagcctggctagggtttttaggccctgtcatcaaagctgaagttggagacaaagtttctgttcacgtaaagaactttgcctctaggccctacacttttcatgctcatggggtaacttacaccaaggcgaacgagggggccatctaccctgacaacaccactgattttcaaagagccgatgacaaactgtttcctggacagcagtatttgtacgtgctgcgtgccaatgagccaagtcctggcgagggagacagcaattgtgtgaccaggatttaccactctcatgtggatgctccaaaagatattgcatcaggactcataggaccgttgatactctgtaaaaaaggttctctgcataaggaaaaagaggaaaatattgaccaagaattcgtactgatgttctctgtggtggatgaaaatctcagctggtacctagaagataacatcaaaaccttctgctctgaaccagagaaagtcgataaagacaatgaagacttccaggaaagcaacaggatgtactctataaatggatatacatttggaagcctcccagggctctcgatgtgtgcagaagacagagtgaagtggtacctttttgggatggggaatgaagttgacgtgcattcagagctctttcatggtcaagccctgaccagcaagaactatcatactgatataatcaacctgttccctgccactctaattgatgtttctatggtggcccagaatcctggagtctggatgctcagttgccagaacctgaaccatctgaaagctggtttgcaggcctttttccaggttcgtgactgcaacaagccctcaccggacgacgatatccaagacagacatgtgagacattattacatcgctgccgaggagaccatttgggactatgctccgtctgggacagacaccttcactggagagaacttcaccagtctgggaagtgattcaagggtcttttttgagcaaggtgctacaagaattggtggctcttataaaaaattggtttatcgtgagtacacagatgattccttcacaaaccggaaggaaagaggccctgatgaggaacatcttggaatccttggtcctgtcatttgggcagaagtaggagacatcattagagtcacctttcataacaaaggacaatttcctctcagcattcagccaatgggggtaagattcaccaaggaaaatgagggaacatactatggcccagatggccgttcctcaaagcaagcctcccatgtggctcccaaagaaacctttacgtatgaatggactgtccccaaagaaatgggacccacttatgcagatcctgtgtgcctatctaagatgtattattctggagttgacctcaccaaagatatatttactgggcttattgggccaatgaaaatatgcaagaaaggcagcttacttgcagatgggagacagaaagatgtagacaaggagttctacttgtttgcaacagtgtttgatgagaatgagagtttactcttggatgataatatcagaatgttcacaactgcacctgagaatgtggacaaggaagatgaagactttcaggagtccaacaagatgcactccatgaatggattcatgtatggcaatctgcctggcctcaatatgtgcctaggagaatccatcgtgtggtatttgttcagcgctggaaatgaggcagacgtgcatgggatatacttttcaggaaatacctatctgtccaaaggagaaagaagagacactgcaaatctgtttcctcataaaagtctcacccttctcatgacacctgacacagaagggtcttttgatgttgagtgtcttacaacagatcactacaccggcggcatgaagcaaaagtacactgtgaaccagtgcaaggggcagtttgaagatgtcactctctaccagggagaaaggacctactatattgcagcagtggaggtggaatgggattattcaccaagcagggactgggaaatggagctgcaccatttgcaagagcaaaatgtttcaaatgcatttttggataaggaagagtttttcataggctcaaagtacaagaaggttgtgtatcgagagtttactgacagcacattcagagaacaggtgaagagaagagctgaagaggagcacttgggcatgctcggtccactgattcatgcagatgttggagccaaagttaaagttgtctttaaaaatatggcaacaaggccatattcaatacatgcccacggagtgaaaacaaagagttctacagttgctccaacgttgccaggtgaagttcgcacttatatatggcaaattccagaaagatcaggtgctggaacggaggattcaccttgtatcccatgggcttattactcaaccgtggatcgagttaaggatctctacagtgggctaataggcccattgattgtttgtcggaaatcttatgtgaaagtattcaatcctaaaaagaaaatggagttttcccttttgtttctagtttttgatgagaatgaatcttggtacttagatgataacatcaatacataccccgatcaccctgagaaagataacaaagacaacgaggaattcatagaaagcaataaaatgcatgctatcaatgggaaaatgttcggaaacctccaaggtctcacgatgcacgtgggagatgaggtcaactggtatgtgatggctatgggcaatgaaatagacctgcacactgtacacttccacggccacagcttccaatacaagcacaggggaattcatagttctgatgtctttgactttttccctggaacataccaaaccctagaaatgtttccccaaacgcctggaacctggttactccactgccatgtgactgaccatattcatgcggggatggtaactacctacactgttttaccaaatcaagagactaagtctggctgaaagaaataaattggtgataagtggaatacgagcacaatgacgttgttttaaacatttaaaaaaatcaaagccacacaaatgttcatttgtgagggaattggtaatgccgatggacagatgaacagactgtatcatgacatgtatttgtttgctgggtaacagaatcgctttacatagtccacttacacctgcactgaaaggactctgaaaagtggaaaaaaataagcaaaaccgtatgatcagatgctgtccttgactgtcctcacaggatcactataaagtccactaaactgtctccaactcttctcatcaagtcctctaacaaaccatggggtaagagggtatagaaaagaaggaaagatgaagataccaagatgcactttgtaaaaatctgaaaaacagttgaaggatgctctcggaaaatagagaaagtcaggatccaattatgttacattttgaaaaaatgaaatggagataataaagtaataaattttaaaatgccaat

SEQ ID NO: 2903 - DNA, 2006 bp, Rattus norvegicus
  Genbank Accession No. L35271
gaattctccaaatctagtttgtttttttttctggtcattttttttaattctgcgcataaatattttaggacgcatacgggaattttgcctccgggaccgtttgtaatagccaaagactgaactccaaactctgaaagcgaggctccttggggcatttgactttgaattctgggttgcccacttttcaatgcactaagcggccagttgctaaccctgcctgggtgtaaggccgatccgcgtaactagatctcagtcctgctacccccacaaccctccggtagtaataaaggctcctgaacttgtatgttggtctcccgggagcagcttgcagaagatccgagtccctgtcgccgtctagtaggagctgttttcagggtccttactcaatcggcttgttgtgatgcgtatccccgtagatgccagcacgagccgccgcttcacgccgccttccactgcgctgagccccggcaagatgagcgaggcgctgccgctgggcgccccggatggcggcgccgccctggccagcaagctgaggagcggcgaccgcagcatggtggaggtactagctgaccaccccggcgagctagtccgcaccgacagccccaacttcctctgctccgtgctgcccactcactggcgctgcaacaagaccctgcccatcgctttcaaggtggtagcgctgggcgacgttccggatggcactctggtcaccgtcatggcgggcaatgacgaaaactactcggcggagctgagaaacgccaccgcggccatgaagaaccaagtggcgagattcaacgacctcaggtttgtcggtcggagcggcagaggcaagagcttcactctgaccatcaccgtctttacaaaccccccacaagttgccacctaccatagagccatcaaaatcacagtggacggcccccgagaaccccgaagacatcggcagaaactagatgatcagaccaagcccgggagtttgtccttttccgagcggctcagtgaactggagcagctgcggcgcacggccatgagggtcagcccgcatcacccagcccccacgcccaaccctcgggcctccttgaaccactccactgcctttaaccctcagcctcaaagtcagatgcaggatgccaggcagatccagccgtccccaccgtggtcctatgaccagtcttaccagtacctggggtccatcacctcttctgtgcacccggcgacacccatttctcccggccgagccagtggcatgaccagcctctcagcggaactttccagtcgactctcaacagccccggacctgacagccttcggcgacccgcgccagttccccacgctgccgtccatctccgacccgcgcatgcactacccaggcgccttcacctactcgcctcctgtcacatcgggcatcggcattggcatgtcagccatgagctcgacctctcgctaccacacctacctgccgccgccctacccaggctcctcgcaggcgcaggccgggcccttccagaccggctcgccctcctaccacctgtactacggcacctcggcaggctcctaccaattctccatggtgggcggcgagcgatcacccccgcgcatcctgccgccctgcaccaacgcgtccaccggagccgcgctgctcaaccccagcctccccagccagagcgacgtggtggaaaccgagggcagccatagcaactcgcccaccaacatgccacccgcgcgcctggaggaggctgtctggcggccctactgagcgccttcgggggactgagcccgccgtccatgcacagaccccgccaggagagcccttggaggccaacaggagggaaactgtgaatgcttctgatttagtaatgctgtgaataaaagaaagattttatacccttgacttcactttttaaccacgttgtttattccaaagagtgtggaatgttttcggttccgggtggggaagacgcagcccatcctgtttggcatctatttcttttccgcaccttattgattgc

SEQ ID NO: 2904 - DNA, 1811 bp, Rattus norvegicus
  Genbank Accession No. L36532
gcacgaggaccgctgtgaggggaatggaggcttcttcgcctctggaccccgtggggcgccttgtagccttctgccgcggaggagtgcatctggccgtcctgctgctgttcttgtcgccatctactttgggccagtgcccagccccaccactgtttccttatgccaaacctataaatccaactgatgaatccacgtttcccgttggaacatctttgaagtatgaatgtcgtccaggatatatcaagaggcagttctctatcacctgcgaagtaaactcagtgtggacaagtcctcaagacgtgtgtatacgtaaacaatgtgaaactcctttagatcctcagaatggcatagtacatgtaaacacagacatccggtttggatcctctatcacttatacctgtaatgaaggataccgcctcattggttcctcctctgctatgtgcataatctctgatcagagcgttgcctgggatgccgaggcacctatttgtgaatcaattccttgtgagatacccccaagcattcccaatggagatttcttcagtcctaacagagaagattttcattatggaatggtagttacctaccagtgcaacactgatgcgagagggaagaagctctttaacctggtgggtgagccctccatacactgtaccagcatcgatggtcaagttggagtctggagtggccctcctcctcagtgcattgaactcaacaaatgtactcctccccatgttgaaaatgcagtcatagtgtctaaaaacaaaagcttgttttccttaagggatatggtggagtttagatgtcaggatggctttatgatgaaaggagacagcagtgtgtattgtcgatccctaaacagatgggagcctcagttaccaagctgcttcaaggtgaaatcctgtggtgctttcctgggtgagcttcctaatgggcatgtattcgttccacaaaatcttcaactcggggccaaagtgacctttgtttgtaatacagggtatcaattaaaaggcaattcttctagtcattgtgttcttgatggagtggaaagcatttggaatagcagcgttcctgtgtgtgaacaagtgatatgtaaactccctcaggatatgagtggattccagaaagggttgcaaatgaaaaaagattattactatggagataatgtagccttggaatgtgaggatgggtatactctagaaggcagttctcagagccagtgccagtccgatgccagctgggatcctcctctgcccaaatgtgtctctcaagtgatatgtaaactccctcaggatatgagtggattccagaaagggttgcaaatgaaaaaagattattactatggagataatgtagccttggaatgtgaggatgggtatactctagaaggcagttctcagagccagtgccagtccgatgccagctgggatcctcctctgcccaaatgtgtctctcgctcaaacagtggtctaatagctggaattttcattgggataatcgtccttattttattcatcattttttcctactggatgattatgaagtttaaaaaacgcaattccaccaatgaaaagtgtaaagaagtgggtatctatttaaattctaaagaagacagctgtgttcagcctcagtctctgctcacaagtcaggagaacaacagtaccagtagcccagcacggaattcactcactcaagaagtctaatagccgccatgtacagtgatgtctctgaaacgcaaaacatttcctgtctgtatcacttttaaaataaactattttcttttaaaatctagatgtgttgttcctcgtgcc

SEQ ID NO: 2905 - DNA, 1882 bp, Rattus norvegicus
  Genbank Accession No. L38615
tggagtttgagcttggcgagcagctggacaacgagcgagttgggatggccaccagctggggaagcatcttgcaggatgagaagcagctggaagagttggcacagcaggccatagaccgggccctggctgagggggtgttgctgaggtccgcaaagaaccccagctcctctgacgtggtgacgtatgccccattcacgctcttcccctcaccagtgcccagcactctgctggagcaggcctatgctgtgcagatggacttcaacatcctggtagatgctgtcagccagaactccgccttcctggagcaaacactgtctagcaccatcaaaaaggatgagtatactgcccgtctctttgatatctacaagcaagtcctgaaagagggcatagcccagactgtgttcctgggcctcaatcgttcagattacatgttccagtgcagcgcagacggctccaaagccctgaaacagattgagatcaacactatctctgccagctttgggggcctggcctcccggactccggctgtgcaccgacatgttctcaatgtcctgaataagaccaacgaagcttccaagatcctgtccaacaaccccagcaagggactggccctggggatcgccaaagcctgggagctctatggctcagccaatgccgtggtgctactgattgctcaggagaaggaaaggaacatatttgaccagcgtgccatagagaacgagctgctagacaggaagatccatgtaatccgccgaagatttgaagatgtctctgaaaggggttctctagaccaaaaccgaaggctgtttatggaggaccaggaagttgctgtggtttacttccgagatggctacatgcccagtcagtataacgcacagaactgggaagctcgcctgctgctagagagatcatgtgctgccaagtgtcccgacattgccacacagctggctggcactaagaaggtgcagcaggaactgagcagggtgggcctgctggaagcgctgctcccgggccagcccgaggctgtggcccgcctccgtgccacctttgctggcctctattcactggacatgggtgaagaaggggaccaggctgtcgctgaggcccttgctgcccctagccactttgtgctgaagccccaaagagagggcggaggtaataacttctatggggaggaaatggtacacgctctggagcagctgaaagacagcgaggagagagcctcctacatcctcatggagaagattgaacctgagccttttaggaattgcttactacggcctggcagccctgcccaagtggtccagtgcatctcggagctgggtatttttggagtctatgtcagacagggaacaacacttgtgatgaacaagcatgtggggcatctgcttcgaaccaaagccattgaacatgcagatggaggtgtggcagcaggagtggcagtcctggacaacccctaccctgtgtgaagacatgttctgggcttcactcaagagaccttctatcctctgtacttggcactcctctcctgaggggctacccctgtacctgtgttaggggagggagcttgtctctttcatagacctccaggggctttagggaagggaaaatcccgggtcccttctctcagccttccatccaaggaccagaaaagctatgattccattggaagagttctggagctccccagatttggagtgggaatggaagctcctttgaggcaaaggcccacaaaccccacacatcttcattgccctctcgccagcctttccagcaggttctagtgccttgacctggggtaggaccaagtgacaggaggaagagggtagatgggcatagacttccccagctctgccctaaataaaacaatgctgattcaatg

SEQ ID NO: 2906 - DNA, 1592 bp, Rattus norvegicus
  Genbank Accession No. L40362
gtcgaagcagcccgacggatttagccaggtccgggatctcagatgggggcaaaggcacctcaggcgctgctcctgctggtggcggtcgccctggccccgacccagacccgcgcaggctcacactcgctgcggtatttcgaaaccgccgtgtcccggcccggcctcggggagccacggttcatctctgtaggctacgtggacgacacggagttcgtgcgctacgacagtaacgcggagaatccgagatacgagccgcgggcgcggtggattgagtgggagaagccggactattgggagacgcagacacggagagccaagggaaacgagcagatttaccgagggagcctgacgaccctgctccactactacaaccagagcgaggacggctctcacaccatccagtggatgtatggctgtgacgtggggtcggacgggagcctcctccgcgggtattggcagcacgcctatgatggccgcgattacctcgccctgaatgaagacctgaaaacgtgggaggcctcggacagagcggcgcagaaaacccggaacaagtgggagcggaaaggtgttgcagagagaagcagggcctacctgaagggcacatgtgtggagtcgctccgcagatacctggagctcagaaaggagacgctgctgcgctcagatcccccaaaggtgcgtgtgacccttcaccccagacctgaaggtgatgtcaccctgaggtgctgggccctgggcttctaccctgctgacatcaccctgacctggcagttgaatggggaggacctgacccaggacatggaacttgtggagaccaggcctgcaggggatggaaccttccagaagtgggcatctgtggtggtgcctcttgggaaggagcagagttacacatgccttgtggagcatgaggggctgcctgagccgcttacccagagatgggagcctcctccatcaactgattccaacatgggaatcattgctgttctggctgtcgttggagctgtggctgtcattgtacttgtggccctcattggagttgttgtgaggaggaggaggaaaaacataggtggaatatgaggagattacgcccctgctctaggcagggacagctgccagagctctgatgtctctcccagattgtaaagcatgaagacagctgcctggagtggactgagtgacagatgatgtgttcaggtctctcttgtgacatccagagccctcagttctctttagacaccagtgtctgatgttccctgtgattctatggcttcagtgtgaagaactgtggagcccagcctgccctgcacttcaggaccctgtccctgcactgccttccttcccttcctaggccaaccttagtggtccagcctgggggtggggggtggggacatctacatcctgtccctccttgctgccctgagtgtcagcccctcacttccacactgagaataagaatctgagtgtgaacttgattgttcacatccttgactcaagtgtggatggctttttcaattactggatggaatacttagaggtttttcgttttggggttttgttttgaaaaaaaataaatggcagatggagaagcttggaaa

SEQ ID NO: 2907 - DNA, 1602 bp, Rattus norvegicus
  Genbank Accession No. L40365
ggacctcggataggggcgatggcaccgcgcacgctgctcctgctgttggcggccgccctggccccgacccagattcgcgcgggctcacactcgctgcggtatttcgacatcaccgtgtcccggcccggcctcggggagccccggttcatctctgtaggctacgtggacgacacggagttcgtgcgctacgacagcgacgcagagaatccgagattcaagccgcgggtgcggtggatggagcgggaggggccggagtattgggagcggatcacacggatcgccaaggaaagcgagcagatttaccgagtgggcctgaggaccctgcgcggttactacaaccagagcgagggcggctctcacaccatccagagattgtctggctgtgaggtggggtcggacgggatcctcctccgagggtatgagcagttcgcctacgacggccgcgattacatcgccctgaacgaagacctgaaaacgtgggcggcggcggactttgcagcagggatcacccggaacaagttggagcgggatggtgaggcagagagactcagggcctacctggaaggcgagtgcgtagagtggctccgcagatacctggagctcaggaaggagacgctgctgcgctcagaacccccaaaggcacatgtgacccttcactccagacctgaaggtgatgtgaccctgaggtgctgggccctgggcttctaccctgctgacatattcctgacctggctgttgaatggggaggacctgacccaggacatggaacttgtggagaccaggcctgcaggggatggaaccttccagaagtgggcatctgtggtggtgcctcttgggaaggagcagaattacacatgccatgtggagcatgaggggctgcctgagccgctcaccctgagatgggagggtcctccctccgccaactccaacacgggaatgtctgttattcttggaactgtggccatcattgcagttatggccatcattgcagctgtagccttcattggacctgttgtgaggaagaggtggataaaaacagcttttcttctcacaagtggaaaaggaggagactacacccctgctccaggcagggacagctcccagagctctgatgtgtctctcccagattgtaaagcatgaagacagctgcctggagtggactgagtgacagacgatgtgttcaggtctctcctgtgacatccagagccctcagttctctttagacaccagtgtctgaagttccctgtgattctatggcttcagtgtgaagaactgtggagtccagcccgccctgcacaccaggaccctgtccctgcactgtctgtgttcccttccacagccaaccttgctggtccagcctggggttggggcctgggacatctgcatcctatcactcagtggtgctttgaactgcaactcctcacttctacactgagaataagaatctgagtgtgaacttgactgttcacatccttgacacagtgttgactgctttttaaattactggattgagaatacttagaggttgttttttgtttttgttttgttttgttttaaataaatggcaggtggagaagcttccaaaaaaaaaaaaaaaaaaaa

SEQ ID NO: 2908 - DNA, 1362 bp, Rattus norvegicus
  Genbank Accession No. L41254
ctcacctagctcgggtcatctccaggggcactgaaacacagaggcattacctactaagtcacacacctggtaagtggatgtgagggaactgagcccagccagtaggtactggatctgtgatctcattagtagaccagagctaagtacagtagatagtaaccgggacttcagaacggaacctttgacaacagctgccattatacagaaagaagggatagggctttttctaaaactcagctacacaagggctatcacatacaacttgtaaatggggcctggaggaggacctggaggaggagaagggggctatgtctcacacactaatagacctttctagcaggtacctgtgctctgagtagatctgaggctgcttggagcaggcagagttcctggctgtagacatggaggctggaactgcaccctccagacctgttgctaaattctgagataatgtgtgacccaacctggttcctctggggccagatcttttcaagagtcaggacccagacacctggttaggaaagcctagcttaggacaagacctctcactcctagggaggacagacatctcccctggagtgtttgattttacctttgtgagttcccacctctgagaaagagatgatagtatctttataaagctcttcacgaagcccaatgtggtcactacagggtgttctgaacacgtaactagaattaagcaatccacatacccaggtaattaatcactagtgccatctgtagatgttaaagcggaaagcaatccttttcttcagataagcgcttgcccatgtggaattcgcatacctaattttcacaccagttctgcctcctcctagtggcgtgagctgtggcaggtcacagatcccagacccacctctgctctgcagcccacccagcagcctgcagcctcgccctgggttgatatggagggaataacctgtgcctttctcctggtgctagcaggtctgcctgtcttggaagccaatggtccagttgataaaggcagtcccttctactacgactgggagagcctgcaactgggaggaatgatctttggggggctcctgtgcatcgctggaattgccatggccctgagtggcaagtgcaaatgtaggcgcaaccatacgcccagttccttacctgagaaagtcactccactcatcactccaggctctgccagtacctgacgaactgaacacaggaccaagtttggaggcagctttttgatgacttcctgctgtatctcccctctggagatcttcctctccaaaatggcttccctagagcacacttaagtcttcagtgacagggaagggtgttccaaagttgattttatattaaactggtcttgctgctctg

SEQ ID NO: 2909 - DNA, 357 bp, Rattus norvegicus
  Genbank Accession No. L42855
atggacgtgtttctcatgatccggcgccacaagaccaccatctttacggacgccaaggagtcgagcacggtgttcgaactgaagcgcatcgtcgagggcatcctcaagcggccgccagaggagcagcggctgtacaaggacgaccagctccttgatgatggaaaaactctgggcgaatgtggcttcaccagtcagacagcaaggccacaggccccagccacagtgggcctggcctttcgagcagatgacacctttgaagcgctgcgtattgaacccttctccagccctccggagcttccagatgtgatgaagccacaggattctggaggcagtgccaatgaacaagctgtgcagtga

SEQ ID NO: 2910 - DNA, 1918 bp, Rattus norvegicus
  Genbank Accession No. L46791
cggatctgtgggctatttgttccttccacaatgcgcctctaccctctggtctggctttttcttgctgcgtgcacagcttgggggtacccatcctcaccacctgtggtgaacactgttaaaggcaaagtcctggggaagtatgtcaatttggaaggatttgcacagcctgtggctgttttcctgggaatccccttcgccaagccccctcttggctccttgaggtttgctccaccacagcctgcagagccttggaactttgtgaagaatactacctcctacccacctatgtgctctcaagatgctgttggagggcaggttctctcagagcttttcaccaacaggaaggaaaacattcctttacagttttctgaagactgcctctacctgaacgtttatactcccgctgacttgacaaagaacagccggctaccagtgatggtgtggatccatggaggtggattggtagtgggtggagcatccacctatgatggacaggtcctctctgcccatgaaaatgtggtggtggtgaccattcagtatcgccttggcatctggggattcttcagcacaggggatgaacacagccggggcaactggggtcacttggaccaggtggctgcactacactgggtccaggacaacattgccaactttgggggtaacccaggctctgtgaccatctttggagaatctgcaggaggtttcagtgtctctgctcttgtgttatctcctctggccaagaacctcttccacagggccatttctgagagtggtgtggtcctcacttctgctctgattacaacagatagcaagcccattgctaatctgattgctactctttctgggtgtaaaaccaccacatcagctgttatggttcattgcctgcgccagaagacagaggatgaactcctggagacttcattaaaattgaatcttttcaaactggacttacttggaaacccaaaagagagctatcccttcctacctactgtgattgacggagtggtgctgccaaagacaccagaagagatcctggctgagaagagtttcaacacagtcccctacatagtgggcatcaacaagcaagagtttggctggatcattccaacgcttatgggctatccactctccgaaggcaaactggaccagaaaacagccaaatccctcttgtggaagtcctacccaacactgaaaatctctgagaaaatgattccagtggttgctgagaagtacttcggagggacagatgaccctgccaaaaggaaagacctgttccaggacttggttgaagatgtgatatttggtgtcccatcagtgatggtgtctcgaagccacagagatgctggagcccccaccttcatgtatgaatttgagtatcgcccaagctttgtatccgccatgaggcccaagacagtgatcggagaccatggtgatgaactcttctcagtatttggatctccatttttaaaagatggtgcctcagaagaggagaccaatctcacccaaatggtgatgaaatactgggccaactttgctcggaatgggagccctaatgggggagggctgccccattggccagaatatgaccagaaggaagggtacctgaagattggtgcctcaactcaggcagcccagaggctgaaggacaaagaagtggctttttggtctgagctcagggccaaggaggcagcagaggaaccatcccactggaaacatgttgagctctgatcaggagggtcagccatgtttgagaacctgaagctaaaggggaagttattccacagaagattttgtaaagacataacacttcttgtctttgagactataacatcacatggtattttgtacaaatgcattaaagggaaaatacttaaccttattgcttcaacttgtaaaataaaacattgtttagaaattc

SEQ ID NO: 2911 - DNA, 413 bp, Rattus norvegicus
  Genbank Accession No. L48209
gctgaggagcctgaccggcccggcccggcggcttatggtgccgcgggctcaggtccactcgaagccgccgcgggagcagctcggggtcctggatatcaccattgggctcacttcctgcttcgtgtgttgtcttctacctgcgggctgggtcctgtcacacctggaaagctacaagaagcgggagtgaagggagcgtcttccctcatcctttgactagaccactcttgccagcccaccttgatcatgtttcctgcattcctggctggcttaccctgggatcatgttattcaattccagtcacctcttctgcaatcatgacctctcgatgtctccatggtgacaactgggaccacatatattggttctgcttgatggggtccccctttgtaacaataaagtctatttaaaccttg

SEQ ID NO: 2912 - DNA, 1738 bp, Rattus norvegicus
  Genbank Accession No. L81136
ccaaggaggacaccagcagcaggagcagcagcacggagccatcaatcacaactggggttagaggcacatctgagtcccatgggctgtgtggactttataacccatgaccgtgtcgacactgcttggttccccaggatcacacaaccaaatgggaatgagaactgccatctgtcagcagtgccctggctgaaggaccttacacagtttaggagcaaaagtgaagcaggggaaactgggaatgcccttctctcttccccacctgactggacctgcagactaaaagtttgccccgacacgtaaaatgagaatacctggataagaagttaaggatactgcctggtgcttcttgttgggaaaacaccaaatgggggatgactcaggtacagcaggagggcccagagtccctgggggcccaggattaggaggctgtggtggcttctgcaaaggattctaagggctgttaggggacaaccatggcagttgcttcaggtctcattggaggtagagctgaagaggcatggatcttctccaatctgggcccctggttaaggacatgaataccaagtctttggagaagatctacctgttctccccacccattaaggagtctgagattattgactttttcaggggtgcatccctaaggatgaggttctgaaaatcatgccagtgcagaagcagactgtgggtgggcagctgaccaggttcaaggtttttgttgctattggggactacagtggccaagttggtcttggcattaagtgctccaaggagcttgcctctgccatccaaggggtcaccatcctggtcaagctttcaatcatcctggcgaggagaagctatggggaacaagattgggaagacccacactatcctgtgcatggtgacaggctgctgtggctctgtgctggtgcatctcatccctgcccacagagcactggcatttcctctgctcctgtacccacgaagccactgatgatggcaggtatagatgactgctacacttcaggcaggggctgtgctgccatcctggactactttgccaaggccacctttgatgccatcttcaagacctacagctacctgacccgcacccgacctctggaacattgataccctggcaggagatcacctccaaagtcttctaggtctgtaagatccatcagaaataaagacaggaccttaataccaagagacacaggcaagcaaatctcagagtttaacgccagttgatacagagctaatttcagttaaagaaaagcttaggttctggtattgtggtacacacctttaattccaaagaatgaaggtaaagtgaggttgtagaaggacgccctcctgtttgaacgtgatgtgctattgagtggcaggaaaggtgacacatcagagaaagatttgagaatataggatgtgcccaattctctgaagaatagagaagaaagggagctactgagggtagggacagacagtgcaggaggaacatagtccagtccaaggagaacatgcagacataggtaaacccagaaagaacagagaatcagaaggagccggaagattagaatacattggcagagttgggttgaggccaagcagagcaactgagaggctgagagcaaagccaggttgaataaatcagctgggagtggagtttcagccagaacagctgagtagacccagccatccagagttcaaaaaaaccaagaaaagttcagagggtgaaaactctctaggcctatat

SEQ ID NO: 2913 - DNA, 1423 bp, Rattus norvegicus
  Genbank Accession No. M00002
aatcctcacagcgacacagtgaaccatttcttctgacgctaggaaacatccagtgtagctgaggctgtcccaacccagtgaggagcccaggatgttcctgaaggctgtggtgctgaccgtggccctggtggccatcaccgggacccaggctgaggtcacttccgaccaggtggccaatgtgatgtgggactacttcacccagctaagcaacaatgccaaggaggctgtggaacaactgcagaagacagatgtcactcaacagctcaataccctcttccaggacaaacttgggaacattaacacctatgccgatgacctgcagaacaagctggtgcccttcgccgttcaactgagtggacatctaaccaaggaaacagagagggtgagggaagagatccagaaggagctcgaggacctacgggccaacatgatgccccatgccaacaaagtgagccagatgttcggggacaacgtgcagaagttgcaggaacacctgaggccctatgccacggacctgcaagctcagatcaacgcacagacccaggatatgaaacgccagctgaccccctacatccagcgcatgcagaccacaatacaagacaatgtggaaaacctgcagtcctccatggtgccctttgccaacgagctaaaggaaaagtttaaccagaatatggaagggctcaaggggcaactaaccccccgtgccaacgagctgaaggccacgatcgaccagaacctggaagacctgcgcagcagactggcccctctcgcggagggtgtgcaggaaaaactcaaccatcagatggaaggcttggccttccagatgaagaagaacgctgaggagctccataccaaagtctccacaaatatcgaccagctgcagaagaatctggccccgctggtggaagatgtgcaaagcaagctgaaaggcaacacggaaggactgcagaagtctctggaagacctgaacaagcagctggaccagcaggtggaggtgttccggcgtgctgtggagcccctgggggataagttcaacatggctctggtgcagcagatggagaagttcaggcagcagctgggctccgattcgggggacgtggaaagccacttgagcttcctggagaagaacctgagggaaaaggtcagctcctttatgagcaccctgcaaaaaaaggggagcccagaccagcccctagccctccccctcccggagcaggttcaggaacaggtccaggagcaggtgcagcccaaacctctggagagctgagctgtccctgtgtcctcggcccatcacagcagcagacacctgccctgccccaccacctgtctgtcactctgttcccaagcacttctcgtaccagcttgaggacacatgtcctgtgggtgacgatacctcctctcgttactcaataaagcatctgag

SEQ ID NO: 2914 - DNA, 2401 bp, Rattus norvegicus
  Genbank Accession No. M10068
caacatgggggactctcacgaagacaccagtgccaccatgcctgaggccgtggctgaagaagtgtctctattcagcacgacggacatggttctgttttctctcatcgtgggggtcctgacctactggttcatctttagaaagaagaaagaagagataccggagttcagcaagatccaaacaacggccccacccgtcaaagagagcagcttcgtggaaaagatgaagaaaacgggaaggaacattatcgtattctatggctcccagacgggaaccgctgaggagtttgccaaccggctgtccaaggatgcccaccgctacgggatgcggggcatgtccgcagaccctgaagagtatgacttggccgacctgagcagcctgcctgagatcgacaagtccctggtagtcttctgcatggccacatacggagagggcgaccccacggacaatgcgcaggacttctatgactggctgcaggagactgacgtggacctcactggggtcaagtttgctgtatttggtcttgggaacaagacctatgagcacttcaatgccatgggcaagtatgtggaccagaggctggagcagcttggcgcccagcgcatctttgagttgggccttggtgatgatgacgggaacttggaagaggatttcatcacgtggagggagcagttctggccagctgtgtgcgagttctttggggtagaagccactggggaggagtcgagcattcgccagtatgagctcgtggtccacgaagacatggacgtagccaaggtgtacacgggtgagatgggccgtctgaagagctacgagaaccagaaaccccccttcgatgctaagaatccattcctggctgctgtcaccgccaaccggaagctgaaccaaggcactgagcggcatctaatgcacctggagttggacatctcagactccaagatcaggtatgaatctggagatcacgtggctgtgtacccagccaatgactcagccctggtcaaccagattggggagatcctgggagctgacctggatgtcatcatgtctctaaacaatctcgatgaggagtcaaacaagaagcatccgttcccctgccccaccacctaccgcacggccctcacctactacctggacatcactaacccgccacgcaccaatgtgctctacgaactggcacagtacgcctcagagccctcggagcaggagcacctgcacaagatggcgtcatcctcaggcgagggcaaggagctgtacctgagctgggtggtggaagcccggaggcacatcctagccatcctccaagactacccatcactgcggccacccatcgaccacctgtgtgagctgctgccacgcctgcaggcccgatactactccattgcctcatcctccaaggtccaccccaactccgtgcacatctgtgccgtggccgtggagtacgaagcgaagtctggccgagtgaacaagggggtggccactagctggcttcgggccaaggaaccagcaggcgagaatggcggccgcgccctggtacccatgttcgtgcgcaaatctcagttccgcttgcctttcaagtccaccacacctgtcatcatggtgggccccggcactgggattgcccctttcatgggcttcatccaggaacgagcttggcttcgagagcaaggcaaggaggtgggagagacgctgctatactatggctgccggcgctcggatgaggactatctgtaccgtgaagagctagcccgcttccacaaggacggtgccctcacgcagcttaatgtggccttttcccgggagcaggcccacaaggtctatgtccagcaccttctgaagagagacagggaacacctgtggaagctgatccacgagggcggtgcccacatctatgtgtgcggggatgctcgaaatatggccaaagatgtgcaaaacacattctatgacattgtggctgagttcgggcccatggagcacacccaggctgtggactatgttaagaagctgatgaccaagggccgctactcactagatgtgtggagctaggagctaccaccctcccacccctcgctccctgtaatcacctaacttctgccgacctccacctctggtggttcctgcctggcctggacacagggaggcccagggactgactcctcctggcctgagtggtgccctcctgggcccctaggcagagcccggtccattgtatcaggcagcccagccccagggcacatggcaagagggactggacccacctttgggtgatgggtgccttaggtcctctgcagctgtacagaaggggctcttctctccacagagctggggtgcagcccccacacgtgattttgaatgagtgtaaataattttaaataacctggcccttggaataaagttgttttcagt

SEQ ID NO: 2915 - DNA, 1547 bp, Rattus norvegicus
  Genbank Accession No. M10149
gacggctgccacctcacacagcttctgataccttggagcactcttctcccttggctgtacctgtcatcatggctcaccgatttccagccctcacctcagagcagaagaaggagctctccgagattgcgcagcgcattgttgccaatgggaagggtatcttggctgcagatgagtctgtgggcaccatgggaaaccgcctacagaggataaaggtggaaaacactgaagagaaccgaaggcagttccgagagctcctctttagtgtggacaattctatcagccagagcatcggcggagtgatccttttccatgagacgctctaccagaaggatagccagggaaagctgttcagaaacattctcaaggagaagggaattgtggtgggcatcaagctggaccaaggaggtgccccgcttgcaggaacaaacaaagaaaccaccattcaagggcttgacggcctctccgaacgctgtgctcagtacaagaaagacggagtcgactttgggaagtggcgtgctgtgctgaggatctcggaccagtgcccttccagccttgctatccaagaaaacgccaacgctctggctcgctacgccagcatctgccagcagaatgggctggtacctattgttgagccagaggttcttcctgatggagaccatgacctagagcactgccagtatgtttctgagaaggtcttggctgctgtctacaaggctctcaatgatcatcatgtttaccttgagggcaccctgctaaagccaaacatgctgactgctggacatgcctgcaccaagaagtacacacctgagcaagtggctatggccaccgtcacggctctccacagaactgttcctgcagctgtgcctagtatctgctttttgtctggaggcatgagtgaggaggatgctacacttaacctcaatgctatctaccgttgccctctacctaggccctggaaactaagcttttcatacggcagagccctccaggccagtgcattggctgcttggggcggcaaggctgcaaacaagaaggcaacccaggaagctttcatgaagcgggctgtggccaactgtcaggcagcccaaggacagtatgttcacacgggctcgtcaggcgctgcttccacgcagtcactcttcacagcctcctacacctactagataccgtcacctaccagccagctccagttgtcctaaatattttggttggagacctcaaaggcttcagtcagccctgaaattagatcacatctgattgaacttttgaaaacaccacatactgcgaatcagctgttgaagtgcggagtatgagcacgtcacccagtagtctccgaacacctccagttccccgtgttccagaacatccatccaagagaaggaacgggctttacatggaaggtcagtcttccatgcatacagccactactgagcaaagcagctcggaagggaaggaggagaagggcattttaacaaacatacttaccgggggttggttagagaagaggcacagcagcagaaaaagaaataaaaagtctatgaaccttc

SEQ ID NO: 2916 - DNA, 824 bp, Rattus norvegicus
  Genbank Accession No. M11071
cgatggaaccttccaaaagtgggcatctgtggtggtgcctcttgggaaggagcagaattacacatgccttgtggagcatgaggggctgcctgagccgcttacccagagatgggagccttctccatcgaccgactccaacatggaaacctatgtcatttatgtcatccttggagctgtggccatcattgcagctgtgatcattgtagctgtggtggctgttgtgatgaagaggaggagaaacacaggtggaaaagtaggagtctacgcccctgctccaagcagggacagctctgagagctctgatgtgtctctctcagattgtaaagcatgaagacagctgcctggagtggactgagtgacagacgatgtgttcaggtctctcctgtgacatccagagtcctcagttctctttagacaccagtgtctgatgttccctgtgattctatggcttctgtgtgaagaactgtggagcccagcctgccctgcacacctggaccctgtccctgcactgcctgtgttcccttccacagccaacctcgctggtctagcctggggttgggggctggggacatctgcaccctatcactcagtgctgcttctagctgcaactcctcacttctacactgagaataagaatctgagtgtggggctggagagatggctcagcggttaagagcacccgactgctcttctagaggtcatgagttcaattcccagcaaccgcatggtggctcacaaccatctataaatagatccgatgccctcttctggtgtatctgaagacagctacagtgtacttatatataataaactaaataaatctc

SEQ ID NO: 2917 - DNA, 1519 bp, Rattus norvegicus
  Genbank Accession No. M11266
tgcaactgaaagcattcttagcttgccagtggcccccactgcctgcctgcctgcggaactctctagaccatagattcctcctccactctagcaagagaagatgctgtctaatttgaggatcctgctcaacaaggcagctcttagaaaggctcacacttccatggttcgaaattttcggtatgggaagccagtccagagtcaagtacagctgaaaggccgtgacctcctcaccctgaagaacttcacaggagaggagattcagtacatgctatggctctctgcagatctgaaattcaggatcaaacagaaaggagaatacttgcctttattgcaagggaaatccttagggatgatttttgagaaaagaagtactcgaacaagactgtccacagaaacaggcttcgctcttctgggaggacatccttcttttcttaccacacaagacattcacttgggcgtgaatgaaagtctcacagacacagctcgtgtgttatctagcatgacagatgcagtgttagctcgagtgtataaacaatcagatctggacatcctggctaaggaagcaaccatcccaattgtcaacggactgtcagacctgtatcatcctatccagatcctggctgattaccttacactccaggaacactatggctctctcaaaggtctcaccctcagctggataggagatgggaacaatatcctgcactccatcatgatgagtgctgcaaaattcgggatgcaccttcaagcagctactccaaagggttatgagccagatcctaatatagtcaagctagcagagcagtatgccaaggagaatggtaccaggttgtcaatgacaaatgatccactggaagcagcacgtggaggcaatgtattaattacagatacttggataagcatgggacaagaggatgagaagaaaaagcgtcttcaagctttccaaggttaccaggttacaatgaagactgctaaagtggctgcgtctgactggacgtttttacactgcttgcctagaaagccagaagaagtagatgatgaagtgttttattctccgcggtcattagtgttcccagaggcagaaaatagaaagtggacaatcatggctgtcatggtatccctgctgacagactactcacctgtgctccagaagccaaagttctgatgcctgcaagaggacgaaaaacccaaaagacaaaaaaatctgttctttagcagcagaataagtcagtttatgtagaaaagagaagaattgaaattgtaaacacatccctagtgcgtgatataattatgtaattgctttgctattgtgagaattgcttaaagcttttagtttaagtgctgggcattttattatcctgcttgacttgacttaagcactctcttcaattcacaacttctgaatgatatttgggtttcatattaattatcatacacatttccttccactaagcattaaacactatgcttacaatgcataccatctaagtcattaaatgtaatccatgcttattacctt

SEQ ID NO: 2918 - DNA, 3280 bp, Rattus norvegicus
  Genbank Accession No. M11710
aagatcgctgtgcagtcagccttcagccccaactgcactgtctccacacagctttccttcccactggttacaagcaaattggacaacaaaatctcatgagatatttgtgatttaattttagtcacaaaacatcttcaaaatgacgaggattttgacagcatgcaaagtggtgaagacactgaagagtggctttggtttggccaatgtgacttcgaagcgacagtgggacttctctagacctggcatcaggctcctttctgtgaaggcacagacagcacacattgttctggaagatggaactaagatgaagggctactcctttggccatccctcctcggttgctggcgaagtggtttttaatactggcttaggagggtactcggaagcacttactgatcctgcctacaaggggcagatcctcaccatggccaaccctatcattgggaatggtggggcccctgatacaacggcacgtgatgaactgggactgaataagtacatggagtctgatggaatcaaggtggcgggtctgctggtgctgaattacagtcatgactacaaccactggctggccaccaagagtctgggtcagtggctgcaggaggagaaggtccctgcaatttatggagtggatacaagaatgctgactaaaataattcgggataagggtaccatgcttgggaagattgagtttgagggccagtctgtggactttgtggatcctaataagcagaatttgattgccgaggtttcaaccaaggatgtcaaggtgtttggcaaaggaaaccccacgaaagtggtagccgtggactgtgggataaaaaacaatgtcatccgcctgctagttaagcgaggagcggaagtgcatttggtcccctggaatcatgacttcacccagatggactatgacggacttctgatcgctggaggacctgggaacccagctctggcacagccactaattcagaacgtgaagaagattttggagagtgaccgcaaagagccgttgtttggaatcagtacaggaaacataataacaggattggctgctggcgccaaatcctacaagatgtccatggccaacagaggacagaaccaacctgttttgaatatcacaaacagacaggctttcataactgctcagaatcatggctatgctctggacaacaccctccctgctggctggaaaccactgtttgtcaatgtcaatgaccaaacaaatgaggggattatgcatgagagcaaacccttcttcgctgtgcagttccacccagaggtcagcccggggccaacagacactgagtacctatttgattccttcttctcgctgataaagaagggcaaaggcaccaccattacctcagttctgcccaagccagcattggtggcatctcgagtcgaggtttccaaggtccttatcctaggatcaggaggcctgtccattggtcaggcaggtgaatttgattactccggatctcaggctgtaaaagccatgaaggaagaaaacgtcaaaacagtcctgatgaacccgaacattgcatccgtgcagaccaacgaggtgggattgaagcaggcagatgcagtctactttctccctatcaccccccagtttgtcacagaagttatcaaggctgaacggcccgatgggttaattctgggcatgggtggccagacagctctgaactgtggagtggaactattcaagaggggtgtgctcaaggaatatggtgtgaaggtcttgggaacatcggtcgagtccattatggccacagaagacaggcagcttttctcagacaagctgaatgagatcaacgagaagattgctcctagctttgcagtggaatcaatggaggatgccttgaaggcagcagacaccattggctaccctgtgatgattcggtctgcgtatgctctgggtgggttaggctccggcatctgtcccaacaaggagaccttaatggatcttggcacaaaggcatttgctatgaccaaccagatcctggtggagcggtcagtgacaggttggaaagaaatagaatatgaagttgtccgagatgcggatgataactgtgtcacagtctgtaacatggagaatgttgacgccatgggtgttcacacaggtgattcagttgttgtggccccggcccagaccctctccaatgcagagttccagatgttgagacgcacttcaatcaatgttgttcgccacttgggcattgtgggtgaatgcaacattcagtttgctcttcaccccacttccatggaatactgtatcattgaagtgaatgccaggctctccaggagttctgccctggcctccaaggccactggctacccactggcgttcatcgcagcaaagatcgctctaggaatcccacttccagaaatcaagaatgttgtgtctgggaagacctcagcctgcttcgaacctagcctggattacatggtgaccaagattcctcgctgggaccttgaccgttttcatggaacatccagccgaattggtagctcaatgaaaagtgtaggcgaggtcatggccattggtcgcacctttgaggaaagtttccagaaggctctgaggatgtgccatccatctgtggatgggttcactccccgtctcccaatgaataaggaatggccagcaaacctggatctgaggaaggagctgtctgaaccctccagcacccgcatctatgccattgctaaggccttggaaaacaacatgtcccttgacgaaatcgtgaagctcacatccattgacaagtggtttttgtataagatgcgtgacattttaaacatggataagacactgaaagggcttaacagtgagtctgttacagaagaaactctgagacaggccaaagagattgggttctcagacaagcagatttcaaaatgtttaggactgaccgaggctcagacaagagagctgagattgaagaaaaacatccacccttgggttaaacagattgatacattggctgcagaatacccatcagtgacaaattacctgtatgttacctacaatggccaggagcacgacatcaaatttgatgaacatggaataatggtgctgggctgtggcccataccacattggcagcagtgtggaatttgattggtgtgctgtctccagtatccgcacactgcgccaacttggcaagaagacggtggtggtgaattgtaacccggagactgtgagcactgactttgatgagtgtgacaaactctactttgaagagctgtctttggagagaatcctagatatctaccaccaggag

SEQ ID NO: 2919 - DNA, 1998 bp, Rattus norvegicus
  Genbank Accession No. M12337
agccctcccatcctgagtgccaacctttcccaaccccgctgctaagctagacacctcactcactgagagccagcatggcagctgttgtcctggagaatggagtcctgagcagaaaactctcagactttgggcaggaaacaagctatattgaagacaactccaatcaaaatggtgccatatctctgatattctcactcaaagaggaagttggtgccctagccaaggtcctgcgcttatttgaggagaacgatatcaacctgacacacattgaatccagaccttctcgtttaaacaaagatgagtatgagttcttcacttatctggataagcgtacgaaacctgttctgggcagcatcatcaagagcctgaggaatgacattggtgccactgtccacgagctttcccgagacaaggaaaagaacacagtgccctggttcccaaggaccattcaggagttggaccgattcgccaatcagattctcagctatggagccgaactggatgcggaccacccaggctttaaagatcctgtgtaccgggcgagacgaaagcagtttgctgacattgcctacaactaccgccatggccagcccatccctcgggtggaatacacagaggaagagaagcagacctggggaacggtgttcaggaccttgaaggccttgtataaaacacatgcctgctacgagcacaaccacattttcccacttctggaaaagtactgcggtttccgtgaagacaacattccacagctggaagatgtttctcaatttctgcagacttgtactggtttccgcctccgacctgttgctggcttactgtcatctcgagatttcttgggtggcctggccttccgagtcttccactgcacacagtacattaggcatggatcgaagcccatgtacacacctgaacctgacatctgccatgaactcttgggacatgtgcctttgttttcagatcgcagctttgcccagttttctcaggaaattgggcttgcatcactgggggcacctgatgagtacattgagaaactggccacaatttactggtttactgtggagtttgggctttgcaaggaaggagattctataaaggcatatggtgctgggctcttgtcatcctttggagaattacagtactgtttatcagacaagccaaagctcctccccctggagctagagaagacagcctgccaggagtattctgtcacagagttccagcccttgtactacgtggcggagagtttcagtgatgccaaggagaaagtgaggacttttgctgccacgatccctcggcccttctcggttcgctatgacccttacactcaaagggttgaggtcctggacaatactcagcagttgaagattttagctgactccattaatagtgaggtcggaatcctttgcaatgccctgcagaagataaagtcgtgagcagaaaatgacgtcatgggcagaacttaggaggtcaaccagaaatcggtcgatagaagtatagtaactgcctttgttcccctgaagaaaaaaagttttatttgaaacgtcagcttttattatttttgctaacacagtggagcatcaccaaataaatcaaagttctctgaaatgaaagtgtgttaaaaccctccaggggtagatctttcagaatcacatttgatttagataatctcatagcttcaatttggtttaaaatgtaattttctcagctctcatcaacattcatcaaatttggggcttgtgtcattggggcttcatccgttcatttttaacctctcaggtaagctctgaaggaacacatttggctgagtgtaaaatgtaagactgccatcagggatgaatcattccgttcagtacagattgtaatctacaaagggtagttttcaccttcgttcattatggctctgagaactgctttgttagcctgcttacataaatctcccctgatcggagaccctattaagatagttacaagcaataaagttttagagcattatat

SEQ ID NO: 2920 - DNA, 1620 bp, Rattus norvegicus
  Genbank Accession No. M12450
gcaaaatgaagagggttctggttctcctgctggccttagcctttgggcatgccctagagagaggccgagattatgagaaggataaagtttgccaggaactctccacgctggggaaagatgacttcagatctctatcactaatcctatacagcaggaagtttcccagtagcacctttgaacaggtcagtcagcttgtgaaggaagttgtctccttaactgaggaatgctgtgctgagggagcagatcccaactgctatgacaccaggacttcagagctgtctattaagtcctgtgaaagtgacgccccctttcccgttcaccccgggacttccgagtgttgcacgaaggaggggctagagcggaaactctgcatggctgccctcagtcaccagccacaggaatttcccgcctatgtggagccgacgaatgatgagatctgtgaggcgttcaggaaggatccaaagggatttgccgatcagtttctattcgaatattccagcaattacggacaagctcctctgccacctttagttggttacaccaagagttatctctctatggttggctcctgctgtacttctgcaaaaccaactgtgtgctttttgaaggagagactccagatgaaacagttactacttctcaccactatgtcaaacagagtctgctcacaatatgctgcatatggaaaggaaaaatcaaggatgagccatctcataaaactagcccaaaaagtaccaactgctaacctggaggatgttctgccactcgctgaagaccttactgaaatcctgtccagatgttgtaagtctacctcagaggactgcatggccagagagctgcctgaacacacattaaaaatctgtggaaacttatccaaaaagaattcaaagtttgaagagtgctgttacgaaacaacacccatgggcatttttatgtgtagctacttcatgccaactgctgaaccacttcaattgccagccatcaagctgccaaccagcaaagacctctgtggtcagagtgccacacaagccatggaccagtatacatttgaactaagcagaaggacccaggttccagaagtgttcctcagcaaagttctggatacgaccctgaaaacccttagggaatgctgcgacactcaggactctgtctcctgtttcagcactcagagtcccctgatgaagaggcaactaacttctttcattgaaaaggggcaagaaatgtgtgcagattattccgagaacacatttactgagtacaagaaaaaattggcggaacgactgaggacaaaaatgcccaatgcctccccggaagagctggcagacatggtggccaagcactcagactttgcctccaagtgctgctccataaactctcctccacgctactgtagctcacagattgatgcagaaatgagagacatcctgcagtcctgatgcagggtatatgcaatgccttggacctagaactggaccactctggaaaaattgccagataacaaaatcaagcaaataccacagagatggccttccaggaggaccaccaggataattccatttttcccatctacaatgttttttgatgaattataaaaataaattgaaatatggtgcaaactct

SEQ ID NO: 2921 - DNA, 1666 bp, Rattus norvegicus
  Genbank Accession No. M12672
cgggccgtgggccgtggtgggggccaggccgggccggcggacggcaggatgggctgcaccgtgagcgccgaggacaaggcggcagccgagcgctctaagatgatcgacaagaacctgcgggaggacggcgagaaggcggcacgggaggtgaagttgcttctgttaggtgctggagaatcagggaagagcaccatcgtcaagcagatgaagatcatccacgaggatggctactcagaggaggagtgccggcagtaccgtgcggttgtctacagcaacaccatccagtctatcatggccatcgtcaaagccatgggcaacctgcagatcgactttgctgacccccagcgtgcggatgatgccaggcagctgttcgcactgtcctgtgctgccgaggagcaaggcatgcttccggaagacctgtcgggcgtcatccggaggctctgggctgaccatggtgtgcaagcctgctttggccgctcacgggaatatcaactcaatgactcagccgcttactacctgaatgacctggagcgcatagcacagagtgactatatccctacacagcaggatgtgctgcggacccgtgtgaagaccacaggcatcgtcgaaacacacttcaccttcaaggacttacacttcaagatgtttgatgtgggtggtcagcgatctgagcggaagaagtggatccactgctttgagggtgtcacggccatcatcttctgtgtcgccttgagcgcgtacgacttggtgctggctgaggatgaggagatgaatcgcatgcatgagagcatgaagctgtttgatagcatctgcaataataagtggttcacagacacctccatcatcctcttcctcaacaagaaggacctgtttgaagagaagatcacacagagccccctgaccatctgtttccctgagtacacaggggccaacaagtatgacgaggcagccagctacatccagagcaagtttgaggacctgaataaacgcaaagacaccaaggagatctacacgcacttcacatgcgccaccgacaccaagaacgtgcagtttgtgtttgatgccgtcactgacgtcatcatcaagaacaacctgaaggactgtggcctcttctgaggggcagtgggcctggcaggatgggccaccgctgactctgctccccactacctgtgaggaagatgggggcaagaagaccatgctccctgcctgttcccccagctgcttctcccctgtctcttctctctgttctcagctcccctgtcccctccctcggctctagacttgggggaggggttgccacaggcctccctgtctaaaacccacctttgtctgaggtagccgggagtggccatggtacctccttactgggcatccattcgggttttctaaccattgtcttgttctggggtgagcggggagcgcatgcagagtttcccaaggcctatgtctggaggagtaccaattcctccagcctagacccctggctttgtccaacaccagccctgacccaagtccaaatgtttacagggagcctcctgcctaccccactctctgccgcttggaggccccaaaggaaaaagcacaagaagcgtgagagacaccaccattcctggagacaaagcccacctgctcattctcgtagctttaaaaaaaaggaaaaggaaag

SEQ ID NO: 2922 - DNA, 1961 bp, Rattus norvegicus
  Genbank Accession No. M13506
aaaaaaagcattccatttctgcaagatgtctatgaaacagacttcagtgtttctgttgatacagctcatatgctactttagacctggagcctgtggaaaagtgctagtgtggcccacagaatacagccactggattaatataaagataattctgaatgaacttgcccagagaggtcatgaagtcacggttcttgtatcttcggcttccattctcattgagcctaccaaggaatcttctattaattttgagatttactctgtacctttgagtaaaagtgatcttgaatatagttttgcaaaatggatagatgaatggacacgtgattttgaaacactctcgatttggacatattattcaaaaatgcaaaaagtcttcaatgaatattctgatgtcgttgaaaatttatgcaaagcactcatttggaacaagagtcttatgaaaaaactccaaggatctcaatttgatgtcattctcgcagatgctgtgggtccctgtggtgagctgctagcagaactgcttaagacacctttagtgtacagtctccgcttctgtcctggatacagatgtgaaaagttcagtgggggacttccactgcctccttcctatgtgcctgttgttctttcagaattaagtgaccgcatgacatttgtggaaagagtgaagaatatgttgcagatgctgtattttgacttttggtttcaaccatttaaagagaagtcctggagtcagttttacagtgatgttctaggtagacccacaacattaactgagatgatggggaaggcagatatatggctcattcgaaccttctgggacttggaatttccacacccattcttacctaattttgactttgttggaggactacattgcaaaccagccaaaccactgcctagggaaatggaagaatttgttcagagctctggagaacatggtgtagtggtgttttctctgggatcaatggttaaaaacctgactgaagaaaaagccaatgtagttgcttctgctcttgcccaaattccacagaaggttgtatggagatttgatggtaagaaaccagataccttaggatctaacactcggctgtacaagtggatcccccagaatgaccttcttggtcatccaaaaaccaaagcttttgtagctcatggtggaacaaatggcatctatgaggcaatctaccatggcattcctattgttggtattcccttgtttgcagatcaaccggataacattaatcacatggtagccaaaggagctgctgttagagttgacttcagcatactgtcaactacaggccttctcactgccttgaagattgtcatgaatgacccttcctataaggagaatgccatgagattatccagaatccaccatgatcagccagtgaagcccctggaccgagccgtcttctggatcgagtatgtcatgcgtcacaaaggagccaagcacctccgctcaactctgcatgaccttagctggttccagtaccactctctggatgtcattgggttcctattgctctgtgtggtaggtgtggtattcatcatcacaaaattctgcctcttttgttgccgtaagactgctaacatgggaaagaagaagaaagagtagcatcataaaggctgaagcagagccctgagagatgagcctctgccagctgcttccagaggaacctgttgtcatgccagtgccttccctctaaaagaagacagcgttgggacctcattgaacatggctccaatgaattcactatgttctgaagacatgcaagatttcatgccaaatatatattcagtgctaaaaaaacaaaatcctgtgttcagtttagaatgttttgatgtagctgagaagctttgcccaacaacaataactgaagctactgtagttcataaagttcacatggctttatagcctttgcaaaacatatctataaatcaattagtttttgaaaataccc

SEQ ID NO: 2923 - DNA, 410 bp, Rattus norvegicus
  Genbank Accession No. M14776
cggatttgggcatggggaaaaggaacattgaggatcgtgttcaagaggaagcacggtgccttgtggaggaactgaggaaaaccaatggctcaccctgtgaccccacgtttatcctgggctgtgctccttgcaatgtcatctgctccattattttccagaatcgttttgattataaagatcaggattttcttaacttgatggaaaaactcaatgagaacatgaaaattttgagcagtccctccacacagttttgcagttttttccctgttttaattgattattgtccgggaagtcatacgacattagctaaaaatgtgtatcatattagaaactaccttctgaagaaaataaaagagcatcaagaatcactggatgttacaaatccccggaactttattgattattaccta

SEQ ID NO: 2924 - DNA, 2462 bp, Rattus norvegicus
  Genbank Accession No. M14972
gatggctgcaccatgagcgtctctgcactgagctccacccgcttcacgggcagcatctctggcttcctccaagtggcctccgtgcttggtctgcttctgctgctggtcaaagcagtccagttctacctgcaaaggcaatggctactcaaggctttccagcagttcccatcacctcccttccactggttctttgggcacaagcagtttcaaggtgacaaagaactacagcaaattatgacatgtgtggagaatttcccaagtgcctttcctcgatggttctggggaagcaaagcctacttaattgtctatgaccctgactacatgaaggtgattctcgggcgatcagatccaaaggccaatggcgtctacagattgctagctccttggatcggatatggtttgctcttgctgaatggacaaccgtggttccagcaccggcgaatgctaaccccagccttccactatgacattctgaaaccctatgtaaaaaacatggctgactccattcgactgatgctagacaaatgggaacagctggcaggtcaagactcctctatagaaatctttcaacatatctccttaatgaccctagacactgtcatgaagtgtgccttcagccacaatggcagtgttcaggtggatggaaattacaagagctatatccaggccattgggaacttgaatgacctctttcactcccgtgtgaggaacatctttcatcagaatgataccatctataatttttcttccaatggccacttgttcaaccgtgcttgtcaacttgcccatgatcacacagatggtgtgatcaagctaaggaaggatcagctgcagaatgcgggagagctggaaaaggtcaagaagaaaagacgtttggattttctggacatcctcttacttgccagaatggagaatggggacagcttgtctgacaaggacctacgtgctgaggtggacacatttatgttcgagggtcatgacaccacagccagtggagtctcctggatcttctatgctctggccacacaccctaagcaccaacaaagatgcagagaggaagttcagagtgtcctgggggatgggtcctccattacctgggatcacctggaccagattccctacaccaccatgtgtatcaaggaggccctgaggctttacccacctgttccaggcattgtcagagaactcagcacatctgtcaccttccctgatgggcgctctttacccaagggtatccaagtcacactctccatttatggtctccaccacaacccgaaggtgtggccaaacccagaggtgtttgacccttccaggtttgcaccagactctccccgacacagccactcattcctgcccttctcaggaggagcgaggaactgcattgggaaacaatttgctatgagtgagatgaaggtgattgtggccctgaccctgctccgctttgagctactgccagatcccaccaaggtccccatccccttaccacgacttgtgctgaagtccaaaaatgggatctacctgtatctcaagaagctccactaattccgttgtggagctccgaaatctgaaatgagtttcactggcagaaagctgagttggtggtgtgactagccttcttcagaagagtgcttcagagagtcctctcctcctctcttcagtacagatcacccttctcagcactggaatattcctctgctttaaagccagcacccttcccataccccctcttctaaaagccttcccttttacaaatgttcttatgacatcatcaagaccactgaaaaactccaagataatttcccatctcaatattccttactccatctaacctactaagtcccttttgaattatgaggaataattcaatttgttccatgggctccaaaactcaaggcctgagcattattgtgaaacctttattcagcctaatatcatcttcacaagactgttacctggtacgttcatctaaatctcccctgcatagtctctctacctgactattcctcacacaagtttctttaccttccctcctttctccaataaagtgtccagtgtcctgcacaaaaagctcaaggagaactgattatcaccttctgattcgttcattgatgcattcaaattaaacctccacatagtagagactttttcaactattataaaaaccatcctgagccagacctgcagtcaacagcaagagcaggaagcgcataggaactacacctgcaaccaagctggcacaaagaccaagaattctgaagcagcccaaactcaagatgacatatttttacaagttagagaaaaatcaagatctgagttatcttgacaaactcgggatggaaagtaggagggaggggaaagcaaataaatacttccttattgtgtagcataaaaaaaccgaattcgtaggagggaggggaaagcaaataaatacttccttattgtgtagcataaaaaaaccgaat

SEQ ID NO: 2925 - DNA, 1292 bp, Rattus norvegicus
  Genbank Accession No. M15327
cgtagacttcttccctcctgcagcgaaggacagcatgagcacagctggaaaagtaatcaaatgcaaagcggccgtgctatgggagcctcacaagcccttcaccatcgaggacatagaagtcgcaccccccaaggcccatgaagttcgcattaagatggtggccaccggagtctgccgctcagatgatcacgcggttagtggatccctgttcacgcctcttcctgcagttctaggccacgagggagctggcattgttgagagcattggagaaggggtgacttgtgtgaaaccaggtgataaagtcatcccgctgttctctccccagtgtggaaaatgcaggatctgcaagcacccggaaagcaacctctgttgccaaactaagaatctgacacagcctaagggagctttgctcgacggcaccagcagattctcctgcaggggaaagcccattcaccactttctcagcaccagcaccttctcccagtacactgtggtagatgacatagcggtggccaaaatcgatgcggctgcaccactggacaaagtctgcctcatcggctgtggcttctcgactggctatggctctgccgtccaagtcgccaaggtgaccccaggctccacctgtgccgtgtttggcctgggaggtgttggtctgtctgtcgtcattggctgtaaaacagcaggagcagccaagatcattgccgtggacatcaacaaagacaagtttgcgaaggccaaagagttaggtgccactgactgtatcaaccctcaagactacaccaaacccatccaggaagttctccaggagatgactgatggaggggtggacttttcatttgaagtcattggccgtcttgacaccatgacttctgccctgttaagctgccattcagcatgcggtgtaagcgtcattgtcggggtgcctcccagtgcccaaagcctctccgttaaccccatgtcgctgctgctgggacgcacctggaaaggagcaatattcggcgggtttaagagtaaagatgccgtccccaaacttgtcgctgacttcatggctaagaagtttccgttggagccgctgattactcatgttttaccttttgaaaagataaatgaagcatttgacctgctccgtgctggaaagagtatccgtaccgtcctgacgttctgagaacacatgaatgccttcccggtttctgactcctccgcctaccgaatcaagcgccagccacatcacaaccttaaccttgctcttcagagacacacagccaataaagcacctgtgcaagctttccgtg

SEQ ID NO: 2926 - DNA, 2719 bp, Rattus norvegicus
  Genbank Accession No. M15428
gccgtgcgcatagaggccggtgcgcggcccttgctcgtttaacgcgggactatatttcccagggtccgtcgcgggagtctccggcgggcaggcgcgcgggagactgcgagcgaggcgccgacggggcggctcaggcgtctgggtccgcgcatctccttgctccttcgcttctccttcagccgctgctgccacgaccccggccgacatggcggcggtgttgcagcaagtgctggagcgcccggagctgaacaagctgcctaagtcgacccagaacaaacttgagaagttcctggctgaacagcagtccgaaatcgactgcctgaaggggcggcacgagaaatttaaggtggagagtgagcaacaatactttgagatagagaagagactatcccagagtcaggagaggcttgttaatgaaacccgggagtgtcagaacttgaggctggagcttgagaagctaaataaccaagtaaaagtattaactgagaaaaacaaagaacttgaaactgctcaagaccgcaatctaggcattcagagccagtttacaagagcaaaggaagagttagaagctgaaaaaagagatttaatcagaaccaatgagaggttatctcaggaagttgaatatttaacagaggatgttaaacgtctaaacgaaaaacttaaagaaagcaatacaacgaagggtgaacttcagttaaagctggatgaacttcaagcttctgatgtcactgtgaagtaccgagaaaaacgcttagaacaagaaaaggaattgctacacaatcaaaattcatggctaaacacagagttgaaaaccaaaactgatgagctattggctctaggaagagaaaagggaaatgaaattctggaacttaagtgtactcttgaaaacaaaaaggaagaggatgcaattcgaagtcacagtgaatcagcctcaccttcagccctgtccagcagccccaacaacctgagcccaacaggctggtcacagcccaaaacccctgtgccagcacaaagagagagggcgccaggatctgggacccaggaaaaaaacaaaattaggcctcgtgggcagagagattcaagttattactgggaaatagaagccagtgaggtgatgctgtctactcggattggctcgggctcctttggcactgtgtacaagggcaagtggcatggagatgttgcagtaaagatcctaaaggtggttgacccaactccagagcaacttcaggccttcaggaacgaggtggctgttttgcgcaaaacacggcatgttaatatcctgctgttcatggggtacatgacaaaggacaacctggcgattgtgacccagtggtgtgaaggcagcagtctctacaaacacctgcatgtccaggagaccaaattccagatgttccagctaattgacattgcccggcagacagctcagggaatggactatttacatgcaaagaacatcatccacagagacatgaaatccaacaatatatttctccatgaaggcctcacggtgaaaatcggagattttggtttggcaacagtgaagtcgcgctggagtggttctcagcaggttgaacagcccactggctctgtgctgtggatggccccagaagtaatccgaatgcaggataacaacccgttcagcttccagtccgatgtctactcctatggcattgtgctgtatgagctgatgactggggagcttccctactcccacatcaacaaccgagaccagatcatcttcatggtgggccgtgggtacgcctccccagatcttagcaggctctacaagaactgccccaaggcaatgaagaggttggtggctgactgtgtgaagaaagtcaaagaagaaaggcctttgtttcctcagatcctgtcttccattgagctgcttcagcactctctgccgaaaatcaacaggagcgcctctgagccttccctgcatcgggcagctcacactgaggacatcaatgcttgtacgctgaccacatccccaaggctaccagtcttctagctgacgttatagctgttcttaggccaccaggggacgaagaagagtcagcaggcaccactttctgtttccttgggggcagaatgcatgtttccggaaaagctgctgctaaggacctagactactcacagggccttaacttcatattgccttcttttctacccttcctgccctggaaatggaagctgtccgccaagccagcctgctccagaggtatacaagtcagcgagtatttttagggcaaatggccttggagagagaaggcagggcactccggctactgcagggacatgcagttgggaacttggctcattgagctgtacagacagtggtgcagtgccagttttgcacatggagtcctggccacctgggggagcctgctttggtactacagaacttcactttgtggacacaccttcctcttactgagtctaagatgtcctgtgcagaggatgctttccaagcacggtgctccaccttctggcagcctcccacacgctgaatctgtcttccaggagctgccctatggggtgctgcagcccagccctatctctatagtcacatccttgtctgtaagaaagccaggaatacaggttttcttaatgattttgggttttaattttgtttttattgagcctgataaaatacagttatctgatggttcctcaattatgttattttaataaaataaattaaatttaaaaaaaa

SEQ ID NO: 2927 - DNA, 3243 bp, Rattus norvegicus
  Genbank Accession No. M15944
gcggagatgtgcaagtggcgaagctggaccgagtgcaggcgcaagctgctgagcggctgaggcgagggattttaggtgatgggaagatcagaaagtcagatggatattactgatatcaatgctccaaagccgaagaagaaacagcgatggactccactggagatcagcctttctgtgctcgtcttgctcctgactatcatagctgtgacaatgattgctctctatgcaacctatgatgatggtatttgcaaatcatcagactgcataaaatcagctgctcgactgatccagaacatggatgcctctgctgagccatgtacggacttcttcaaatatgcttgtggaggctggttgaaacgcaatgtcatccctgagaccagttcccgatacagtaattttgacattctaagagatgaactagaagtcattttgaaagatgtccttcaagaacccaaaactgaggacatagtagcagtgcagaaagcaaaaactttgtacagatcatgtataaatgaatctgctattgatagcagaggtgggcaacctctgctcacactgttaccagatatatatgggtggccagtagcatcacaaaactgggaacaaacatatggtacttcttggacagctgagaaatctattgcacaactgaattctaaatatgggaaaaaggtcctcattaatttttttgttggcactgatgataagaattctacccagcatataattcattttgaccagcctcgacttggcctcccttccagagactactatgagtgtacaggaatatataaagaggcttgcacagcatatgtggattttatgatttctgtggccagactgattcgtcaggaacaaagattgcctattgatgaaaaccagctctctttggaaatgaataaagttatggaattggaaaaagaaattgccaatgccacaactaaaccagaagaccgaaatgacccaatgctgctttataacaaaatgacattggccaagctccaaaataacttctctctggagatcaatgggaagccattcagctggtcaaatttcacaaatgaaatcatgtcaactgtgaatattaatattcaaaatgaggaagaagtggttgtttatgctccagaatatttaaccaaacttaagcctattcttaccaaatattctcccagagatcttcaaaatttaatgtcctggaggttcataatggatcttgtaagcagcctcagccgaaactacaaggagtccagaaatgctttccgcaaggccctttacgggactacatccgaaactgcaacctggagacggtgtgccaactacgtcaatgggaacatggagaatgctgtggggaggctttatgtggaagcagcttttgctggagagagcaagcacgtggttgaagatttgattgcacaaatccgtgaagtttttattcagactttagatgacctcacttggatggatgctgagacaaaaaagaaagctgaagagaaggccctggcaattaaagaaaggattggctatcctgatgacatcatctccaatgagaataaactgaataatgagtatcttgagttgaactacaaggaagaggaatactttgagaacataattcaaaatttgaaattcagccaaagcaagcagctaaagaagctccgagaaaaggtggacaaagatgagtggataagtggcgcggcggtagtcaatgcattttattcctcaggcagaaatcagatcgtcttccccgccggcattttgcagcccccattctttagtgctcggcagtccaactcattgaactatgggggcatcggcatggtcatcggacatgaaatcacacatggctttgatgacaatggcagaaattttaacaaagatggagacctcgttgactggtggactcagcagtctgcaaataatttcaaagaccaatcccagtgtatggtgtaccagtatggaaactttacatgggacctagcaggtggacagcatctcaatggaattaacacactaggagaaaatattgctgataatggagggattggccaagcatacagagcctatcagaattatgttaaaaagaatggtgaagaaaaattactccctggacttgacctcaatcacaaacaactattcttcttgaactttgcccaggtgtggtgtggaacctaccggccagagtatgcagtcaattccattaaaacagatgtacacagtcctggcaatttcaggatcattgggactttgcagaactctgctgagtttgcggatgcctttcattgccgcaagaactcatacatgaatccagaaaggaaatgtcgggtttggtgatcttcacaggaagtggagcatccatggcaggactcgccaaagccacagaaacaggaagtcttccctcagagaacgtgggccccggaagtttcttcagcttcttgggggaaattcacagagatgagcacgagctaacaaaaatgaaattagattattaaaaccgctgtgaatgaaaggggagaaaacctacgatctagcaaatcaatcacttcactgtgtaaataattaccttccaacggtaatattaccgttcacttctggttctcacacagactgcagctttcatgctgtctgtagagaacagtgttaacacttaaagcaggttatgacttctgatcaagaggaggaagacgctgaatacagttgggcaccaaagtacagatttgcctctcagcactcacttttgtttgcaacattcagctccttcaaaattctcccaaagaacccccatgcatactgtggccttcaggctcctgcagtgtggaactcattttaccatgcataaattattcattcattccacatcattttagtttgagcactcttagagcttaaactagagagtctgaaatggttccgccatttacccacttgagtggtgttgagactcttcagccccctacagatttttgagcaatttcttgctctcgctgcccctcagacttagtcttttaaaggatttgtagtaatgtataaaaaacattctatatttaattattaactacacatgaccaaataaaccattgctataggtaatcattgaatattgacattatatggccaagatagatagttaagaagatctgtaacatgatgtgcagatgaaaatttgaaactttttaagcctgtaaatcatattgctgaaaatcttcaaacacaaactctggggtgagcattaccattgaacagttg

SEQ ID NO: 2928 - DNA, 2442 bp, Rattus norvegicus
  Genbank Accession No. M16982
gacagaaaacctagagatggaattaaattatggccagctctcacaaggtcaactttgatgtattacgtgaatgatggagtgtatgggtcatttaactgcattctttatgaccatgcacatgtcagtccctgcagccgccgccgccggccgccttcagtcagcagctcggcgccacctccggtcggcgactgcggcgggctcgacgaggcggctgacggggcggcggcgggaagacggccgggtgcgccttggggtttagtggcggcttctccatgggtccagccagccgcttccctgtgctgtgagtgtttccaccactccaggagacagcattcagagttgaccttgtgagagctggccataatttaattccatctctaggttttctgtcttattgtttcagaggcacatcgagaaccaaccatgggcagctttactaaggaagagtttgactgccatatcctcgatgaaggtttcactgctaaggacattctggaccaaaaaatcaatgaagtttcttcctctgatgataaggatgctttctatgttgcggacctcggagacgttctaaagaagcatctgaggtggctgaaagctcttccccgtgttactcccttctatgctgtcaagtgtaatgacagcagagccatagtgagcaccctggctgccattgggacaggatttgattgtgcaagcaagactgaaatacagttggtgcaggggcttggggtgcctccagagaggattatctatgcaaatccttgtaagcaagtgtctcagatcaagtatgctgccagtaatggagtccagatgatgacttttgacagtgaaattgagttgatgaaagttgccagagcacatccaaaggcaaagttggttttgcggattgccactgatgattccaaagcagtttgtcggctcagtgttaagtttggtgccacactgaaaaccagcaggcttctcttggaacgggcaaaagagctaaatattgatgtcattggtgtcagcttccatgtgggcagtgggtgtactgaccctgagaccttcgtgcaggcagtgtcagatgcccggtgtgtctttgacatgggaacagaagttggtttcagcatgtatctgcttgacattggtggtggctttcctgggtctgaagacacgaagcttaaatttgaggagatcaccagtgtaatcaacccagctctggacaagtacttcccatcggactctggagtgagaatcatagctgagccaggcagatactacgtcgcatcagctttcacacttgcagtgaatatcattgccaaaaaaaccgtgtggaaggagcagaccggctcggacgatgaagatgagtcaaacgagcaaactttgatgtattacgtgaatgatggagtgtatgggtcatttaactgcattctttatgaccatgcacatgtgaaggccctgctgcagaagagacccaagccagatgagaagtattactcatccagcatctggggaccaacatgtgatggccttgatcggatcgtcgagcgctgtagcctgcctgaaatgcatgtgggtgattggatgctgtttgagaacatgggtgcatacactgttgctgctgcttctactttcaatgggttccagaggccaaacatctactacgtaatgtcacggtcaatgtggcaactcatgaagcaaatccagagccatggcttcccgccagaagtggaggagcaggatgttggcactctgcccatgtcttgtgcccaggagagcgggatggaccgtcaccctgcagcctgtgcttctgctagtatcaatgtatagatgccattcttgtagctcttacctgcaagtttagcttgagttcacggcatttggggggaccatttaacttaattactgctagtttggaatgtctttgtaagagtagggttggcaccaatgcagtatggaaagactaggagatgggggtcacacttactgtgttcctatggaaactttgaatattttatatggatttttattcacttttcagacctgatactaatgagtgcccctcggctgctgagcaagcatttgtagcttgtacattggcagaatgggctaaaagcttatgttgtgacccattttgaaaataaagtatcttgaaatgattggacattggagaatgtgtgcaagtatcccttacagaaggcacaaacttctgcacaggctgtgtgttacagcagtgagtctagcccagcagagatgtggatgatacaaagctgtgccccctctgtacagcatcaatgtgcttagcccatctcaagtgtttactgtgaacttggtgcccaaagtctcttaagagtgtcatctgcctagtggcctcttgacttggccacttcctaaggagagggcatctgaggctctttgaaccttgcctgcagaaaccctgactgctccctcaacccttggccg

SEQ ID NO: 2929 - DNA, 999 bp, Rattus norvegicus
  Genbank Accession No. M17419
agcgcggccgactctgcaggtctgcgtggagccgcagttgcgtctctgttccgcagatggggttcgtgaaagttgtcaagaataaggcctactttaaaagataccaagtgagatttagaaggcggcgagagggtaaaactgactactatgcacggaaacgattggtgatccaggacaaaaataagtacaacacaccgaaatacaggatgatagttcgtgtaacgaacagagacatcatctgccagattgcatatgcccgtatagaaggggatatgatcgtctgtgcagcatatgcacatgaacttccaaaatacggtgtgaaagttggcctgacaaactatgctgcagcctattgcactggcctgctgctggcccgcaggcttctgaataggtttggcatggacaagatctatgaaggccaagtggaggtgaatggagacgagtacaatgtggaaagcatagacggtcagcctggtgccttcacttgctatctggatgcgggtcttgcccgaactacaactggcaataaagtttttggcgccctgaagggagctgtggatggaggcttatctatcccccatagtaccaaacgattccctggctatgactctgaaagcaaggagttcaatgcagaggtgcaccggaagcacatcatgggtcagaatgtggcagactacatgcgctacctgatggaggaggatgaggatgcgtataagaaacagttctctcagtacatcaagaacaacgtgactccagacatggaggagatgtataagaaagctcatgctgctatccgagagaatccagtctacgagaagaagcccaagagagaagtgaagaagaagaggtggaatcgtcccaaaatgtctcttgcccagaagaaagaccgggttgctcaaaagaaggcaagcttcctcagagctcaggaacgggctgctgaaagttaaagccattttctatgaagattttttcataaagacaataaacattgatcaaagc

SEQ ID NO: 2930 - DNA, 1179 bp, Rattus norvegicus
  Genbank Accession No. M17960
tctagaggacttctctgaagccacagaaattagaggtgacttttcccgggtgctgtagggcccactggcttcagggtgaaacttagcctccactcccacccccaaaagaattgacccttaattccctaaaacccatctgttgtttttttcactctcccatttttaggcaattaaaattagctccccccccccaaatttcatgttgggaattttcttaaactcaacagcaacagcaaaccacctaacttctataaaatagcctaagattttgtgggttccccaaacttgctgactaagaccttaggttccccacgttaggcttggatcaagatgttccccttttttgcatagaataattttcctcatttcccaacttggattctaatttttctggaatctcaaatttagtcgtttgccacagttttcccatttatggagtctcattcaagtcctcctactttgggccactcattcccagggccgcaaatcagacaagggtctgatttgggatccccgaaatttgatcattgtttccgctggccactttcggcagcttcccgtcctgcgcataacatcgatatcggcctcttcacttctcctacggtgtcccagcggcagctcagattttggaaaagtgtgtgtgccccaaacacgcaccggacactgcgcggcggccaggacgtgggcagtgctgctcccgtgtccaggaaaaccactgggcattgcccccagtttcccccaaatttgggcattgtccccgggtcttccaacggactgggcgttgccccgggacactggggactgcctttggggtctcgctcaccttcagcaacgtccacttcagcagctcccacttctgcagctctcccgcccttctccgatcctcctgcgccagcggacccgaccttcggccttgcggtgagctcccggtggcgcgctcccttgtgctccagctcttccgttgcggggcaccggctacctcgcagtttgtcttcagggctgctgcggggtagcgcgggagcgggctgctggcttctcccttggcgaccgcgctcctttgggccgggcgctccgaaacacgcgccactttgtatgcactctgcaaacaacgcggtggtagggaaagcgcctgagcggccaggaagcgggaaaggcagagcgctccggcggcttggatcc

SEQ ID NO: 2931 - DNA, 3112 bp, Rattus norvegicus
  Genbank Accession No. M18416
cgcagaacttggggagccgccgccgcgattcgccgccgccgccagcttccgccgccgcaagatcggcccctgccccagcctccgcggcagccctgcgtccaccacgggccgcggccaccgccagcctgggggcccacctacactccccgcagtgtgcccctgcaccccgcatgtaacccggccaacatccggcgagtgtgccctcagtagcttcggccccgggctgcgcccaccacccaacatcagctctccagctcgcacgtccgggatggcagcggccaaggccgagatgcaattgatgtctccgctgcagatctctgacccgttcggctcctttcctcactcacccaccatggacaactaccccaaactggaggagatgatgctgctgagcaacggggctccccagttcctcggtgctgccggaaccccagagggcagcggcggcaataacagcagcagcagcagcagcagcagcagcgggggcggtggtgggggcggcagcaacagcggcagcagcgctttcaatcctcaaggggagccgagcgaacaaccctacgagcacctgaccacagagtccttttctgacatcgctctgaataacgagaaggcgctggtggagacaagttatcccagccaaactacccggttgcctcccatcacctatactggccgcttctccctggagcctgcacccaacagtggcaacactttgtggcctgaaccccttttcagcctagtcagtggccttgtgagcatgaccaaccctccaacctcttcatcctcagcgccttctccagctgcttcatcgtcttcctctgcctcccagagcccacccctgagctgtgccgtgccgtccaacgacagcagtcccatttactcagctgcacccacctttcctactcccaacactgacatttttcctgagccccaaagccaggcctttcctggctctgcaggcacagccttgcagtacccgcctcctgcctaccctgccaccaagggtggtttccaggttcccatgatccctgactatctgtttccacaacaacagggagacctgagcctgggcaccccagaccagaagcccttccagggtctggagaaccgtacccagcagccttcgctcactccactatccactatcaaagccttcgccactcagtcgggctcccaggacttaaaggctcttaataacacctaccagtcccaactcatcaaacccagccgcatgcgcaagtaccccaaccggcccagcaagacacccccccatgaacgcccgtatgcttgccctgttgagtcctgcgatcgccgcttttctcgctcggatgagcttacacgccacatccgcatccatacaggccagaagcccttccagtgtcgaatctgcatgcgtaatttcagtcgtagtgaccaccttaccacccacatccgcacccacacaggcgagaagccttttgcctgtgacatttgtgggagaaagtttgccaggagtgatgaacgcaagaggcataccaaaatccacttaagacagaaggacaagaaagcagacaaaagtgtcgtggcctcctcagctgcctcttccctctcttcctacccatccccagtggctacctcctacccatcccccgccaccacctcatttccatccccagtgcccacctcttactcctctccgggctcctctacctacccgtctcctgcacacagtggcttcccatcgccctcggtggccaccacctatgcctccgtcccacctgctttccctgcccaggtcagcaccttccagtctgcaggggtcagcaactccttcagcacctcaacgggtctttcagacatgacagcaaccttttctcctaggacaattgaaatttgctaaagggaatgaaagagagcaaagggaggggagcgcgagagacaataaaggacaggagggaagaaatggcccgcaagaggggctgcctcttaggtcagatggaagatctcagagccaagtccttctagtcagtagaaggcccgttggccaccagccctttcacttagcgtccctgccctccccagtcccggtccttttgacttcagctgcctgaaacagccacgtccaagttcttcacctctatccaaaggacttgatttgcatggtattggataaaccatttcagcatcatctccaccacatgcctggcccttgctcccttcagcactagaacatcaagttggctgaaaaaaaaaatgggtctgggccctcagaaccctgccctgtatctttgtacagcatctgtgccatggattttgttttccttggggtattcttgatgtgaagataatttgcatactctattgtactatttggagttaaattctcactttgggggagggggagcaaagccaagcaaaccaatggtgatcctctattttgtgatgatcctgctgtgacattaggtttgaaacttttttttttttttgaagcagcagtcctaggtattaactggagcatgtgtcagagtgttgttccgttaattttgtaaatactgctcgactgtaactctcacatgtgacaaaatacggtttgtttggttgggttttttgttgtttttgaaaaaaaaattttttttttgcccgtccctttggtttcaaaagtttcacgtcttggtgcctttgtgtgacacaccttgccgatggctggacatgtgcaatcgtgaggggacacgctcacctctagccttaagggggtaggagtgatgtttcaggggaggctttagagcacgatgaggaagagggctgagctgagctttggttctccagaatgtaagaagaaaaatttaaaacaaaaatctgaactctcaaaagtctatttttttaactgaaaatgtagatttatccatgttcgggagttggaatgctgcggttacctactgagtaggcggtgacttttgtatgctatgaacatgaagttcattattttgtggttttattttacttcgtacttgtgtttgcttaaacaaagtgacttgtttggcttataaacacattgaatgcgctttactgcccatgggatatgtggtgtgtatccttcagaaaaattaaaaggaaaataaagaaactaactggt

SEQ ID NO: 2932 - DNA, 1663 bp, Rattus norvegicus
  Genbank Accession No. M19651
cctgggggtcgtgaagttccgagcggacgggtccacggaggttcatctggagaggtgggtcccctgcgaggtgaaaggcgccgctgcgacacacccccaccccccgcggtgcagtggttcagcccaataacttttcattcataaaaaagaccagactctgcgaggcgcgagtgagtcagaaccgcagccgccgacgcggaccctaccgaacatccagcccagggcatgtaccgagacttcggggaaccgggaccgagttccggggctggcagcgcgtacggtcgccccgcgcagccccagcaagcgcagacacagacagtccagcagcagaagttccaccttgtgccaagcatcaacgctgtcagtggcagccaggaattgcagtggatggtgcagcctcatttcctgggacccagcggctatccccgacctctgacctatccccagtacagtccccctcagccccgaccaggagtcatacgagccctagggccacctccaggggtgcgacgcaggccctgtgagcagatcagcccggaggaggaagagcgccgcagggtgagacgcgagcggaacaagctagcagctgctaagtgcagaaaccgaagaaaggaattgacagacttcctgcaggcggagaccgacaagttggaggatgagaaatcggggctgcagcgtgagatcgaagagctgcagaagcagaaggaacgccttgagctggtgctggaagcccatcgccccatctgcaaaatcccagaagaagacaagaaggacacaggtggtaccagcagcacgagtggggcgggtagcccaccgggcccctgccgcccagtgccttgtatctccctttctccaggacccgtacttgaaccggaagcactgcatacccccacgctcatgaccacaccctctctgactccttttactccgagtctggttttcacctatcctagcacaccagagccttgttcctcagcccatcgaaagagtagcagcagcagtggtgacccctcctccgaccccctaggttctcccacactcctggctttgtgaggcacccagccacaccccttgcaggtgctacccgttgtcatctcctttccctgttcatccagcaggcctggaccatacccatgccccaaaccagcaggtcttttatctctttcaagtagaacaaacatgttatgctttgatatagagccagcttgggggtccccaaagctgctcactgtttctctagagctggcctatcataatttgcatacagagaaaatatgtccctctgccagagtaagcctggcagctctgactttgtagatccccagtggtcctttgatgccttgcagaccactttcccacaccatgtcactttcttcatgttatccagcctactctaagcctagatagaaggtgccctttaactagcctagaacactaactcacacagcaccaacagccagcagcaccaggacaccctgtaggctcctcctgatcaggaggcaccaacagcttctgtgatgagctgagctgtactccctagctctgagaagcttttagctctggggtatccaagcctccacagcaagggcagctgctatttattttcctaaagagactatttttatacaaaccttccaaaatggaataaaaggcttgaagctct

SEQ ID NO: 2933 - DNA, 607 bp, Rattus norvegicus
  Genbank Accession No. M20156
catgggtgttgacattcgccacaacaaggaccgaaaggttcggcgcaaggagcccaagagccaggatatctacctgcggctgctagtcaagctgtacaggtttctggccagacggaccaactccaccttcaaccaggttgtgctgaaaaggttatttatgagccgaactaaccggccacctctgtccctgtcccgaatgatccggaagatgaagcttcctggtcgggagaacaaaactgctgtggttgtggggacgatcacagatgatgtgcggattctggaagtgcccaagctgaaggtgtgtgcactgagggtgagcagccgggcccgaagtcggatcctcaaggctgggggtaagatcctgaccttcgaccagctggccctggagtctcccaagggcaggggcactgtgctcttgtctggtcctcggaagggccgagaggtgtaccgacactttggcaaggccccaggaactccacacagccacaccaaaccctatgtccgttccaagggccggaagttcgagcgtgccagaggccgaagggccagccgaggctacaaaaactaaccctggctcttactgttaataaaaaagctttggatgttg

SEQ ID NO: 2934 - DNA, 1733 bp, Rattus norvegicus
  Genbank Accession No. M20313
ggagggtggaacactggtggaagccggtaccctgggcagggaagccctggaggcaaccgttacccacctcagagtggtggtacctgggggcagccccatggtggtggctggggacaacctcatggtggtggctggggacaacctcatggtggtggctggggtcagccccatggcgggggctggagtcaaggagggggtacccataatcagtggaacaagcccagcaagccaaaaaccaacctcaagcatgtggcaggggctgccgcagctggggcagtagtggggggccttggtggctacatgttggggagtgccatgagcaggcccatgctccattttggcaacgactgggaggaccgctactaccgagaaaacatgtaccgttaccctaaccaagtgtactacaggccggtggatcagtacagcaaccagaacaacttcgtgcacgactgtgtcaatatcaccatcaagcagcatacagtcaccaccaccaccaagggggagaacttcacggagaccgacgtgaagatgatggagcgtgtggtggagcagatgtgcgtcacccagtatcagaaggagtcccaggcctattacgacgggagaagatctagcgccgtgcttttctcctcccctcctgtgatcctcctcatctccttcctcatcttcctgatcgtgggatgaggaggccttcctgcttgttccttctcattctcgtggtctaggctgggggaggggttacccacctgtagctctttcaattgaggtggtgtctcattcttgcttctctttgtccactattctaatacccttggcagtgatgggtctggggaaatgtacagtagaccagatgctattcgcttcagcgtcctttgattgagtccatcatgggccaggttaacaccaggccagtaagaatataacaccaaataactgctggctagtcagggctttgttttggtctactgagtaaatactgtgtaacccctgaatttgtacccagaggacatggtgacagagacacacataacttagtataggcaaaggggtctatagccaaagaagcactgtgtgggcatggcaccctggataacagcctcccgcctgggatatctagagcatcacatgtgaattctttcttttctaacataaaccatagctgattgaaggcaacaagaaaaagaatcaaattatcctactgacattgaaagcaaactatgttcattccctaggcgctggaatgatttttagccttggattaaaccaggagattttgactctgaggagaaccagcagtacaaaagcatggtctcctgtgatgggagagatggtgaggggacaaaggcaagacccctgcgtttcttcatttctgtctcataattatcaagagctagaattaggtcgtgtctcataattatcaagagctagaattaggtcgtgtgccctaagtttctgtactcgtatttgaactggacaacaaagagacaatctacaaattctcttgggctgcagaggagagaaataggctccattccaaagtggaaagagaaattctgctagcattgtctaagtaaggctaacttttccttaaatcgctttgtatttcccccagcagacatcacaaccctgtgatcggttcagcctgcaccgcgggtgttctgtgtagaatatataaatataacttcaagcttaggccttctattttaaaacatctgaagtgtggaacgcactggccc

SEQ ID NO: 2935 - DNA, 1758 bp, Rattus norvegicus
  Genbank Accession No. M20406
agaccttatacatagtctgattagaccaggatcatggatactagtgtccttctcctccttgctgtcctcctcagcttcttgctattcctggtcagaggccatgcaaaagttcatggtcatcttccaccaggaccccgtcccttacccctcttgggaaacctcttgcagatggacagaggaggctttcgtaagtctttcattcagcttcaagaaaaacacggagatgtgttcacagtatactttggacctaggcctgtggtcatgctgtgtgggacacagaccataagggaggctctggtggaccatgctgaggctttctctggccggggaataattgctgtgcttcagccaattatgcaggaatacggtgtgtcctttgttaatgaagaaaggtggaagatccttcggcgattatttgtagccaccatgagagactttgggataggaaagcagagtgtggaggatcagataaaggaggaggccaaatgtttagtggaggaactgaagaatcatcagggagtctccctggacccaacgttcctcttccagtgcgtcacaggcaacataatctgctccattgtctttggagagcgctttgactacagagaccgccagttcctgcgcttgctcgacctgttgtataggaccttttccctcataagctcattctccagccagatgtttgaggtctactctgacttcctgaagtactttcctggtgtccacagagaaatctacaaaaacctgaaggaagtcctcgactacattgatcatagtgtggagaaccacagggccactttggaccccaatgctccccgagactttatcgatactttccttctgcacatggagaaggagaagttgaaccactacacggagttccatcattggaacctaatgatatctgtgctctttcttttccttgctggcactgagtctacaagcaacactctctgctatggattcctgctcatgctcaagtaccctcatgttgcagagaaagtccaaaaggagattgatcaggtgatcggctcacagcgggtcccaacccttgatgaccgctccaaaatgccatacactgaggcagtcatccatgagattcagagattttctgatgtttctccaatgggtttgccatgcagaatcaccaaagacacattgttccgagggtacctgctccccaagaacactgaggtgtacttcatcctgagttcagctctccatgacccacagtactttgaacaaccagacaccttcaatcctgagcacttcctggatgccaatggggcactgaagaaatgtgaagctttcatgcccttctccataggaaagcgtatgtgtcttggagaaggcattgcccgaagtgaattgttccttttcttcactaccatcctccagaactactcagtgtccagccctgtggatcctaacaccattgatatgactcccaaggagagtggattagccaaagtagccccagtgtacaagatttgctttgtagcccgctgattgtgctgaggcagtcagccgactcacttctgttcaaaatggccccatttttctgattctgggagacctgctggagaccaggcccaaggttgctgagtcattcctcacttcttcccaacagcctcagtccccatttatcaggtctccatgctctgtgatctatgctattggactatgtataaggtctgaattctatgtctacaggtttgcctagtatgtatggttcatgtaaacaggatcatatagtgc

SEQ ID NO: 2936 - DNA, 1780 bp, Rattus norvegicus
  Genbank Accession No. M20629
tctcttgctgtttgcccaatttggggacacccatcctcaccaccagtggtggacaccacaaaaggcaaagtcctggggaagtatgtcagcttagaaggatttacacagcctgtggccgtcttcctgggagtcccttttgccaagcctcctcttggatctctgaggtttgctccaccagagcctgcagagccctggagcttcgtgaagaacaccaccacctacccgcctatgtgctcccaagatggagttgtgggaaagttactcgcagatatgttgagcaccggaaaagagagtatacctctcgagttttccgaagactgtctctacctgaatatttacagtcctgctgacttgacaaaaaacagccgattgcccgtgatggtgtggatccatggaggtggactaataataggcggagcatcaccctatagtggactagctctctctgcccacgaaaacgtggtggtggtaaccattcaataccgcctgggatttgggggattgtttagcaccggtgatgaacacagccgggggaactgggctcacttggaccagctggctgcactacgctgggtccaggataacattgcaaactttggagggaacccggattcagtgaccatctttggagagtcagcaggaggtgtcagtgtctctgctcttgtcttatctcctctggccaagaacctcttccacagagccatttctgagagtggtgtggtcctcactacaaacctggacaagaagaatactcaggctgtggctcaaatgattgctactctttctgggtgtaataacacctcatcagccgccatggttcagtgcttgcgccagaagacagaggctgagctcttggagcttacagtgaaactggacaatacctccatgtccactgtgattgatggagtggtactgccaaagacaccggaagagatcctgactgagaagagtttcaacacggtcccctacatagtgggcttcaacaagcaagagtttggctggatcattccaacgatgatgggaaatctactctctgaaggcagaatgaatgagaaaatggccagttctttcttgaagaggttcagccctaaccttaacatctctgagagtgtgattccagcaatcattgagaagtacttaagaggaacagatgaccctgccaaaaagaaggaacttctcctggacatgttttcagatgtctttttcggtatcccagctgtactcatgtcccgtagcctcagagatgccggagcgcccacctacatgtatgagtttcagtatcgcccaagcttcgtgtctgaccagagaccccagacagttcagggagaccatggtgatgaaatcttctctgtatttgggactccatttttaaaagagggcgcctcagaagaggagaccaatcttagcaagttggtgatgaagttctgggccaactttgctcgaaatgggaacccaaatggagaggggctgcctcactggccaaaatatgatcagaaggaagggtatttgcagattggtgccaccacccagcaagcccagaaactgaaaggagaagaagtggctttctggactgagctcttggctaagaatccacctcagacagaacacactgaacacacataaatgggtctctgccagcctcagtaccagaggagcaaagatggggctattccacaaaggatggctatttgccaaagatgaatcttacagaggaaactgcacaattgtacagttggggtatttgtatctcaactttgaaataaatttccttttagaaagc

SEQ ID NO: 2937 - DNA, 1417 bp, Rattus norvegicus
  Genbank Accession No. M21730
gtcctgctctcaaccgcagcctgcgccctaccttctgcagctccagcctactcctgaccgacagcatcatggctctcagaggcaccgtgactgacttctctggattcgacggcagggctgatgccgaagttcttcggaaggccatgaaaggcttgggcaccgacgaggacagcatcctgaacctgttgacagcccggagcaacgctcagcgccagcagattgctgaggagtttaagactctgtttggcagggaccttgtgaatgacatgaagtctgaactgaccggaaagtttgagaagttaattgtggctttgatgaagccctcccggctctacgacgcctacgagctgaaacacgctcttaagggagctgggacagatgagaaagtgttgactgaaatcattgcctcaaggacacctgaagagctcagggccataaaacaagcttatgaagaagaatatggttccaacctggaagatgatgtggtgggggatacctcagggtactaccagaggatgttggtggtcctccttcaggccaatagagaccctgacactgcaattgatgatgctcaagttgaactggatgctcaggcattgttccaggctggagagctgaagtgggggacggatgaagaaaagttcatcaccatccttgggacacgcagtgtgtctcatttaagaagagtgtttgacaagtacatgacaatatcaggatttcagattgaggaaaccattgaccgagagacctcagggaacttggagaacttactcctggctgtcgtgaagtctattcggagcatacctgcctaccttgcagagaccctctactatgctatgaagggtgctgggacggacgatcacaccctcatcagagtcatagtgtcgaggagtgagattgatctgtttaacatcaggaaggagtttaggaagaacttcgccacgtccctgtactctatgatcaagggcgacacatctggagactataagaaggccctgctgctcctctgtggaggcgaggatgactgaggagctgcctggagtgccctgggcccgcctgctgcccaccatcagcttccttcagcaccacgcctacttacgttcaatgcctgcctgcctgccacgctgccttactcacacgagtgtgtgctaatgaccaaagctgtctcgaatgaaagcagtgttctgctgttctgtctgacagaccttcccacgtctctcagtctagtatctctaagttgcgttttctatcctcttctaaagcttcatttatattaagttaataaccatattaccttgaacggaaccttagccatgaaattgtgaactcttggaagtgctgtcaatcaagcttagtgctctagctgacctgaaaaattaagatggtcgtaatatcagaaacgttgccgacaaataaa

SEQ ID NO: 2938 - DNA, 971 bp, Rattus norvegicus
  Genbank Accession No. M21770
gacaatgagaacgaccaccatcaactccagagagggccacctcccgctccaaggctcttgcagcgactctgctctggattccgtctcttcctgctttccctgggcctcagcatcctgctgctggtggttgtctgtgtgatcacatcccaaaattcccaactccgggaagatctgcgggttctaaggcagaatttcagcaactttaccgtgagcactgaggaccaggtcaaggccctgaccacccagggagagagagtgggaagaaagatgaagttagtcgagtcacagctggaaaaacatcaggaggatctgagggaagaccactctagattgctactgcatgtaaagcagttagtgtctgacgtgcgaagcttgagctgccagatggccgcacttcggggcaatggctctgaaaggatctgctgccccatcaactgggtggagtatgaaggcagctgctactggttctccagctctgtgaagccttggacggaagctgacaagtactgccagctggagaacgcccacctggtggtggtgacttcctgggaggagcagagattcgtccagcaacacatgggccccttaaatacttggattggcctaactgaccagaacggaccctggaaatgggtggatgggacagactatgagacaggcttcaagaactggagaccagggcagccagatgactggtacggacatgggcttggagggggtgaagactgtgcccacttcaccaccgatggccactggaatgatgacgtctgcaggaggccctaccgctgggtctgtgagacagagttgggcaaggccaattaggagcctccattcccctgatttatttcctgagtgccttgagctgtgaggcttagagttgggaggtcctactcaagggtctccccatctttgggaactttcatctaggattttaaggggctggtaaagaatggtgtttgaggaatgtggta

SEQ ID NO: 2939 - DNA, 771 bp, Rattus norvegicus
  Genbank Accession No. M22756
gccagggcgtccggcctcaccgctcagtggggaagacatgcaaggaatttgcataagacagcagtgcaaaatggtgctggaggagccttatttgtgcatagagatactcctgagaataacccagatactccatttgatttcacaccagaaaactacgagaggatagaggcaatagtcagaaactacccggaagggcacagagcagcagctgtgcttccagtgctggacctggcccaaaggcagaatgggtggctgcctatctctgccatgaacaaggtggcagaagttttacaagtgcctccaatgagagtctatgaagtggcgactttttacacaatgtacaatcgaaagccagttgggaagtaccacattcaggtctgcactactacaccttgcatgcttcgagactctgacagcatcctggagacccttcagagaaagctgggaataaaagttggagagactacgcctgacaagcttttcactcttatagaagtagaatgtttaggggcctgtgtaaacgcaccgatggttcaaataaacgacgactactacgaggatctgacacccaaggatattgaagagattattgatgaactcagagctgggaaagttccaaaaccagggccaaggagtggccgcttctgttgtgagccagccggaggccttacttctttgactgaaccacccaaaggacctggctttggtgtgccagcaggcctttaacttacattcaactgtaaaaatgtcactggagaaataaaatatgaa

SEQ ID NO: 2940 - DNA, 1843 bp, Rattus norvegicus
  Genbank Accession No. M23591
ggcacgagcgccgagagaaccgcggccagagcgcggagaggcctgcgggcggcgacggcagcgggagggcgggcgccgtcgggccggagcctcccccgagccgcgccgcgctctggctccgagccgtgagccctttttgccgcgccccgagcgcgtggccgggggccgggcggggcgggcgctcccggaggccggggccggcggctgcccgctgggcttgggcggggcgcgggctgcccgctccgcggctcggtggtcccgccgggggccggcggcgggggaggcggcggggacgcgcggctcgccgccatggacgacaaggcgttcaccaaggagctggaccagtgggtggagcagctgaacgagtgtaagcagctgaacgagaaccaagtgcggacgctgtgcgagaaggctaaggaaattttaacaaaagaatcaaatgtacaagaggttcgctgtcctgttaccgtctgtggagatgtgcatggccaattccatgaccttatggaactcttcagaattggtggaaaatcaccagacaccaactatctattcatgggtgactatgtagacagaggatattattctgtggagaccgtgactcttcttgtagcattaaaggtgcgctatccagagcgtatcacaatattgcgaggaaatcatgaaagccggcagatcacacaagtatatggcttttatgatgaatgcctacgaaagtatgggaacgccaacgtgtggaaatactttacagatctctttgattatcttccacttacagctttagtagatggacagatattctgcctccacggtggcctctctccatccatagatacactggatcacataagagccctggatcgcttacaggaagttccacatgagggcccaatgtgtgatctcttatggtcagatccagatgaccgtggtggctggggcatttctccacgtggtgctggctacacatttggacaagacatttctgaaacatttaaccatgccaacggcctcacactggtgtcccgtgctcaccagcttgtaatggaaggatataattggtgccatgatcggaatgtggtcaccatttttagtgcacccaattactgctaccgctgtgggaaccaggctgctatcatggaattagacgacactttaaaatactcttttcttcagtttgacccagcacctcgtcgtggagagcctcatgtgacccggcgcaccccagactacttcctataaattcctccccaggacctgtctttgtatgttgaagtatacctggctttttaaaaaatatatatacatatatatatttaaaaacaacagttatctgtgtgtctctgtaacaaattgtgctatgtcttgacgttaaaacacatcatggaccaaaacgtgccatactaatggtgagccatcagcacggtgtgaacttgagtccactgtcctagccgagtcaaccaggcagccgcctgcccgcctgcctgctgtagtagccgtccttcgtgactggttaagggaaagggtcactggtggcttcatctcctttgcgcttacttggaaatttagttacaagtttaactggcatggattatagagttggagttttatttttaagaattgacaagctgacttccacttaaattcataaccctttattttgttgaaatgtatgactaactgaagaagagattcttggagtatgttgtcataacactaagatttcctttcaagtttcctgaactgaattactgttggatgttgacctgcacattctgtatatttgtcctgacagtgttgcatcctccttgctgtactgaacaaataaacttcccaatttagagag

SEQ ID NO: 2941 - DNA, 2445 bp, Rattus norvegicus
  Genbank Accession No. M23697
ggcacgggacacggaagaaacggggagcaaaatgaagggagagctgttgtgcgtcctgctgctttgtggagtggcgttcacgttgcctgaccagggaatacacaggaggttcagaagaggagctcggtcctacagagcgacctgcagagatgaacagactcagacaacttaccaacagcatcagtcatggctacgtcccatgctcagaggcaatcgggtggaatactgccggtgcaacagcggcctggcacagtgccactcggtgcccgtccgaagttgcagtgaaccgagatgcttcaatgggggtacgtgtcagcaggccctgtatttctctgacttcgtctgccagtgccctgacggatttgttgggaaacgctgtgatatagataccagagcaacctgcttcgagggccagggcatcacctacagaggcacatggagcacagcagaaaatggggctgaatgcatcaactggaatagcagtgccctgtcccagaagccctacagtgcaaggaggccaaatgccatcaagctgggccttgggaatcacaattactgcagaaacccagaccgagacgtgaagccctggtgctatgtctttaaggcagggaagtataccacggagttctgcagcacgccggcttgccctaagggaccaactgaggactgctatgttggaaaaggtgtgacttaccgtggcacccacagctttaccacatccaaggcctcctgcctcccatggaattccatgatcctgataggcaagacttacacagcgtggagggccaactcccaggcacttggcctgggcagacacaattattgccggaacccagatggggatgccaaaccttggtgccacgtgatgaaggaccgaaagctgacatgggaatattgcgacatgtccccatgctccacctgcggcctgaggcaatacaaacagcctcagtttcgaattaaaggaggactcttcacagacatcacctcacacccttggcaggccgccatctttgtcaagaacaagaggtctccaggagagagattcctgtgtggaggggtgctgatcagttcctgctgggtgctatctgccgcccactgctttgtagagaggtttccaccccatcatcttaaagtggtcttgggcagaacatacagagtggtccctggaaaggaggagcagacattcgagatcgaaaagtacatagtccataaggaatttgatgacgacacttatgacaatgacatcgcattactgcagctgaggtcagattccagtcagtgtgcccaggagagcagttctgtcggcactgcctgcctccctgaccccgacgtacagctccctgactggacagagtgtgagctttctggctacggcaagcatgaggcatcctctcctttcttctctgaccggctgaaggaggctcacgtcagactgtatccgtccagccgctgtacctcacagcatctgtttaacaaaaccatcacgagcaacatgctgtgtgcaggagacacccgaactgggggcaaccaagacgtccatgacgcgtgccagggtgactcaggaggccctctggtgtgcatgatcgataagcggatgactttactgggcatcatcagctggggcctcggctgtgggcagaaggacgtgccagggatatacacaaaggtcactaattacctgaactggatccaagacaacatgaagcaatgacaaagaaagcccagctccttaaacccagaggacctgccttcctcttcctcttccacagaagatacgcctgaaaggccaagcgttcttcgcaggctcgtcctcctgagctgccgctcagcagagggagtgacagtctttaggcacagacagagtttactttgtgacaggtacttcacaaacttgtacgttttaagggtgaaggtctgactttagaatcagttctgtcagatgagatgacagggaaatgccaaccttcctataactctaagattttaaaaagagaagtagaccaaagtccacccttcctggaccactattttgtacactgaaccacaagatcgtgtctcaacagtgaaatacaacttgatctttcaggagtaaaagtctgcactgaggacaagaatgtgtttttatagttacacaggggcccagcatggcctccaagagaaggaaggggttagctgatcagaccacagccccctaaaacccttgaaatcaaatattccccatcctcccacaatcctcaactcttggggcatatccctttgtacacagtgtagatgtctttttctttataaactttccagatggctgggagaactgtatgattttaatattcgatgaaatgacactagtatatttatatttgaatctatttagtttttactgtgttactagaactctgtattatgctgtactgaaataataaattccaaggtatttttcacactttt

SEQ ID NO: 2942 - DNA, 2024 bp, Rattus norvegicus
  Genbank Accession No. M23995
caatttgctgagcctgtcacctttgttccaggagccaaaccagcaatgtcttcccctgcacagcctgcagttcctgccccactggccaacttgaagattcaacacaccaagatctttataaacaatgaatggcacaactcattgaatggcaagaaatttcctgtcattaaccctgcaactgaagaggtcatctgccatgtggaagaaggggacaaggcagatgttgacaaagctgtgaaggctgcaagacaggctttccagattggctccccctggcgcaccatggatgcttcagagagaggatgcctgctgaacaagctggctgacttaatggagagagatcgcgtgctgctggctacaatggaatcaatgaatgctggaaaaatctttactcatgcataccttttggatacagaggtcagcataaaagccttaaagtactttgcaggctgggcagacaagattcatggccaaacaattccaagtgatggagatgttttcacttatacaagacgtgaacctattggggtgtgtggccaaatcattccttggaatggtccgttgattttattcatttggaagataggcgctgcccttagctgtgggaacactgtgattgtgaagccagcagagcaaactcctctcacagctctttacatggcatctttaataaaagaggcagggtttcctcctggtgtggtgaacgttgtccctggttatggatcaactgcaggggcagccatctcttctcacatggacatagacaaggtgtctttcacaggatcaacagaggttggcaaattaatcaaagaagctgcagggaaaagcaatctgaagagggtcaccctggagcttgggggaaagagcccttgcattgtgtttgcagatgctgacttggatagtgctgttgagtttgcacaccaaggagtattcttccaccagggtcagatttgtgtcgcagcatccagactttttgttgaggagtccatttacgatgaatttgttaggaggagtgtggagcgggctaagaaatacgttctaggaaatcctctggactcaggaataagtcaaggtcctcagattgacaaggagcaacatgctaaaatccttgatctcattgagagtgggaagaaagaaggcgccaaactggagtgtggtggaggacgctgggggaacaaaggcttctttgtccagcctacagtcttctccaatgtgaccgatgagatgcgcattgccaaagaggagatatttggaccagtgcaacaaatcatgaagtttaagtccatagatgaggtgatcaagagagccaacaatactccctatggtctagcagcaggagtcttcacaaaagacctggacagggccatcactgtgtcttctgctctgcaggccgggacagtgtgggtgaattgttatttgactctctctgtccagtgcccatttggtgggttcaagatgtctggaaatgggcgagaaatgggtgaacagggtgtttatgaatacactgagctcaagacagtcgcaatgaaaatatctcagaagaactcctaaagaagccagcagagtgacgagaaactctcagcagtagctacatgtctcctacaatcaccagcagagggttgttttattacagggtcttctgttgatttcttaaacataaggaatccatcagcattactgtaactcatagaaaatgtatagtttaattcttctaatacatgaccctaatacatacccaagaagaaagggatacatttaggtacatgctctttgtaacccagtcatgaaaaagtgcttttcattgtagctacttgtctacagccctcatttgatgtgatttaaactctgtttctcggtgacttcttgccactactcaccatgcacaactgaaaagtcagccactgttcttggagttattgttctgagtattgtgaaatatttttagaatgacatacctgcttgtcaaatgaaatgcttagctgtaattagagtgcaaagtttaataaaggcaaaatctcacatga

SEQ ID NO: 2943 - DNA, 399 bp, Rattus norvegicus
  Genbank Accession No. M24239
accgtgtacaaggaataattaccttttttggcattttcctcctaggaaaacggatgtgtgcaggagagggcctagcccgtatggagttatttttattcctgaccacgattttacaaaactttaagctgaaatctgtacttcacccaaaggatatcgatacaactccagttttcaatggatttgcctctctgccaccattttatgagctgtgcttcattcctctctaaagagatcaaattggctggggatttagctcagtggtagagcgcttacctaggaagcacaaggccctgggttcggtccccagctccgaaaaaaagaaccaaaaaaataaataaataaataaataaagagatcaaattgcctggctccggatgtattgtattttctcccttcaaa

SEQ ID NO: 2944 - DNA, 521 bp, Rattus norvegicus
  Genbank Accession No. M24324
gtgaccctgaggtgctgggccctgggcttctaccctgctgacatcaccctgacctggcagttgaatggggaggacctgacccaggacatggagcttgtggagaccaggcctgcaggggatggaaccttccagaagtggtcatctgtggtggtgcctcttgggaaggagcagaattacacatgccgtgtggagcatgaggggctgcctgagcccctttcccagagatggggcaggtacagctcccagagctccgttgtgtctctcccagattgtgaagcatgaagacagctgcctggagtggactgagtgacagacgatgtgttcaggtctctcctgtgacatccagagccctcagttctctttagacaccagtgtctgaagttccctgtgattctatggcttcagtgtgaagaactgtggagtccagcctgccctacacaccaggaccctgtccctgcactgcctgtgttgcctaccacattcagccttgctggtccagcctgggggtggagggtggggag

SEQ ID NO: 2945 - DNA, 1361 bp, Rattus norvegicus
  Genbank Accession No. M24396
ccattcttgaaaccgaatctgaagttaaaggctgagggaaaatggcccattaccatgacgactatggaaagaatgatgaagtggagtttgtccgaactggctatgggaaggacatggtcaaagttctccatattcagagggatggaaaataccacagcatcaaagaggtggcgacttcggtgcagttgactctgaggtccaaaaaggattacctccatggtgataattccgacatcatccccacagacaccatcaagaacacagtgcatgtcctggcgaagttcaaagggatcaaaagcatcgagaccttcgctatgaacatctgcgagcacttcctctcttcctttagccatgtcacccgagcccatgtccacgtggaagaggtcccctggaagcgttttgaaaagaatggagtcaaacacgtccatgccttcatccacaccccgacgggaactcacttctgtgacgtggagcaggtgaggaacggacctcccatcattcactctggaatcaaagacctcaaggtcttgaaaacaacccagtctggatttgaaggattcatcaaggaccagttcactactctccccgaggtgaaggaccgatgctttgccactcaagtgtactgcaagtggcgctaccagaatcgggacgtggatttcgaggctacctggggcgctgtccgggacattgtcctgaagaaatttgctgggccctatgacagaggtgaatactcaccttccgtgcagaagaccctctatgacatacaagtgctgaccctgagccagcttcctgagatagaagacatggaaatcagccttccaaacattcactactttaacatcgacatgtccaaaatggggctgatcaacaaggaagaggttttgctgcctctggacaacccctacggcaaaataaccgggacggtgaggaggaagctgccttccaggctgtgacgttatggctccagccagttgtgatgcttgggataactgtgtgctcacctgcaaaaatttcaactcaggatactgattgctctgctctgtgtgaagtaattgctcttccgtttctagtttagcaaggggcttgtagctgtgcgcacgtggagccctgcattagcagacaccgcaggctccgtggccttgggcagattcctttaaaactgtgatcggagaatcacagcgatatttctccttgctgttcttgtgccctctgcctcagactctgtctttaggatccgatcgttaaggaaatagtcgtaaagcactggctgctgccacatccgttgatctgaacatgagatcaaacactgtcatactcctagggatgtctgggttgtaccaaaaacgtaataaaaccatgtc

SEQ ID NO: 2946 - DNA, 602 bp, Rattus norvegicus
  Genbank Accession No. M25646
gctgcacgcagtgcccacctatgctcgccatgatgctcaacactacgctctctgcttgcttcctgagcctgctggccctcacctctgcctgctacttccagaactgcccaagaggaggcaagagggccacatccgacatggagctgagacagtgtctcccctgcggccctggcggcaaagggcgctgcttcgggccgagcatctgctgcgcggacgagctgggctgcttcctgggcaccgccgaggcgctgcgctgccaggaggagaactacctgccctcgccctgccagtctggccagaagccttgcggaagcggaggccgctgcgctgccgcgggcatctgctgcagcgatgagagctgcgtggccgagcccgagtgtcgagagggttttttccgcctcacccgcgctcgggagcagagcaacgccacgcagctggacgggccagcccgggagctgctgcttaggctggtacagctggctgggacacaagagtccgtggattctgccaagccccgggtctactgagccatcgccccccacgcctcccccctacagcatggaaaataaacttttaaaaaatgcaaaaaaaaaaaaaaaaaa

SEQ ID NO: 2947 - DNA, 1638 bp, Rattus norvegicus
  Genbank Accession No. M25758
gcgggaggtggcgaggccagggcagggtggcagaagcccgcgcggcgaccgcagcgagagcagcggggacagagcagaccacaacgaaggcgcacaggcagcggggccgggccgggccaccgggagagcggccaccgggaagcgggcgggaggccgggctggcagctggcagccgccgagccgcgaagcgacatggtgctgctcaaggaatatcgggtcatcctgcctgtgtctgtagatgagtatcaagtggggcagctgtactctgtggctgaagccagtaaaaatgaaactggtggtggggaaggtgtggaggtcctggtgaacgagccctacgagaaggatgatggcgagaaaggccagtacacacacaagatctaccacttacagagcaaagttcccacgtttgttcgaatgctggccccagaaggcgccctgaatatacatgagaaagcctggaatgcctacccttactgcagaaccgttattacaaatgagtacatgaaggaagactttctcattaaaattgaaacctggcacaagccagaccttggcacccaggagaatgtgcataaactggagcctgaggcatggaaacatgtggaagctatatatatagacatcgctgatcgaagccaagtacttagcaaggattacaaggcagaggaagacccagcaaaatttaaatctatcaaaacaggacgaggaccattgggcccgaattggaagcaagaacttgtcaatcagaaggactgcccatatatgtgtgcatacaaactggttactgtcaagttcaagtggtggggcttgcagaacaaagtggaaaactttatacataagcaagagaagcgtctgtttacaaactttcacaggcagctgttctgttggcttgataaatgggttgatctgactatggatgacattcggaggatggaagaagagacgaagagacagctggatgagatgagacaaaaggaccccgtgaaaggaatgacagcagatgactagcgctaccgccctttctgcactttttgcaagacagtggtccacaggaaggcccagcagctccaccctcctgagtggcaggccatctttggacgcagcctttctgtgctcattcttcaggcaactttcagtcccttactatagctatttctagatgccctttaacattgtgaacaaatagaccgtctggtattataaagcctgtgtgtgcgggagcctgatcctctaagatatatggtgtatgctgctgtatttacagctcatcctctctccattgtgccctgacccatttctgtatgccctccccctttatttccaagtgacgttctcattctttcaaatgtgctgcctttgtgatgtgattatttaagctcacttatttcagccttgggataagctgagctattttgcttcctgggcagatctttggcaatgttgaatattcacttggggagagaggaggagttaaaaatacagagacacctaccctagctcctcacaataggaatgtggcttcagaaccctgacctctgctcctagtaacctcttgttcgcgtgctctaagcaccaagaaggcacccaaggcccagccagtctaagaaaatttagcaaataataaataacccctactcg

SEQ ID NO: 2948 - DNA, 1733 bp, Rattus norvegicus
  Genbank Accession No. M26125
gacttgggaggaaccagggcctacacttagccctggtaaacagcagagcatgctgggataattcttcccagaaaaggaaaagcaggcacttctgttcccagggaaaacaacaggagcactttggacctccctgctgcagtcaggagtcatgtggctggaacttgtcctggcttcccttctgggctttgtcatctactggtttgtctcccgggacaaggaggaaaccttaccactaggagatggatggtgggggccagggtcaaagccatcagccaaagaagatgagagcatccggcccttcaaggtggaaacatcagatgaggagatcaaggacttacaccagaggatagataggttccgggcatccccacctttggagggcagccgcttccactatggcttcaactccaactacatgaagaaagtggtgtcctactggaggaacgagtttgactggaggaagcaggtggagatcctcaaccagtaccctcacttcaagaccaagatcgaagggcttgacatccacttcatccatgtgaagcctccccagctgccctcagggcgcaccccaaagcccttgctgatggtgcatggctggcctggatccttctatgagttttacaagatcatcccactactgactgaccccaagtcccacggtctgagtgacgagcacgtgtttgaagtcatctgtccctcgattcctggctatggctactcagaggcatccagcaagaaaggtttaaattcggtggccactgcgaggattttctacaagctgatgacacggctgggcttccagaaattctacattcaaggcggggactgggggtccctcatctgcaccaacatggcccagatggttcccaaccacgtgaaaggcctgcacttaaatatggctttcatttcgagaagtttttacaccatgactcctctcctgggccaacgcttcgggagattccttggctacacagagaaggatatcgagctcttgtacccctataaggagaaggttttctacagcatcatgagggagagtggctacttacacatccaagccaccaagccagacactgtgggctgtgctctcaatgactctcccgtgggcctggctgcctacatcttagagaagttctccacctggaccaagtcagagtaccgtgaactggaggatggaggcctggagaggaagttctccctggatgatctgctggttaacatcatgatctactggacgacaggaaccattgtctcctcccaacgctactacaaggagaatttgggccagggcatcatggtccataaacatgaggggatgaaggtctttgtgcccactggcttttcagccttcccttccgagctactgcatgccccagaaaagtgggtgaaggtcaagtaccccaaactcatctcctattcctacatggaacgtgggggccactttgctgcctttgaagagcccaagcttctggcccaggacatccgcaagttcgtgtccctggctgagctgcagtagtgacactggataccaactgtggctttagcagcagccctggttcctcccaagtcacacttatggaagatgacccctttctgaggaataagtttgttccctgaccacactcgaggacccagacttaaactccacagagtcgtatgttacccccatatgcttcacctcactacatagctgtgttagctacatggctttaatgataaatggatttatttct

SEQ ID NO: 2949 - DNA, 838 bp, Rattus norvegicus
  Genbank Accession No. M26837
tattccctaccaacatgaagctgttgctgctgctgctgtgtctgggcctgacactggtctgtggccatgcagaagaagctagttccacaagagggaacctcgatgtggctaagctcaatggggattggttttctattgtcgtggcctctaacaaaagagaaaagatagaagagaatggcagcatgagagtttttatgcagcacatcgatgtcttggagaattccttaggcttcaagttccgtattaaggaaaatggagagtgcagggaactatatttggttgcctacaaaacgccagaggatggcgaatattttgttgagtatgacggagggaatacatttactatacttaagacagactatgacagatatgtcatgtttcatctcattaatttcaagaacggggaaaccttccagctgatggtgctctacggcagaacaaaggatctgagttcagacatcaaggaaaagtttgcaaaactatgtgaggcgcatggaatcactagggacaatatcattgatctaaccaagactgatcgctgtctccaggcccgaggatgaagaaaggcctgagcctccagtgctgagtggagacttctcaccaggactctagcatcaccatttcctgtccatggagcatcctgagacaaattctgcgatctgatttccatcctctgtcacagaaaagtgcaatcctggtctctccagcatcttccctagttacccaggacaacacatcgagaattaaaagctttcttaaatttctcttggccccacccatgatcattccgcacaaatatcttgctcttgcagttcaataaatgattacccttgcactt

SEQ ID NO: 2950 - DNA, 3128 bp, Rattus norvegicus
  Genbank Accession No. M27440
aattctaagggtactcggtcttcagtaaggttacaaggagcctctaattttgctgggatctggaactttgaagtaggagaaaattttgctggagaagctactctccgacgcatctatggcacatgggaacacaatatgataaaccatttacaggtattcagctactttgacacaaaaggaaaacaaacatgcagagccaccctagagctctccccatggaccatgtcaacccttctacaggttcatgtgagtcaacccagtcccctctttgatctccatcactttgaccaggaagtgatcctgaaagctagcactaagaaccagaaggtcagctggaaaagtgaggtccaggttgaatcacaggttcttcagcacaatgcacacttctccaatgaccaagaagaagtacgccttgacattgctggatccttagaaggacagctgtgggaccttgaaaatttctttctaccggcatttggcaagagcttgagggaactcctacagatagacggaaagcgtcagtatcttcaagcttcgacttctcttcactataccaaaaacccgaatggctatctcctctcactccctgtgcaagaactgactgatagattcattataccagggctgaaactaaatgacttcagtggaatcaaaatctataagaaattaagtacttcaccatttgccctcaacctaacaatgctccccaaagtaaaattccctggggttgatctgttaacacaatactctaaaccagagggctcctctgtccctacctttgagacaactatacctgaaattcaattaactgtgtcccagtttacacttccaaagagctttcccgttggcaacactgtctttgatctgaataagctaaccaacctaattgcagatgttgatctgcctagtatcaccctgccagagcagaccattgagatcccatcccttgagttctctgtacctgctgggatttttattccgttctttggagaactgactgcacacgttgggatggcctctcccctgtataatgtcacgtggagcactggttggaaaaacaaagcagaccatgttgaaacattcctggattccacatgcagttcaaccttgcagtttctggagtatgctctaaaagttgtgggaacacacaggattgaaaatgataagttcatctataaaatcaaaggaacacttcaacactgtgacttcaatgtgaagtataacgaagatggtatatttgaaggactttgggacttggagggagaggctcatctggacatcaccagcccagcactgactgacttccatctgcactacaaagaagacaagacaagtgtgtctgcctcagcagcctccccagccataggcactgtgagtctggatgcaagcacagatgaccagagtgtgaggctgcatgtctacttccgccctcagtcccctccagataataaactcagcatattcaaaatggagtggagggacaaggagtctgatggtgaaacatacatcaaaattaactgggaagaagaagcagctttcagattgctagactccctaaaaagcaatgtgcccaaggcttctgaggctgtttatgattatgtcaagaagtaccacctgggacatgcttcttcagagctaagaaaaagtcttcagaatgatgctgaacacgccataaggatggttgatgagatgaacgtgaatgcccagagggtaacccgtgatacctaccagagtctatataagaagatgttggctcaggagagccagagtatccctgagaaactcaagaaaatggtgttaggcagtctagtacgtattactcagaagtaccacatggcagtcacatggctgatggactcagtcattcatttcctgaagttcaatagagtccagttcccagggaatgctggaacatatactgtggacgaactttacactatagccatgagggaaaccaagaagttactctctcagctgtttaatgggttaggacacctgttttcctatgttcaagaccaagtagagaaatcaagagtaatcaatgacataacatttaaatgtcccttttccccaacaccttgtaaactaaaagatgtcctattgattttcagggaggacttaaacattttatccaacttaggccaacaggatatcaattttacaacaatactaagtgactttcagagctttttggagagacttttagacatcatagaagaaaaaattgaatgcctaaagaacaatgaatctacttgtgtccctgatcatatcaacatgttcttcaaaacacatatcccatttgcatttaaatccctgagagaaaacatatactctgtcttcagtgagttcaatgactttgttcaatccatacttcaagaggggtcctataagctacagcaggtccatcagtatatgaaggcctttcgtgaagagtattttgatccgagtgtggttggctggacagtaaaatattatgaaatagaagaaaagatggttgaccttatcaagacccttttggctcctctgagggatttctactctgaatacagtgtgacagctgctgattttgcttccaaaatgtcaactcaggttgagcaatttgtgtccagggatatcagagagtatcttagcatgcttgctgacataaatggaaaggggagggaaaaggttgcagagctttctattgtggtaaaggaaagaataaaaagctggtccactgcggtggcagaaataacgtctgattacctccggcagctccattccaaactgcaggatttttcagaccagctctctggctactatgaaaaattcgttgctgagtccacaagactgattgacctgtccattcaaaactaccacatgtttctcagatacatcgctgagttactgaaaaagctgcaggtggccacagccaataatgtgagcccctacctaaggtttgctcaaggagaactgattatcaccttctgattcgttcattgatgcattcaaattaaacctccacatagtaggagactttttcaactattataaaaaccatcctgagccagacctgcagtcaacagcaagagcaggaagcgcattaggaactacacctgcaaccaagctggcacaaagaccaagaattc

SEQ ID NO: 2951 - DNA, 554 bp, Rattus norvegicus
  Genbank Accession No. M27905
ctttccgccggggcagccatcttccagtaactcgccaaaatgacgaacacaaaaggaaagaggaggggtactcggtatatgttctctagaccttttaggaaacatggagtcgttcctttggccacatacatgcgaatctacaagaagggtgatattgtagacatcaagggaatgggcactgttcaaaaaggaatgccccataagtgttaccatggcaaaaccggaagagtctacaatgtcacccagcatgccgtgggcatcattgtgaacaagcaagttaaaggcaagattctggccaagaggatcaatgtgcggattgagcacatcaagcactcaaagagcagagacagcttcctgaagcgggtgaaggagaacgatcagaagaaaaaggaagccaaagagaagggcacctgggttcagcttaacggccagcctgcgccacccagagaagcccactttgtgaggactaacggaaaggagcctgagctgctggagcccattccatacgaattcatggcctaatgtatacaaaggaaataaagaacccgaactgc

SEQ ID NO: 2952 - DNA, 3599 bp, Rattus norvegicus
  Genbank Accession No. M28647
gggcctctttctagtctccagccacaggacccggcgcgggctcggcgggaggaggcggacacgtggcagcggcggcgcagcgcagcagcagcggcggcacacgcgcctcggtccggggcgcgctgtcctccctctttcctccggcggcagcctagttcccgcctctcggctcccccggctccactctcccagccgggagtctgctctctcctctttctagtctccagccacaggacccggcgcgggccgcagcggccaccatggggaagggggttggacgagacaagtatgagcccgcagctgtatcagaacatggggacaagaagagcaagaaggcgaagaaggaaagggacatggacgaactcaagaaggaagtgtctatggacgaccataaactcagcctggatgaactccatcgtaaatacggaacagatttgagccgaggcctaacacccgcaaggccggttgagatcctggctcgggatggccccaacgccctcacgccccctccaactactccggagtgggtcaaattctgtcggcagctgttcggtggcttctccatgttgttatggattggagccattctttgtttcttggcttatggcatccgaagtgctacagaagaggaaccaccaaatgatgatctgtacctcggggtcgtgctgtctgctgtcgtcatcataactggctgtttctcctattatcaagaagcaaaaagctccaagatcatggaatccttcaagaacatggtccctcagcaagccctcgtgattcgaaatgaagagaagatgagcatcaacgcagaggatgtcgtcgttgttgatctggtggaggtgaagggcggagaccgaatccctgctgatctcagaatcatatctgcaaatggctgcaaggtggataactcctcactcactggtgaatcagaaccccagactcggtccccggatttcacaaacgagaaccccttggagacaaggaacattgccttcttctcaaccaactgtgttgaaggaactgcacgtggcatcgttgtgtacactggggatcgcaccgtgatgggcaggatcgccacccttgcttctgggctggaaggcggccagacccccattgctgaagaaatcgagcacttcatccacctcatcacgggtgtggccgtgttcctgggggtgtctttcttcattctctctctgatccttgagtacacctggctcgaggctgtcatcttcctcattggtatcatcgtagccaacgtgccggaagttttgctggccaccgtcacggtatgtctgacgctcactgccaagcgcatggccaggaagaactgcctggtgaagaacctggaagctgtggagaccttggggtccacatccaccatctgctccgacaagactggaactctgactcagaaccggatgacagtggctcacatgtggtttgacaatcaaatccatgaagctgacaccacagagaatcagagtggggtctcctttgacaagacgtcagccacctggttcgctctgtccagaattgctggtctctgtaacagggcagtgtttcaggctaaccaggaaaacctgcctatcctgaagcgtgcagtagcgggagatgcttccgagtcggcgctcctaaagtgcatcgaggtctgctgtggctccgtgatggagatgagggagaagtacaccaagatagtggagattcctttcaactccaccaacaagtaccagctctccattcacaagaacccaaacgcatcggagcctaagcacctgctagtgatgaagggcgccccagaaaggatcctggaccgatgcagttctatcctcctccacggcaaggagcagcccctggacgaagagctgaaggacgcctttcagaatgcctacctggagctgggtggcctgggagaacgtgtgctaggtttctgccacctccttctgcctgacgaacagtttcctgaaggcttccagtttgacactgatgaagtcaatttccccgtggataacctctgcttcgtgggtcttatctccatgattgaccctcctcgagctgctgtccccgatgctgtgggcaaatgccgcagcgctgggattaaggtcatcatggtcacaggagaccatccaatcacagccaaagccattgctaagggggtgggcattatctcagaaggtaacgagaccgtggaagacattgctgcccgcctcaacattccagtgaaccaggtgaaccccagagatgccaaggcctgtgtagtacatggcagtgacttgaaggacatgacctctgaggagctggatgacattttgcggtaccacacggagattgtctttgctaggacctctcctcaacagaagctcatcattgtggagggctgccagcggcagggtgccatcgtggctgtcacaggggatggtgtcaatgactctccagctttgaaaaaggcagatattggggttgccatggggattgttggctcggatgtgtccaagcaagctgctgacatgattcttctggatgacaactttgcctccatcgtgactggagtagaagaaggtcgtctgatatttgataacttgaagaaatccattgcttacaccctaacaagtaacattccggaaatcacccccttcttgatatttattattgcaaacattccactgcccctgggcaccgtgaccatcctctgcattgacttgggcactgacatggttcccgccatctctctggcctatgaacaggctgaaagtgacatcatgaagaggcagcccagaaatcccaaaacggacaaacttgtgaacgagcgtctgatcagcatggcctatggacagatcggtatgatccaggccctgggaggcttcttcacttattttgtgattctggctgagaacggtttcctgccctttcacctgttgggcatccgagagacctgggatgaccgctggatcaatgatgtggaggacagctacgggcagcagtggacctatgagcagaggaagattgtggagttcacctgccacacggccttctttgtcagtatcgtggtagtgcagtgggctgacttggtcatctgcaagaccagaaggaattccgtcttccagcagggaatgaagaacaagatcttaatatttggcctctttgaagagacagctcttgctgctttcctgtcctactgccctggaatgggtgcagcccttaggatgtatcccctcaaacctacctggtggttctgtgccttcccctactcccttctcatcttcgtgtatgacgaggtgcggaagctcatcatcaggcgacgccctggcggctgggtggagaaggaaacctactactagcccactgccctgcacgccgtggaacattgtgccacacactgcacctacccctaccccccctttgtgtacttcaagtcttggagctcggaactctaccctggtaggaaagcaccaaaggatgtggggatccagacgtcctggaattccggccagaaagtgttggttgcagttccgttgtagttaaggactatggcaaagaatctcaggccaaggatgtcatcgaggagtacttcaaatgcaagaaatgaataaataaaattttggctc

SEQ ID NO: 2953 - DNA, 1428 bp, Rattus norvegicus
  Genbank Accession No. M29293
ccgtctgaccgactccttgggtatattagtgcggcatctgcgtgtaacacgttgcctttattatggtggtctgaggttgttgattgtgaaatccaggatgtaggagctatgttgccgcagcctctgggctccgggatccgagagctcttttgtatcggccggtggaatctttggatgttcgagctgtattgccgcgacctgtagattcagggatcgtttacacttgagaagaactactgaacagcacgtgccagagattgaggtccaggtcaaacgtagaaggacagcctcactgagcaaccaagagtgtcacttgtacccacggcgttctcagcaacagcaaattcctgtggtggatttccaggcagaactgagacaggcgttcttagctgagacaccaagaggtggttaaagcagtattggaacttcaaggtggtggaagtcaacaaacacaggacctatccactgattgtgaaactttggtcaagcttacactgtgttaatagcctgcatcaaacctttatttattgcccttctccaagtattaaggatcttgaaattttagtgttgacaactgctattgtggaacagcaatcatgactgtgggtaagagtagcaagatgctccagcatattgactatagaatgagatgtatcctgcaagatggaagaatcttcattggcacctttaaggcttttgacaagcatatgaatttgatcctctgtgattgtgatgagttcaggaagatcaagccaaagaatgcaaaacagccagaacgtgaagaaaaacgggttttgggtctggtcttgctacgtggagagaacttggtttccatgacagtggagggtccacctcctaaagatactggcattgctcgtgtgccacttgctggtgctgcaggtggccctggtgttggaagagcagctggcagaggagtaccagcaggtgtacctattccccaagctcctgctggattagcaggccctgtccgaggagttggaggcccatcccagcaggtcatgaccccacagggaagaggcactgttgcagctgctgctgttgctgctactgctagcattgcaggagccccaacccagtacccgccaggacggggaactccacctccacctgtaggcagagcaaccccacctccaggcattatggctcctccacctggaatgagaccacccatgggcccaccaattggacttccccctgctcgagggacacctataggcatgccccctccaggaatgagaccccctcctccaggaattagaggcccacctcccccaggaatgcgtccaccaagaccctaagatacagttgataaatctcagcccttctctttccctacaatgcttcttgtgaaattgtgtcgcctgcaagcttttgacccctcttactgcattaactatagataatacc

SEQ ID NO: 2954 - DNA, 913 bp, Rattus norvegicus
  Genbank Accession No. M29295
gaatgcagcctgcaaaatggccggatcttcatcgggaccttcaaagcttttgacaagcatatgaacttgatcctctgtgactgtgatgagttcaggaagatcaagccaaagaactccaaacaagcagaaagagaagagaagcgagtccttggtctggtgttgcttcgaggagagaacctggtctccatgacagtagaaggacctcctcccaaagatactggcattgcccgagtgccacttgctggagctgctggggggccaggcatcggcagggctgctggcagaggaatcccggcgggtgtgcccatgccccaggctcctgcagggcttgctggaccagtgcgaggtgttggagggccgtcccagcaggtgatgaccccacaaggaagaggcactgtggcagctgctgcagctgcagccacagccagtattgcaggagccccaactcagtacccacctggtcgtgggggtcctcctccacctatgggccgaggggcacctcctccaggtatgatgggcccacctcctggcatgaggcctcccatgggtcccccaatggggatccctcctggccgaggaactccaatgggcatgccccctcctgggatgcgacctcctcctccaggcatgcgaggtctgctttgatcttcgcacagcattatgtcagtagctccgaagagacatggaccctattccccagggtcaggttaccacagacctgtttgtttgttatgctgtttatggagtcttactggaggtctggtttctttcaggctccctccctggaaatgtgccctccgaggcccctagacctcatcttggtcctcctccgcttcctagcttcttccaacctttgtttcccaaaaaggctgtacatagtccttttttttttctgtggcccatgaagctggtt

SEQ ID NO: 2955 - DNA, 801 bp, Rattus norvegicus
  Genbank Accession No. M29358
gtcggctgtgtcaagatgaagctgaatatctccttccctgccactggctgtcagaaactcatagaagtggatgacgaacgcaagcttcgtacgttctatgagaagcgcatggccacagaagtagctgctgatgctcttggtgaagagtggaagggttatgtggtccggatcagcggtgggaatgacaaacaaggttttcccatgaagcaaggcgttttgacccatggcagagtgcgcctgcttttgagtaaggggcattcttgttatagacctaggagaactggagagaggaagcgcaagtctgtccgaggatgcattgtggatgccaacctgagtgttctcaacttggttattgtaaaaaaaggagagaaggatattccaggactgacagataccactgtgcctcgtcggttgggacctaaaagagctagtagaatccgaaagctttttaatctctccaaagaagatgatgtccgccagtatgttgttagaaagcccttaaacaaagaaggtaagaagcccaggaccaaagcgcccaagattcagcgtcttgttactccccgtgtcctgcaacacaaacgccgacgtattgctctgaagaagcaacgcactaagaaaaacaaggaggaggctgcagaatatgctaaacttttggccaagagaatgaaggaagccaaagagaagcgccaggaacagattgccaagagacgtaggctgtcttcgctgagagcttctacttctaaatctgagtccagtcaaaaataagtctttaaagagtaacaaataaataatgagaccttg

SEQ ID NO: 2956 - DNA, 2444 bp, Rattus norvegicus
  Genbank Accession No. M30282
gcagcacaaagcaaccatccttccaggatgattttattcaaacaagtgggttattttgtttccttgttcgctacagtttcctgtgggtgtctgtcacaactgtatgcaaataccttcttcagaggtggggatctggctgccatctacaccccggatgcccagcactgtcagaagatgtgcacgtttcaccctaggtgcctgctcttcagcttccttgccgtgagtccaaccaaggagacagataaaaggtttgggtgcttcatgaaagagagcattacagggactttgccaagaatacaccggacaggggccatttctggtcattctttaaaacagtgtggccatcaattaagtgcttgccaccaagacatatacgaaggactggatatgagagggtccaactttaatatatctaagactgacagtattgaagaatgccagaaactgtgcacaaataatattcactgccaatttttcacatatgctacaaaagcatttcacagaccagagtacaggaagagttgcctgctgaagcgcagttcaagtggaacgcccaccagtataaagccagtggacaacctggtgtctggattctcactgaagtcctgtgctctctcagagatcggttgccccatggatattttccagcactttgcctttgcagacctgaatgtaagccaggtcgtcacccccgatgccttcgtgtgtcgcaccgtttgcaccttccatcccaactgcctcttcttcacattctacacgaatgagtgggagacggaatcacagaggaatgtttgttttcttaagacatctaaaagtggaagaccaagtccccctattattcaagaaaatgctgtatctggatacagtctcttcacctgcagaaaagctcgccctgaaccctgccatttcaagatttactctggagttgccttcgaaggggaagaactgaacgcgaccttcgtgcagggagcagatgcgtgccaagagacctgtacaaagaccatccgctgtcagttttttacttactcattgcttccccaagactgcaaggcagaggggtgtaaatgttccttaaggttatccacggatggctctccaactaggatcacctatgaggcacaggggagctctggttattctctgagactgtgtaaagttgtggagagctctgactgtacgacaaaaataaatgcacgtattgtgggaggaacaaactcttctttaggagagtggccatggcaggtcagcctgcaagtgaagttggtttctcagaaccatatgtgtggagggtccatcattggacgccaatggatactgacggctgcccattgctttgatgggattccctatccagacgtgtggcgtatatatggcgggattcttaatctgtcagagattacaaacaaaacgcctttctcaagtataaaggagcttattattcatcagaaatacaaaatgtcagaaggcagttacgatattgccttaataaagcttcagacaccgttgaattatactgaattccaaaaaccaatatgcctgccttccaaagctgacacaaatacaatttataccaactgctgggtgactggatggggctacacaaaggaacgaggtgagacccaaaatattctacaaaaggcaactattcccttggtaccaaatgaagaatgccagaaaaaatatagagattatgttataaccaagcagatgatctgtgctggctacaaagaaggtggaatagatgcttgtaagggagattccggtggccccttagtttgcaaacatagtggaaggtggcagttggtgggtatcaccagctggggtgaaggctgtgcccgcaaggagcaaccaggagtctacaccaaagttgctgagtacattgactggatattggagaagatacagagcagcaaggaaagagctctggagacatctccagcatgaggaggctgggtactgacggggaagagcccagctggcaccagctttaccacctgccctcaagtcctactagagctccagagttctcttctgcaaaatgtcgatagtggtgtctacctcgcatccttaccataggattaaaagtccaaatgtagacacagttgctaaagacagcgccatgctcaagcgtgcttcctgccttgagcaacaggaacgccaatgagaactatccaaagattaccaagcctgtttggaaataaaatggtcaagggatttttattaggtagtgaaattaggtagttgtccttggaaccattctcatgtaactgttgactctggacctcagcagatcacagttaccttctgtccacttttgacatttgtgtactggaacctgatgctgttcttccacttggagcaaagaactgagaaacctggttctatccattgggaaaaagagatctttgtaacatttcctttacaataaaaagatgttctacttg

SEQ ID NO: 2957 - DNA, 1590 bp, Rattus norvegicus
  Genbank Accession No. M31018
ggatctcagatggaggcgatggcaccgcgcacgctgctcctgctgctggcggccgccctggccccgacccagacccgcgcgggctcacactcgctgcggtatttctacaccgccgtgtcccggcccggcctcggggagccccggttcatcgctgtcggctacgtggacgacacggagttcgtgcgcttcgacagcgacgcggagaatccgaggatggagccgcgggcgcggtggatggagcgggaggggccggagtattgggagcagcagacacggatcgccaaggaatgggagcagatttaccgagtggacctgaggaccctgcgcggctactacaaccagagcgagggcggctctcacaccatccaggagatgtatggctgtgacgtggggtcggacgggagcctcctccgcggatataggcaggacgcctacgatggccgcgattacatcgccctgaacgaagacctgaagacgtggacggcggcggactttgcggcacagatcacccggaacaagtgggagcgggctcgttatgcagagagactcagggcctacctggagggcacgtgtgtggagtggctcagcagatacctggagctcgggaaggagacactgctgcgctcagatcccccagaggcacatgtgacccttcaccccagacctgaaggtgatgtcaccctgaggtgctgggccctgggcttctaccctgctgacatcaccctgacctggcagttgaatggggaggacctgacccaggacatggagcttgtggagaccaggcctgcaggggatggaaccttccagaagtgggcatctgtggtggtgcctcttgggaaggagcagaattacacatgccgtgtggagcatgaggggctgcctaagccactttcccagagatgggaaccttctccatcgactgactccaacatggaaaccactgtcatttatgtcatccttggagctgtggccatgattggagctgtggccatcataggagctatggtggctgttgtgaggaggaggaagagaaacacaggtgggaaaggaggagactacgcccctgctccaggcagggacagctcccagagctccgatgtgtctctcccagattgtaaagcatgaagacagctgcctggagtggactgagtgacagacgatgtgttcaggtctctcctgtgacatccagagccctcagttctctttagacaccagtgtctgaagttccctgtgattctatggcttcagtgtgaagaactgtggagcccagcctgccctgcacttcaggaccctgtcccttcactgcccgctttcccttccacattcagccttgctggtccagcctgggggtggagggtggggacatctgcatcctgtccccctgtgctaccctgagcttcagcccctcacttccaccctgagaataagaatctgagtgtgaacttgattgttcacatccttgacacaagtgtagatggctttttaaattactggattgagaatacttagaggttttttgttttgggttttgctttgtttgattttgtttttgaaaaaaataaatggcagatggagaagcttccaaaaaaa

SEQ ID NO: 2958 - DNA, 1540 bp, Rattus norvegicus
  Genbank Accession No. M31038
ggatcgcacatgggggcgatggcaccgcgcacgctgctcctgctgctggcggcggtcctggcccccacccagacctgggcgggctcacactcgctgcggtatttccacaccgccgtgtcccggcccggcctcggggagccccggttcatttctgtcggctacgtggacgacacgcagttcgtgcgctacgacagcgacgcggagaatccgagatacgagccgcgggcgcggtggatggagcgggaggggccggagtattgggaggagcagacactggtcgccaagggacaggagctggattaccgagtgagcctgaggaacctgctaagctactacaaccagagcgagggcggctctcacaccatccagaggatgtatggctgtgacgtggggtccgacgggagcctcctccgcgggtatgagcagcacgcctacgacggccgcgattacatcgccctgaacgaagacctgaaaacatgggctgtggcagactttgcagcatggatcacccggagcaagtggcagcggaatggtgctgcagagagaagcagggcctatctggagggcacgtgtgtggagtggctcctcagatacctggagcgcgggaaggagacgctgctgcgctcagatcccccagaggcacatgtgacccttcaccccagacctgaaggtgatgtgaccctgaggtgctgggccctgggcttctaccctgctgacatcaccctgacctggcagttgaatggggaggacctgacccaggacatggagcttgtggagaccaggcctgcaggggatggaaccttccagaagtgggcatctgtggtggtgcctcttgggaaggagcagaattacacatgccgtgtggagcatgaggggctgcctgagcccctttcccagagatgggagccttctccatccaccgactccaacttacttctgttgttcttggagctgtggcagtttttgtagttttggccatcattggagctatggtggttgttgtgaggaggaggaggagaaacacaggcaggtacagctcccagagctccgttgtgtctctcccagattgtgaagcatgaagacagctgcctggagtggactgagtgacagacgatgtgttcaggtctctcctgtgacatccagagccctcagttctctttagacaccagtgtctgaagttccctgtgattctatggcttcagtgtgaagaactgtggagtccagcctgccctacacaccaggaccctgtccctgcactgcctgtgttgcctaccacattcagccttgctggtccagcctgggggtggagggtggggacatctgcatcctgtccccctgtgccaccctgagcttcagcccctcactccacactgagaataagaatctgagtgtgaacttgattgttcacatccttgacacagtgtggatagctttttaaattactggatggaatacttagaggttttttgttttggggttttgctttgtttccttttgtttttgaaaaaataaatggcagatggagaagcttccagaaaaa

SEQ ID NO: 2959 - DNA, 1819 bp, Rattus norvegicus
  Genbank Accession No. M31109
actgtgaacagtaaggattttgatttttaagatgcctgggaagtggatttctgctcttctcctgctacagataagttgctgtttccaatctgggaactgtgggaaggtgttggtgtggccgatggaattcagccactggatgaatataaaaacaatactggatgaacttgtacagaggggccatgaagtcactgttctgaaaccttcggcttactatgttcttgatccgaaaaaatcgccagatcttaagtttgaaactttccctacatctgtcagtaaagatgaactggaaaattatttcataaagcttgtggatgtgtggacttatgagttgcaaagagatacatgtttgtcttattctcctttactacaaaatatgatagatggattttctgattactatctaagtctttgtaaagacaccgtttcaaacaagcagctcatggcaaaactacaggaatccaagtttgatgttcttttgtcagatcctgtggctgcctgtggggagctgatagccgaagtgctccacattccttttctgtacagtcttcgcttctctccaggctacaaaattgaaaagtccagtggaagatttatattacctccatcttatgtaccagtaattttgtcaggaatgggtggcccaatgacattcatagacagggtaaaaaatatgatatgtacgctttattttgacttttggttccatatgtttaatgccaagaaatgggatccattttacagtgagattttgggaaggcccaccaccttagctgagacaatgggcaaagcagaaatgtggctcattagatcctactgggatttggaatttccccacccaacattaccaaatgttgactatattggaggactccaatgcagacctcctaaacccttgcccaaggatatggaagattttgtccagagctctggagagcatggcgtggtggtgttttctctggggtcaatggtcagcagcatgacagaagaaaaggccaatgcaattgcatgggcccttgcccagattccacaaaaggttctttggaaatttgatggcaaaaccccagcaaccttaggacccaataccagagtctacaagtggcttccccagaatgacctccttggtcatccaaaaaccaaagcctttgtaactcatagtggagccaatggtgtctatgaggccatctatcatggaatccctatggttggcattcctatgtttggagaacaacatgataacattgcccacatggtggccaaaggagcagctgttacactgaatatcaggacaatgtcaaagtcagatttgttcaatgcactaaaggaaataataaacaatccattctataaaaaaaatgctgtgtggttgtcaaccattcaccatgaccaacctatgaagcccctggacaaggctgtcttctggattgagtttgtcatgcgccacaaaggggccaagcacctgaggccacttggacatgaccttccctggtaccagtaccactctctggatgtgattggattcctgctcacctgttcggcagtcattgcagtccttactgtaaaatgcttcttgtttatttaccgactctttgtgaagaaggaaaagaaaatgaagaatgagtagagctcatttacaatgcactacaggaatgaaatttcagcctcattctaatttatgaatcaccttcttaacacttcctgattatttttttgtcaaggcagatcatctttgtaagaagacatataactccgtaaatactgatatgttatcaaaaattccatcattcataaattttaatagcacttaatataaaaatat

SEQ ID NO: 2960 - DNA, 1269 bp, Rattus norvegicus
  Genbank Accession No. M31176
ttggaagcagtaagtctgccagaggggccagtgcttaatccagcaagccttagctctatacagccagagcgcaccctcctcctgcgttatcctgcatctggcagaacaagcgaggctgctgctgctgcttggggattgccaggggcaaaggggggttcgtgatacctcgttggagaagacgtctaggatggtagaaagtagtccgatgggactaggagagaaagggcgctgggtcaaggtacactcagcctttcatcactcgctgtagatggatggtttcccggccaggcatctggagcacggctcgctatagggagacgtcagtgtgctcaggtccggggtggaagagcccccggcccctcccgcgcaggcttgctttatataaagtccggggccgcgtggagtcgaagcggcagtggcagagctcctgagaactgtcctcctgtcactgctctgtcgggacaacgcactctcagcctagtggagcgctctgagggcttccctccaggaccatgcgcggctccgagctctcgctcttgctgttggctctggtcctctgccaggctccccgggggccagctgccccggtgtcgacaggcgcaggtggaggcacagtcctggccaagatgtatccgcgcggcagccactgggctgtaggacacttaatggggaagaagagcacagatgagttgccgcccctgtatgcagctgacagagatggcctgaaggagcaactgaggggatacatccgctgggaagaagctgcaaggaatttgcttggcctcctcgaagcctcgaggaacagaagccaccagccacctcaggatcagcctctgggcagtctccagcctacttgggatccagaggatggcagctacttcagtgatgctcaaaatgctaagttggtagactctctgctccaggttctcaaggggaaggaaggaactgccagctgaagggaccatgacaagggcggcttccaaggagcaaaacaaaaccccccagagactgccttctgcaaacattgattctactggaccatcaacaagattccctttgtgcaatttacgtaactattctcatgtcactcaactgcaactaaactcgtgatttttgagcagcatcttctggtttgaacctgtttctgtgaacaactacctaggaagagctttccagtgaacgctttttccagctaggcttttttgctgattggatttggggctcaatctgctaccattcacaataaaaagcttcagtaatcacactgtc

SEQ ID NO: 2961 - DNA, 2280 bp, Rattus norvegicus
  Genbank Accession No. M31178
tgtaaatacagggctgaaagtgggagtggcgctccctcttcctgttatccccttggctcagcctcactgcctgatagaaatgtttctaatatggcacctggtcacagtccattgtagctgaactcccaggtcctgcactgtacaaccctcaccttcccagttcccttaccacctaataaagggcctgcctccggacagcgcccggcccgccgcgcccagctcagcctgctcagccctctggtcccgaggttccgctcagcgctctctcaaactagccgctgcaccatggcagaatcccacctgcagtcatctctgatcacagcctcacagttttttgagatctggcttcatttcgacgctgatggaagtggttacctggaaggaaaggagctgcagaacttgatccaggagcttctgcaggcacgaaagaaggctggattggagctatcacctgagatgaaaacctttgtggatcaatatgggcagagagatgatgggaaaataggaattgtagagttggcccatgtcttacccaccgaagagaatttcctgctgctctttcgatgccagcaactgaagtcctgcgaggaattcatgaagacttggagaaagtatgacactgaccacagtggcttcatagaaacggaggaacttaagaactttcttaaggacctgctagagaaagcaaacaagaccgtggatgatacgaaacttgctgagtacacagacctcatgctgaagctgttcgactcaaataatgatgggaagctggagctgacagagatggccaggttactaccagtgcaggaaaatttccttcttaaattccagggaatcaaaatgtgtgggaaagagttcaataaggcttttgagttatatgatcaggatggcaacggatacatagatgaaaatgagctggatgccttactgaaagacctgtgtgagaaaaacaaacaggaattggatattaacaatatttctacatacaagaagaacataatggccttgtcggatggagggaagctgtaccgaacagatcttgcccttattctctctgctggggacaactagagttggtggccacaaccacttgctagtgatacattgtatctaaaaccataactgtgcgctataaaggagtaggctgtattttcttttatatctgtaaattctactgcatatagagaattatccaggatgtgtggcacattcttttctgcttgtttctatactgtttgtaatgtacagtttttgtaagcatataattgaaaagaagaaagtctatgcttaggccagtcagtataatccattttcaaagatgaatctaacatgattctgctttcataaatacagatgaacacttggatttccctaaaactctaccatctcaacaattctagtgtcagatgtgtaaatgcacagctgtcagtgagtaaaagaataattcatgacaagccaagtgttttttaatttaggcaatcatagaactgtcccacaaagcacttctgtgcgttttccatctagtggaagggatgtgcttctgcttgtgaagcaccaaatgtcaatagttaactatggctttatcataaaacgatctccctagagatttaatttactgatcagtggcatgtctactgcttgaatagataccacactgttggttcaagctggcttggtggcaagggaaggtagccagatgacacataaatctgtctgatactatgcctatatttccaagaagtctattgcagagagtatgaccttagcccattttctaaattattttcatgtgttccagatgacaattattctagtaaactgctgttttgtgtcatattctgtgtgtactctctgattaaattcaatgtacctctgaggcctgtcgcagttgggctccggctcctttgcggagcaccatgtcgcagagggggaggagaccctgcagggcgcctgggtagaactgcacttcagcaatgggaatgggagcagcgttccagcttccgtctctatttataatggtgacatggaaaaaatactgctggatgcgcagatgaatctggacgaagcatctccaagagctctcactgtgacagcccacctcgctcccagacaccacaagataccaacaagagctgaaatagcaccacacgtttggtgagaaaaaacagcatgtgtgtctgaggaagattatattgagagaagaagagaagttgaaagtatcctgaagaaaactcagattggatatgggattggtcaagtcggccagaaaatgttcccccc

SEQ ID NO: 2962 - DNA, 1821 bp, Rattus norvegicus
  Genbank Accession No. M31322
gaattcgttacctcctccatctcagagaaccctgtggatgtccgggtgagctctgaggaaagtgaggagatcccgccgttccaccctttccatcccttcccatccttgtctgagaacgaagacactcagccggagttgtaccacccaatgaaaaaaggatctggaatggcagagcaagatgggggcctgattggtgcagaagaaaaggtgatcaacagtaagaataaaatggatgaaaatatggtcattgacgagactctggatgttaaggaaatgattttcaatgctgagagagttgggggtctggaggaagagccggactctgtggggcctctacgggaggacttcagtttgagcagcagtgcccttattggcttgctggtcatcgcggtggccattgctacagtcatcgtcatcagcctggtgatgctgaggaagaggcaatacggcaccatcagccatggcattgtggaggttcatccaatgctcaccccagaagagcgtcacttgaacaagatgcagaaccacggctatgaaaacccaacctacaaatacctggagcagatgcagatttaaggacagcagcgtgtgcgacaccctggctgaggctgctgcaggtgggctggaagagcctcagcgtttgtgcttgactgctgaccaccagcggtgccagaggcctcatcctacatcctgctctcctggattgttaagactataaagtactactgtaggattgcaatttccattcttttaaatgggtttaaaagatgttaatataacaatatatgatatataaaccttaagtgaaaaaaagatctattgcagatatctgatggatgtagttttctttttttaaattagaaatgccacttctattgtattgtctcacacatgctctatataaatggaaaatgttgatttttcaatgatagactatatacacaggctgttcccgttatgtaagtctgttctttaggctcgtttgctgggctggttttgtcgtcatttgttttaatgtataaaggcagtattccccttttcaggttgctgagaaatgtaagtggaactgaagtacattgtatgcagttactgactgttttaggcatagtctccttggaagcctagagcttccagtgccgggtgtccagtgcctgtcaccaaagcaagggctaagtcaccttgagctagctggatgcaaactagatccactgtgctttccttcaaatccagttcttccacagcaaccagcccatagttgttctgtgttcttccacagctgtttacggtagcctcctagccactctcctcagcaagtgcatccaagagtgcaccacccccttctttggacgtctccgtcccatgcactgaccctctgcttgccttcgtacctcacttcctccaccgctcttcagcccctttgatgtcccctcagagaataccgatatacacatggctaaggacccaggagacttcacgggaggcctcattaggtgaaaggacgatgttctgggctgtacatgaaattggatctgtagacactgtgtttccttcactgacttgtaatgtcacgcagctggagttgatgccacaacccttagtgctttgttgctgttttgtttttcagggttctggtaacctgctactgtttttgttttggttttggtttggttttttttgtatttttctgtgatttccctccccttcccccccatgcctcttcccactatgcacagatggaaactttacctacaaactccttcgtatgatctgtggagaatgtacagaacttattacatcaataaaacactttaacttcccccg

SEQ ID NO: 2963 - DNA, 1000 bp, Rattus norvegicus
  Genbank Accession No. M31363
ctggaatcctaacagcacctacacaaagctatttataatgccagactatacttggtttgaaggaataccttttcatgcctttgggatttcaaaagaaactttgcaaaatgtttgtaataagtttgtggtgaaagacgaagatttgattttattggcttatcccaagtcaggaacgaactggctgattgaaattgtctgcttgattcagaccaagggagatcccaagtggatccaatctgtgaccatctgggatcgctcaccctggatagagactgatgtaggatatgatatattaatcaaaaagaaaggaccacgactcatgacctcccatcttcccatgcatcttttctccaagtctctcttcagttccaaggccaaggtgatctatctcgtcagaaatcccagagatgttcttgtttctggttattatttctggggtaattcaactcttgcgaagaagccagactcactgggaacttatgttgaatggttcctcaaaggaaatgttctatatggatcatggtttgagcacatccgtgcctggctgtccatgcaagaatgggacaacttcttgttactgtactatgaagacatgaaaaaggatacaatgggaaccataaagaagatatgtgacttcctggggaaaaaattagagccagatgagctggatttggtcctcaagtatagttccttccaagtcatgaaagaaaatgacatgtccaattatagcctcctgatgaaaaaatcaatttttactggtactggcctcatgaggaaaggcactgttggggactggaagaatcacttcactgtatcccaagctgaagcctttgataaagtgtttcaggagaaaatggccggtttccctccagggatgttcccatgggaataaaatttcaaaagttttaaatattttatgaacattgatatttatgtttctgttgttctatgtctgaataactgaatgtggtcatcgaataaatcctgttctggtattgtg

SEQ ID NO: 2964 - DNA, 1675 bp, Rattus norvegicus
  Genbank Accession No. M31788
ggcctctctccgggcctctcgacctcacggtgttgccaaaatgtcgctttctaacaagctgactttggacaagctggacgtgaaggggaagcgggtcgtgatgagggtggacttcaatgttcctatgaagaacaaccagataacgaataaccaaaggatcaaggctgctgtcccaagcatcaaattctgcttggacaatggagccaactcggttgtgcttatgagccacctgggccgtcctgatggtgtgcccatgcccgacaagtactccttagagccagttgctgcagaactcaaatctctgctgggcaaggatgttctgttcttgaaggattgtgtgggctcagaagtagagaatgcctgtgccaacccagcggctgggactgtcatcctcctggagaacctccgctttcatgtagaggaagaagggaagggaaaagatgcttctgggaacaaggttaaagctgagccagctaaaattgatgctttccgagcctccctgtccaaacttggagatgtctatgtcaatgatgcttttgggactgcacacagagcccacagttccatggtgggtgtgaatctgccacagaaggctggtggatttttgatgaagaaggagctgaactactttgccaaggctttggagagtccagagcgacccttcctggctatcttgggaggagctaaagttgcagacaagatccagctgatcaataatatgctagacaaagtcaatgagatgatcatcggtgggggaatggcttttaccttccttaaggtgctcaacaacatggagattggcacatctctgtatgatgaagagggagccaagattgtcaaagatctcatgaccaaagctgagaaaaatggtgtgaagattaccttgcctgttgactttgtcactgctgacaaatttgatgagaatgcaaagactggccaagctactgtggcctctggtatacctgctggctggatgggcttggactgtggtactgagagcagtaagaaatatgctgaggctgtggctcgagctaagcagattgtttggaacggccctgttggggtatttgaatgggaagcatttgccaggggaaccaagtccctcatggatgaggtggtgaaagccacgtctaggggctgcatcactatcataggtggtggagacaccgccacttgctgtgccaaatggaacacagaggataaagtcagccatgtgagcactgggggcggcgccagtttggagctcctggaaggtaaagtccttcctggggtggatgctctcagcaatgtttagtattttcctgccttttggttcctgtgcacagcccctaagtcgacttagtgttttccgcatctccatttggtgttagtgcagctagtggccaagacgagcaccaggaacctaagcagcagctgcacagcatctcagctcgtctttactgcatgggattcattatagttaagtccatttaatttcttagtgactaaaccttgcattaaggcatatatttatactctgcctgtgaaaggaagtgagctgtaaaagcttagctctcttcgctgtatgtagcctctggttagcctgtcactgttcatgacagcatggaaataacgatgaggattccagctgtaggtttgggaggttgatgatattgaaccaataaaagatcccact

SEQ ID NO: 2965 - DNA, 1341 bp, Rattus norvegicus
  Genbank Accession No. M32062
ccagcaatttcatctcctagacctcatcagactctgacccagttcttgaatgactttggagacccagatgtttcagaatgcacattctggaagccaatggctactcccaccactgacaatgttgctgctgtttgcttttgcagacaggcagacgggagatcttctgaaggctgtggtgaaacgtgatcccccatggatccaggtgctcaaggacgacactgtgacgctgacgtgcgaagggacccacaatcctggaaactcttctacccagtggttccacaaccagagctccacctggggccaggtccaagccagctacacgtttaaggccacagtcaatgacagtggagaataccggtgccgaatggcgcacaccagcctcagcgaccccatacatctggaagtgatttctgactggctgctgctccagacccctcaactggtgtttgaggaaggggaaaccatcacattaaggtgccatagctggaagaacaaacagctgactaaggtcttgttgttccagaatggaaaacctgtgaggtattattatcaaagcagcaatttttcaatccccaaagccaaccacagtcacagtgggaactactactgcaaagcatatctaggaaggacaatgcatgtgtccaagcctgtcaccatcactgtccaaggttcagcaaccgcgtccaccagctctctagtgtggttccatgccgctttctgcctagtgatgtgcctcctgtttgcagtggacaccggcctgtatttctgtgtacggagaaatcttcaaacctcgggggaggactggaggaaatccctgtcagtcggaaagtacaaggctccacaggacaaatgacatcccatcgtatggctaaacagcggcagcttcttttcagccacaccgccgcttcatctacagccttcctttgaaagcaacttaccaccaggctggatatttggtcctgcaatcacaactgctaggaggctgaggcaggaggatcaccaaaggctgcccgggttttagagaagagagagtgcaagtctatcctggataacccaataagaccctgggtttagatggcttatcaggaaagagcacccattgctaagctcacagacaagaccacagattgatccctaaggacacagggcaaagggggagaacaaattcctgaaagttgtcctctgacctccacacgtccaccatggcagatgcacacaataaacaaattaaaatgtaatatatatattttaaacaagaggtggggaaaggctgggggttggtggcacagtttttatccaggacacatgatgctctggattttgacctcctataataaaacg

SEQ ID NO: 2966 - DNA, 1306 bp, Rattus norvegicus
  Genbank Accession No. M32247
gctccatctcacgggggctcctgcttctggcagccctgtgttgcctggcccccagcttcctggctgaggatgcccaggaaaccgatacctcccagcaggaccagagtccaacctaccgtaagatttcttcaaacctggcagactttgccttcagcctataccgggagctggtccatcaatccaatacatccaacatcttcttctcccctatgagcatcaccacagccttcgccatgctctccctggggagcaagggtgacactcgcaaacagattctagagggcctggagttcaacctcacacagatacctgaggctgacatccacaaggccttccatcacctcctccaaactctcaacaggccagacagtgagctgcagctgaacacaggcaatggcctctttgtcaacaagaatctgaagctggtggagaagtttctggaagaggtcaagaacaattaccactcagaagccttctctgtcaactttgccgactcagaagaggctaagaaagtaattaatgattatgtagagaagggaacccaaggaaagatagttgatttgatgaaacagctggacgaagacacggtttttgccctggtgaattacattttctttaaaggcaagtggaagaggccattcaatcctgagcacactagggatgctgactttcacgtagacaagtccaccacagtgaaggtgcccatgatgaaccgcctgggcatgtttgacatgcactattgcagcacactgtccagctgggtgctgatgatggattacctgggcaacgccactgccatcttcctcctgcccgatgatggcaagatgcagcatctggagcaaactctcaccaaggatctcatttcccggttcctgctaaacaggcaaacaaggtcagccattctctacttccccaaactgtccatctctggaacctataacttgaagacactcctgagctcactgggcatcacccgggtcttcaacaatgatgctgatctctctggaatcacagaggatgcccccctgaagcttagccaggctgtgcataaggctgtgctgaccttagatgagaggggaacagaggctgcaggagccactgtggtggaggccgtccccatgtctctgccccctcaagtgaagttcgaccaccctttcattttcatgatagttgaatcagaaactcagagccccctctttgtgggaaaagtgatagatcccacacgttaatcactgtcctcagaagtcacatcccttctggatcgggtccccttcctaataatattaaactcaggctggcctggcct

SEQ ID NO: 2967 - DNA, 247 bp, Rattus norvegicus
  Genbank Accession No. M32783
ttgtccactccagatacacttcaccatcttgtccttctctctctccaacagaagggtgatacagaatggcgtggtccaggctgatgctggcagcttgcctccttgtgatcccctctgaggttgcagcggactgcctgtccttgtgttccctgtgtgcagtgaggacgcaggatgggccccatcccatcaaccccctggtaggtttcagcaagacttctccatgttattctatttctgagtggagccc

SEQ ID NO: 2968 - DNA, 1804 bp, Rattus norvegicus
  Genbank Accession No. M33114
ctggggccgcaggaagcaccccggggagcggcggcggcgtgtgcgtgtggcccgggtgcgggcggcggcgcgggagcagcgcagagcggcagccggttcgggcgggcggcatcatggacgagaagttgttcaccaaggagctggaccagtggatcgagcagctgaacgagtgcaagcagctctccgagtcccaggtcaagagcctctgcgagaaggctaaagaaatcctgacaaaagaatctaatgttcaggaggttcgatgtccagtcactgtgtgtggagatgtgcatgggcaatttcatgacctcatggaactctttagaattggtggtaaatcaccagatacaaattacttgtttatgggagactatgtggacagaggatattactcagttgaaacagttacactgcttgtagctcttaaggttcgttaccgagagcgtatcaccatactccgagggaatcacgagagcagacagatcacacaagtttatggtttctacgatgagtgtttaaggaaatacggaaatgcaaatgtttggaaatacttcacagacctttttgactaccttcctctcactgccttggtggatgggcagatcttctgtctacatggtggtctttcaccatccatagacacactggatcacatccgagcacttgatcgcctacaagaagttcctcatgagggtccaatgtgtgacttgctgtggtcagatccagatgaccgtggtggctgggggatatctcctcggggagctggttatacctttggccaagatatttctgagacatttaatcatgccaatggcctcacgttggtgtccagagctcaccagctggtgatggagggatataactggtgccatgaccggaatgtagtaacaattttcagtgctccaaactattgctatcgttgtggtaaccaagctgcaatcatggaacttgatgacactcttaagtattctttcttgcagttcgatccagcacctcgtagaggcgagccacatgtcactcgtcgtaccccagactacttcctgtaatgaaagtttaaccttgtacagtattgccatgaacaccgtctgttgacctaatggaatcgggaagagcagcagtaactccaaagtgtcagaaatagttaacattcaaacttgtttccacacggaccaaaagatgtgccatataaaatacaaagcctcttgtcatcaacagccgtgaccactttagaatgaaccagttcattgcatgctgacgcgacattgttggtcaagaatccagtttctggcatagcgctatttgtagttacttttgctttcttgagagactgcagatctaggatgtaacattaacacctgtgagtccagttgacttccacttagctgtagcttactcagcatgactgtagatgaggatagcaaacaatcattggagcttaatgaacatttttaaatgagtaccaaggcctcccctcttgttgtgttctttcagggatactattaatttaattgtatgatttctctgcactcagtttctcccttctcaaatctcggccccgcgttgttctttgttactgtcagaaaacctggtgagttgttttgaacagaactgtctccctcctgtaagatgatgtactgcacaagtcaccgcagtgttttcataataaacttgagaactgagaaagtcaggtttgaattgtatcagtgggcacgactggtgctgtttattaaacaagataaatctattgatcaatttcagaatttgtagaattccaggtaaagaaaaataaagatcaaggccactatat

SEQ ID NO: 2969 - DNA, 18820 bp, Rattus norvegicus
  Genbank Accession No. M33312
gaattctagtacggtagccctggctttcatcaactagttagtgccaaatatttgagaaaagttacaggttcaagctaataaaagttgcagagagtataaaagaatgcagattagacaagaaaaaattaattagagcccttctagccaacaaagcctcagatccaggagaaaagactaccatagaaatggccaaaggcttatttatcaaagaaactgggctcagtggcagcaggatgaccaccttgcctgtgtttattgttgccacagcactgttggataaagatgcaaataaattaactttgggacagaagttgatcatgactgctcctccccctgcccccgcaattctgattgaggctcagtaatgcctacatgcttcattatcacactttactaatcagccctggctgagatattttccagccacctgtttccctgaaccctgcgactcttccacccaaccctgacttgggctgtccacttcatcaattcgatgaggttcaggcccagatacacaataccagaccttacttgaggaactctcatccatcagaaacagagcatacctggttcacggacagaagtagcttcatccataagggtcagaggagaacaggggcagcaataacaacagaaggaaaggtaatctggactcagtctcttccttccaggcacttcaactcaaaagaacaaactaagaacattaacacaagtcctcatcatgggaaaaggactggctgttagcatctgcagggacagccagatatgcatttacaactactcatgtgcacggagccatttacaaggaacaacagctcctaacagcagaaggaaaaactgtcagaaataaagataaaactctacaggacatcaaaaagaaaccaatggctagagataacagtctgactgataaggcttctaagaaggtagccttaaaggaaacagccaacactagattggccattgtcctacctgaaccacctagagtaactgataaatgcagaaaaagaaattaaatgggctggtgatggtcaactgaaggtaagcgaatattgcccacttctcagaaagatccacagtcactcacttgggagtaaaatgaatgacaaactttaaagtttgccagctgaccaacactcacaggaagcccaaacatccaaattcctgactgcgagttaagagacttggagcctactgggaaaattgatttttttcagaaatcaagcaagaaagatatggctcaaaatatctgctgatatttgtagacattttttttcgagatagatggatagatgtactaggagagatctttccgatgtttggagcacctaaggtaacaggatcagacaatgggcctgtcttcatatctcaggtaagtcagggacttgctaagatcttggggactaattggaaactccattgttcatatcatccccagagttcagggcaggtagaaaggatgaatagaactctaaaagagaccttaacagaattagccttggagactggtggggactgggtgaggctctttccctttgccctatattaggtgtacatggcattctagctcccattgtatctagcctacagttggtagctattacagaactgaaaaatgataatttaagatttaaggtcagagctaccaaataggctcatgaatttgtttgggcctaaattatgtaccttctgtgaagcaggcctggttccagaaccacacaagtcaaaagagactgggtctctatgaagagatttcaccaaggtgcgactaaacccatgtgaaaatggcaattcatcatcctgttgatcatgatcaccacctgggtgtacaacaaccacaccagaccagttcctccaatgaagaactctgcctggctccagctgtaccaaaatagagggttcaaaaggacaccaagcccttcaagttaaagttgactcagtctcagtcctgagtctcttgcccctgctaactctatgtctatatatactgtatgtcttagatccccccctgttaggaaggtaccctagctggatccttgataattttacttttatttctgacttttggcccctgtattttaagttgcttagtagtttataagagaattcagtcaagttaattatcttaaggcaacactatctacagctggaagcagggaagcaagcatatgagttagaagactataagcttcaagatcaaagctatgctaaaagaaaaggggggaatgaaaagccagagttggggtcaatctgaggccaatgagaaaaacccaccattaacatccaagcacagaacgacccttctcttccagaaagagtaaagctagtttagttcctggaacagctacaagccaaactgttgaacaaagccacatgtaactccccatccaacctccagaaagtcccagaatggcacactgaccacaagtcattttggaggttacttcaccccactaatagtagtactcttcctagttactgttgtgcaaattctgccccaattgtttgtaaggtatatacagacccagttagagtctgctcagggtcttctctttctgaaagggagtcaaccccgacgcattaaaataaagctagtcttggttttgcattgattagcacctccttgagtctcactcaaggggtcccggaaagggtcagattagacctcatatacctctgagcacagcttgtatggtgactaagatacaggatacccacaggctgggattagagagtttaaaccaaagatctttcatccatgtgctccatgcctgccctgtgcccagggggaaacatggattctaattacagaagcctccctaaggatcttaatgggaaccaagtaggagacttttccagttagaagccttctgacaactggggtttccccatattggtagtttaggttgttatttcacaaaactacaattccttcaccaactggagttctgagttattctcctctagtctggaaaatgatctgctaaaatatagctgtggttttctacccttttcaaagccatacatagacagggaaggttgcccatccttccctgaagttgaagatccttttagaagtcaatgcacccatcagtggtgataaatgcctttaatcccagtatgcagcaaactctgtgagtttgacgccaaattggtctacagagtgtgttctagaacagtcagagctaaagagagaaacactctgtggaaaagaaagaaagaaaaaagaaaggaaggaaagaaggaaggaaggaaggaaggaaggaaggaaggaaggaaggaaggaaaaagaaaggaaggaaggaaaaaggtacagagagagggaaagagggagggagaaaaataacatatatgaagacacagtacaggaccaatctgggctcaggtgcccactttagtctcctactggaattttcatccacttgtaccagaaactcagcacccacagatccttcttgccatgtgaccttccagtccatagtttggaatctttcctgttttccttactaatatttttctcctaataaaaagactaaaccatctagactctaggactccagagatgactctgtgggtaagagcacttgttgctcttgtagaagacccaggttttattcctagaacccacatggtggcttacaaccatgtgtgaccccatttccaaaggattcctctaaatcttttggcatctttggacagtgtgcccaattgttacccagacttaaatggaagagaaaccttcatattacataaaaaattaacacaataagatccataaagaaatatataaaagaagataatcttttttaaaaaggatacattggatacattgccaggcctggagagatggctcagtggttaagagcactgacagctcttccagaggtcctgagttcaaattcccagcaaccacatggtgactcacaattatctgtaatgggattcaatgcccactactggtgtgtctgaagacagtgacagtgtactcatatacatgaaagaaataaatgaatcttgagaacaacatttaatgcctgaagccatgtttcctgtattgttccagtcaaatctaagaatgtgaattctatcacagaccacaacatttacatctatgagggctttcttcatgagctcaaccatacaaatatagatttttagttctagatttgatctggtggacccagaaatggacagcctcctgataatagccacagtccccaatacagcaccaatctcatcatagcatttgaagagtgtattatatgttggcctgttcaccttgtccactaaaaccctcagcttggtccaccaaagcctctttgactgcattgtatcaacacaccaaagcacaccgaggctttaagaattttgaagtaagcctgccacccagaggtcttcctatttgcccatgttgtgggtgttgcaacaaagacagggtcagtgttaggagataggattggagggtaaaagactcaactagacaaacaggagcaaaggccatcctgtgtccctgggagtataaaggtactatctcagccttggctatcagcctgtcaatcctcactggccactatgctggacacaggactgcttctggtggtcatattggcctccctgagcgtcatgctcttggtgtccctctggcagcagaaaatcagggggagattgcctccaggacccactcctttgcctttcattggaaattatctgcagctgaatacaaaagacgtatacagttccatcacacaggtatcactggatgaggggatggatgggacatgggagcacaagaggctgtgatgttttgcatgttttgtggcagaagattcatagaggaatccaaagtcttgtattagtggagtttagaaagataaggagctatttcaagtctttggtttgttgtttgttgtttgttttgtttgttgtttgtttctttgtttctttgttttttcaatcatttatttgtagagtaacacataatctgacctctgtgtactggtccagttcagtgaataagtcatctaacagcccccatctaccccacatcagctcagtgagcgctatggtcctgtgttcaccatccaccttgggcctcgccgggttgtggtgctttatggatacgatgcagtcaaagaggctttggtggaccaagctgaggagttcagtggacgaggcgaacaggctacctacaatacactcttcaaaggctatggtgaggaggataccacattggggaacatgcccaaggacatttgttggcgtcatttaagtagccttcatactaactcatctctccctcaaggctgtacagagttctctgaatttctctccatatccatgttgaatgttggctctcattgtgaccctccctagcatttctgagattgaaaacagacttttgcaaattctgtgggttctttcttccatccttctctaccgttttcttccgccctttctaccacctatcactagataggaaagaaaaggagatagaggtgaaaggggacattactgttagattatttcctgctgattaggagtgacgagctccttagggaaagttttatcttctctgtcaggatatctaatttcttcttgttgttatttctttacataagactacttaacaaatcacaagcaacagcaactaaccaatagccaaaaccaatttctcagggtccttgcatttacacaaccttgaggagtcccagtatcctgagtgtcacacactctcagaaactatctgcagctggcaaaatcataacctcctgctttggacaacctgaaccagccccatatgccatacctgggagtaaacagaaacatatttctataatagttctgtatttttcaaagaaatcaaatttcttactacatctggccattgctgctcttctctctctctctctctctctctctctctctctctctctcacacacacacacacacacacacacacaaacacacacacacaaacacacacacacaaacacacacacacaaacacacacacacacaaacacacacacacaaacacacacacacgcacgcacacacacacaacctctcggcattctcctagatggatgactcctttttaatttagctgatatttttatccttcttaaacatttatccacacacagagcatcagttgcaggtctcaggcattcactcctgatgcctctggattggttttttagattctttgttcttacttttccatctatgggtgctgggctctcaagcacatctctgcacagtgtgtgtgcctggtgcccatggaagcaaaaagatggagtcagatctcctgaactccaggggttccctgagttccagggttatgagctgccaggtgagtgctggggtacaagcacaggtcctctgcaaggtcagccagtgctcttgagtgcagagccagctttgctgccccccactgcctatatttttaaatgctgttttacatactccatgtgttgtccctaagatgtgtataatgcttatagaacgtcacagtctggtaagtgctggccaaagctacagaagtataaaatggccttgaacagcaaaacactggttataagcaagaaaggtcaaaataaagagaaaatccacaaagagccaaatatctttataacattaattctgtagttaaaatttaacacagagagtgtatctcgttccttgaagaactgaaggacacacaaatgactacttctacctagggtcaaaatatagcggtgactacagctcaagacacacaaaaccagagtcaagaatcagggagtggtaataaaataataaaaaatcctggctcagggtttcttcccacctttccctgatgaaaggcacacacagcctttatattttagtctgccttatgcagcacaatagctgggcagctgcctaccctccatgctgttagaatccattttcctattgaaagccccaagttaatactttacaagtttctttataccatatttgctattcttgacccaactgaggagcccttttggccacactgtcttggcccatagcacatggtgtctctccttctaccttctgctctttcttcttccatggcttccacagaggctcctcaatcccattctccttcctcatgctctctagccccagaaaactaagcaccacaagtctcttctcccagctattagctgctgacatctttatttaccaatcagaatgaactgcgggcaggatcactcagacaaactacagactccaaatcttagaggccaacacttactgttataggaaacaataaaagacaaaaacctcaacaccagggtatgtttctgggtaggctgtccttgctttaatggggatttgctgttttcagaaaatgctcaatattgattgattttgccatttccaggaccctttgctgcattctgtctgtaagtctctttttatttgcctggctgacttgtttcaactttctttctctgactgtgtctgatgcacagtctgtgtttgtgtcttttgtgtccttgccatttctatccaactttgtctcttttctttcccccttagaacccctttccagggtgggcctcatccatcctcagcctcagtctacttctcctgaccccttatatttatatctctacaggcgtggcattcagcagtggggagcgggcaaaacaactcaggcgcctctctatagccacattgagagattttggtgtgggcaagcgtggtgtagaggagcgtatcctggaggaggcaggctatttgatcaagatgttgcagggcacttgtggtaagcaagagaccattaagtgtttgggcaagagaaagaacatccctgacacctagaccctatgggttgtggataagaagggcggggaagaccgcctaccaaaccatccccagaatctggtgctgagagattggtgcctcactccaattcccacaccatctgctaactcttctccctcataatgccaatgtcttccaaacaatgtcacccctctcaggagcccccattgaccccaccatctacctgagcaaaacagtctccaatgttattagctccattgtcttcggggaacgcttcgactatgaggacacggagttcctgtcactgctgcagatgatgggtcaaatgaacagatttgcagcttcacccacagggcaggtaacagatccagctctgccaattgtccttatagtgtcccacattgaccataccaacaaagggcaaggaccaccctgactctcatggctacaaacaaaagctcccctcaaaaacagaagctcccctcaaaaccagcctttacttcagaaaactgaacctttacatcagagcccacagaagctatccagtgctcacaatctaatgtcctctggatatctcagtagcctgagaacacagccctctgcttgactctcttccctgggcaggtttctccagcttaacctctaataaatcctctatgtggtcctcctgaaaatttagacaactgcccaagggatacaagtgaccacctctggccccctcctccaatcctgaacacctacctagttctgcaaaactgtggtcagtaaagctattcagtccatacacccagttctccccaaagatcccactgacacaatggcacaaaagtcacctgttgtctcaggtaaattcaggaatgagtagacaggcacctcaaccaaggcaaccaagcacagacctctggatggactgtttccccaaacacccatatgtctcccagctacacacaacccacatcaagacaatatctgacaggtgtgtctcacaccttataacctgaaccaccccaccatgaagacctgactatgtgaaaaaccgattctaatctcaaacaaatatcaagacatctaatcttagccctctcaaatgcccaaacatatagatacttgattcactgcgacactcatgtcctgaatactagaaacctggagtaatggtctgatccaaaaatcagttaaataactgaatgtctactaatgttcccttttgatccagttcattgggattgtaagacaatgaccttcattctttaaatcacctagaaaactgtggtctctggggcctctgacagttcagtggtttaagagcatgcactgctcatcctgaggaccgagttcagttcccactacctatgctgaacatttcaaaactctatgggagtacacctgcaccgtgcacataattaaaagtaaaatattcaaacgaatataaagagttctttcaagagtggaggtgctgtttgttgcaattcatcctaacataaatacatgaacacctggatggatcccttgagactcgacccactcccacgggtgttgccactgacaagccttttcttttctcctcccaccccccagctctatgacatgttccattcagtgatgaagtacctgcctggaccacagcaacagatcatcaaggttactcagaaactggaagacttcatgatagagaaagtgaggcagaaccatagtaccctggaccccaattccccaaggaacttcattgactcctttctcatccgcatgcaagaggtgatcccaatcatggtggatggaatgtctaaaacagggcagctctaaatcatcctagaaaaggaggaggaatataggcccattaagtgcccatgattctcctcacagtcccggttatagttaaacctcactctttcacctgttgagccttatccaagccagggtatgggttagcaaattaccatgacaaccgatattccagtgttcccctatgagacactgttttcagtgttcaactacttagcatgcactgaagctactgtcgaagaccctgtggagcctaaacttcgcaaagagggaaagtgtgcccagacttgcatgctgactttatggagacagaaaactatacagccttgcctctatggctctcaggcttttactattagccacatggtctctagcatttcatatctctgttaggaaatacacatcagtacacatcagtggcctaagacctgggtttttttttcttttgtctgttctagtaatttttttattgtttttcatttttgtgtttttttcttttattggattttttatttctatttcagatattatcccctttcttggtttcccttccagaaacctgctatctcctcatgcttctatgaggattctctcccacccacacaacactccctgccacctccctgtgctgacattcccctacactggggcatcgagcccagacaggaccaagggtctctcctcccattgatacccaacaaggccatcctctgttatacatatggctgaagcaataggtacatccctgtgtactcttgggatggtttagtcactgggagctctggtgggtctggttggttaatattgttgttcttcttatagggtggcaaaccccttcagctccttcagtcctttctctaactcctccatatgggaccattttctcagttcaatggttgactgcaagcatctgcctctgtaattgtcacgctctgcagagcctctcaggagacagctatatgaggatcctgtcaacatatatttcttggcatccacaatattgtgtgagtttagaggatgtcaatgggatgaatccacctgtagggcagtctctgaatggcctttccttcagactctgctccaaactttgtctttgtatttccttctttgagtatttttgttccccctttcaagaaggactgaagcatactcacttgagtctttcttcttcttgagtttcatgtggtctctgaattctatcttgggtattccaagtttttggactaatatttacttctcagtgagtgcataccatgtgttgggttacctcacttaggatgatattttttagttccatccatttgcctaagaatttcatgaagtcattatttttaatagcagtgtagtactccattgtgtaaatttactatattttttgtatatatttctctgttgaagaacatctagtttctttccagcttctggctattataaataaggctgttatgaacatagtggagagtgtgtctttgttatatgttggagcatcttttgagtatatgcccaggaatggtatagctgagtcctcacataatactatgtccaattttctgaggaacctccaggatgatatccagagtggttgtatcaaattacaatccaccaacaatggaggagtgttactctttctccacatccttaccagcatctgttgtcaccttcgtttttgacctttgccattctaactggtgtgaggtggaatctcagagttgttttgatttgcatttccctgatgactaaggaggttgaacatttctttaggtacttctcaaccatattcctaagctgagaattctttgcttagctctttactccatttttaatggggttatttgattctctggagtctaacttcttgagttctttgtatatatttaacattagccctctatcggatgtgggattggtaaagatcttttcccaatctgttggttgtcgatttgtcctaatgacagtgtcctttgccttacagaagctttgcaactttatgaagtagtatttgtcaattcttgatcttagagcataagccattggtgttttgtttaggaaactctccctggtgcccatgtgttcaagaccctttcccactttctgttctattagttccagtgtatctggttttattttagtttaattttatttttcttggataattatgtattacacatcaaatgttattccctttgtcccctctctcatatccccttcccctccctctgcctctatggggatgctaccacccccatccacccactcccacctcaaccccctagcattcccttacattgagaaaaagagccttcactagaccaagggcttttcctcctattgatgctggacaatgccatcctttgctacatatgcagctgaagccacgggtccttccatgggtacgctttggttggtggtttaggccctgggagctctcgtggagtctggttggttagttgatattattcttccatccctaaaatgaatgacagtcacctagacagagaaatgagcaaagcttctcatgcaaacccaagactgctaacacagcctggagatctttttccaacgattggtctggaccctatgagaactagatccaaaggaaattgcagaagtgctgcctattgcatccctctcctccatgaggaacttaatccacagttgacggctgtttagagacgatgaaataatattcctttgcagtgtggctactagtaaattgacctttctcaagtaaagaacccctcgcccatatgcatgcagccacacctaattataagcagttacccacaacacccccaacaaacaggaaaataggaaggagacttattaggaataagaaatggttcaaaaaaatggaaagtagaaaataatagaggggaatacgtttaaagtgcatttcatgtatacgtctgaaaaataaggactcaaggttcagtgggtatggaaggggattcatctgggagggtttggaggaggggtatgaatatattcacaatacaataaatgaaattctcaaagaattaataaaattatttataaaagaattactagaaatgtttcagaaaattaaaacccttaatgttccccaaggatgacaaaatgatagatttatgccctctctctctctctctctctctctctctctctctctctctctctctctctctctgcaggagaaaaatggcaattcagagttccacatgaagaacctagtgatgacaacactaagcctcttctttgctgggtctgagacagtcagctccacactacgctacggcttccttctactcatgaagcatccagatgtggagggtgaggctggctatgtggcagggaagttgggaaccgcagactctccaactgcttacaacctaacaatgaccctcacttctcccaggttcctggatgctcagtcatgctcagctatgcagagacaggggcatattaaatgcataaacacagttctcacaaacttaaaatattagacattcccaaattgatttcactctgacttccagatctctgctctctgttctcttccctgactcctgcttcttctccccaccatgattctgtcacgaaaaggataaaatgaccctgtccagcatttaggtatggatatatgtttaaatggtttaaatgcatgttatttacagagacatgtaatacatgcagtggtacacatgtgaactattccacctgctttgaggcctctggatttttaaaaataccccatctccgcttgtctttcagccaaggtccatgaggaaattgagcaggtgatcggcaggaaccgacagcctcagtatgaggaccacatgaagatgccctacacccaggctgtgatcaatgagatccaaagattttctaacttggctcccttgggcattcctcgaaggattatcaagaacacaaccttccgtggcttcttcctccccaaggtagcagccatgcccatccaggaggggcctccagcccacttactgatgcttcagggcttctttccatctgtagctatctaactccactctaattcctccaaccaaagaattcatccacatgtccccaaattcttgtccagctgctttgaactccattttctatctactcttctgccttgctaccttccaatctctcaactcctgggctagaggcaaaggcctgctgtcacactaacaccctatcttagcacatgatcccctggagctcaaatctccaattgctgatggcacatatcgtagcccctcaaatctcctattccctaatgccttttcctgaggagacctccaactctgtgccttgcagttgtctatatttggacatcctttctccatcaacccatcttctaaaatctcctttcttccctcttccagggcaccgatgtgttccctatattaggttctctgatgacagacccaaagttcttccctagccccaaagacttcgacccccagaacttcctggatgacaagggacagttgaagaaaaatgctgctttcctccctttctccactggtaaggagacagtgggttattgaactactgttcacaccaacatgggtagcacatgccagcttccctgtctgtgatgctgcctagaatcaggctaaccaggtatagcccctgcacctcccaagcaccagacatgctggatgcaggtgagaggatccctgggaccagtgatctgtgtcagagaccggggaggggttgggaataccaactttcctaggtgatgctcatgcaagcaatttcttcacactctttctaatgcagcttttaaataattgtttgtttttctttattttttaagtaatttatttaatgtgcaatggtgtgaggttgtcagatgccttggaactgaacttatagatgattatgagctgccatgtggctgctgagaattgaaccttggatcttcagaagaacagacagtgctcttaaccaatgagccatctcccagccccatcttcagactcttaaaagtgggataacaaccaggtggtataggtgcatgcctttaaccacagtactggtggatatctgagttcaacaccagcctgggactatagagtgagttacaggacaacccaggctacatggaggaaaccatgacttcaaaaactaaaaataaataaataataggtaggtagatagatagatagatagatacatacatacatagatacatagatacatagatacatagatacatagatacatagatacatagatacatagatacatagatacatagatagatgcatagatagatacatagatagatagagacatagatagatgcatagatagatacatagatagatagatgcatagatagatagatacatagatagaaagatgcatgtatacatacatgcatgcatacatagataaatagatgactcataaaaaattaaaagaataaaaaaataaacaaggccacagcagagcatctacatttgagaggataattaataattgatagaggaagcatctgtactccatattgctccagcctaaaatgagttgtcccacgttgtgtgtagggacaccagggttttaagagggttaggagcctttcctaatgatccctcatgctccagtatagcagccccttctccttttttttttctttttttctttattaacttgagtatttcttattaacatttcgagtgttattccctttcccggtttccaggccaacatccccctaatccctccccctccccttctttatgggtgttcccctccccaccctccccccattgccgcgctccccccaacaatcacattcacagggggttcagtcttagcaggaccaaggacttccccttccattggtgctcttactaggctattcattgctacctatgaggttggagtccagggtcagtccatgtatagtctttaggtagtggcttagtccctggaagctctggttggttggcattgttgttcatatggggtttcgagtcccttcaagctcttccagttctttctctgattccttcaacgggggtcctattctcccacccttcccccactgccgccctccccccaacaatcacgttcactggggctgaaccccatttttaatagggttatttgtctccctgcggtctaacttcttgagttctttgtatattttggatataagccctctatctgttgtaggattggtaaagatcttttcccaatctgttggttgccgttttgtcctaaccacagtgtctttgccttacagaagctttgcagttttatgagatcccatttgtcgattcttgatcttagagcataagccattggtgttttgttcaggaaattttctccagtgcccatgtgttcaagatgcttccccactttttttcctattagtttgagtgtatctggtttgatgtggaggtccttgatccacttggacttaagctttgtacagcgtgataagcatggatcaatctgcattcttctacatgttgacctccagttgaaccagcaccatttgctgaaaatgctatcttttttccattgaatggttttggcccctttgtcaaaaatcaagtgaccataggtaggtgggttcatttctgagtcttcaattctattccattgatctatctgtctgtctctgtaccaataccatgcagtttttatcactattgctctgtaatactgcttgagttcagggatagtgattccccctgaagtccttttattgttgaggatagttttagctatcctgggttttttgttattctagatgaatttgcaaattgttctgtctaactctttgaagaattggattggtattttgatggggattgcattgaatctgtagatcgcttttggtaaaatggtcatttttactagattaatcctgccaatccatgaacatgggagatctttccatcttctgaggtcttcttcaatttctttcttcagcgtcttgaagttcttattgtacagatcttttacttgcctggttaaagtcacaccaaggtattttatattatttgggactattatgaagggtatcgtttccctaatttctttctcggcttgtttctcttttgtgtagaggaaggcaactgatttatttgagttaattttatacccagccactttgctgaagttgtttatcagctttagtagttctctggtggaacttttgggatcacttaaatacactatcatgtcatctgcaaatagtgatattttgacttcttcttttccaatctttatccccttgatctccttttgttgtctgattgctctggcttgaacttcaagaactatattgaataagtagggagagagtgcagccccttctctttaagagaacacagctttgcacttggcactgaggcaaggcagcggtgagagcttccttcccaactgtgctccttccctctctcctcttcagggaagcgattctgcttgggagatggcctggctaagatggagctcttcctgctgctcaccactattttacagaacttccgtttcaagttcccaatgaaactagaagacatcaacgagtcccccaaacccttggggtttaccaggatcataccaaagtacaccatgagcttcatgcccatctgattctgagttgaatcaaggtggggcaagagggagagagagcctgaagtggggccagggtgcaggtggagagaacaggggaggtgaagatgagggttaagaagggaccacacccatggaagaaacacaaaagacttctcactttggtaaaattgtaacagtcctaataaaaagaaagaaatactcagtgggcagcagtaacaacaactgagactcatggggcaaaggtggctcacctctgcagaagctgtcctgtccttctctcagtcctctacacaagagcagcatgtccccaagtccaacgtacaggttgcaaagatggaacttacaaatttgaacctaaactgaggtggaaaaaactcaagttagctaggattgatgttttggactctatcaccagcattcaggagggagggaacatggctctctaccatgtctgccaggactacacagtgagagcttatctcaaaagaaaaaagaaaaaaagaaaaaaatttatatatatatatatatatatgtatatatatgtatatatatatatggagagagagagagagagagagagagagagagagagagagagagagagagagagtttgcattgtacatgatcagggaaataataaaaactagtttgacagtcacataccagtgggttctaatttatcaaactccacccccacccccactgccactgctgccctatgaaggaactgaacagaagcttaactttccttgggccatttcgacagctgttgtgtcatcaaggcttctgttttcctatggagacactacacatgggacagagaggataacagggagctcatgactgagagaccttcaggccaaagcacttgaacctttgtttatcctgtttattctgaattttctgcttctgggctctcatttccccaccattaaaatgagaatatcaatatttacagctgcactgcatctctttttggagtgattcctggtaactaagaaataagtagaaaatggaaggatgaaatccaccaggaggtttgagtaaattccactgtgggaaacacaggggactgtgggatggcaaggatgagagctggaaagaatgcaaggccacactatgtctcatgcatattttatatcttttttatattctttatatctttgtagtgtttttattagcctacaaagaaatacatttctcactggcaacttcttacatatatatcactacctatgttctcattcactttccttcgctggtcttggcctcttcgcaaaattattcaccggtaatttattcacactttctaatttttgagcatggtgcattccagtaagatttaatctctgtggccatggtgtttcacagctctgtaacactgaagcacattcatcatcaactgcactgaagtcatcaacttaagaagcaaaggaggattcttctggtctccatctgcgcccagagctaagtctgccccacaaccctccagattcaaaacctccccagacagagctagtcctccaggagtgctctcactactaaggccacaagtgagaccccatttcccttcaataccgatccaaagaggagcccaccagataccaggtaccaaagttaaatgaggatccgttgacctgcaggtc

SEQ ID NO: 2970 - DNA, 2140 bp, Rattus norvegicus
  Genbank Accession No. M33936
aaaccattaaccatgggtttctctgtatttacccctacaagatccctggatggtgtctctgggttcttccaaggggccttcctgctcagtctatttctggtgctgttcaaggcagtccaattctacttacgaaggcaatggctgctcaaggccctcgagaagttcccatccacgccttcccactggctttggggccacgacctgaaggacagagaattccagcaggttcttacgtgggtagagaaattcccaggtgcctgcttacagtggctctcagggagcaaaacacgagtcctgctctatgaccctgactatgtgaaggtggttctgggaagatcagatccaaaggcttctggaatttatcaattccttgctccctggattggttatggtttgctcctgttgaatgggaagaaatggttccagcatcggcggatgttgactccagccttccactatggcatcctcaaaccctatgtcaaaatcatggcggactctgtcaatataatgctagacaaatgggagaagcttgatgaccaggatcaccctctagagatcttccactatgtctccttgatgacactggacactgttatgaagtgtgctttcagccatcagggcagtgttcagttggatgtaaattccaggtcctacaccaaggctgtcgaggatctaaacaacctgactttctttcgtgtgaggagtgccttttatgggaacagcatcatctacaatatgtcctctgatggccgtttgtcccgccgggcctgccagattgctcatgagcacacagatggagtgatcaaaatgaggaaggctcagctgcagaatgaggaagagcttcagaaggccaggaagaagaggcacttggatttcctggacatcctgttgtttgccaaaatggaggatgggaagagcttgtctgatgaggacctgcgtgcagaggtggacacattcatgtttgagggtcatgacaccacagccagtggaatctcctgggttttctatgctctggccacccaccctgagcaccaagagagatgcagagaggaggtgcagagcattctgggtgatggaacctctgtcacatgggaccacctggaccagataccttacaccaccatgtgcatcaaggaggccctgaggctctacccaccagtaccttctgtgagtcgagagctcagctcccctgtcaccttcccagatggacgttccatacccaaaggtatcacaaccacaattttaatttatggccttcatcataacccaagttactggccaaacccaaaggtgtttgacccctctagattctcaccagattctcctcgccatagccatgcttatctgccattctcaggaggagcaaggaactgcattgggaaacagtttgccatgaatgagctgaaggtggctgtggccctgaccctgcttcgctttgagttgctgccagatcccaccaggatcccggtccctatggcaagacttgtgttgaagtccaagaatgggatccacctgcgtctcaagaagctaagataaatctggtggagataggacagctccagaggtctgctgcctgcaatacctgcatttgttactggctaatttatactcattttgctttctctttgattcccatcctctgctgagtgtcccgtcatctcatttttttgccctcatttctgtagcttttcctccagactccatcccagtttgtgcgtggacccatttcccatctgttttcacctctgaccagccactgaacttgccgccagcagcctgtcctccagcctgcttacccctcattatcattggactaacagagaaagatgtattttagagggaaactcttgcactttatctctcttcagttctcagagtcttgggacaatggacatcatgaattaaaatgttcttaaaaatcacatgctgggagaaaattaatcctaaaaattctggcaccagccagaggaaggatgttggctgaaaagaaaagatttctagatatttatgtttgtctcatggtgaaattaatgtatgcctcatcttttctatgaaataataattctgatacagaacagtagagagaaatgaatagtttttgctactttgggccaaactgtaaataaatccatttcacttc

SEQ ID NO: 2971 - DNA, 4127 bp, Rattus norvegicus
  Genbank Accession No. M33962
agccgctgctggggaggttggggctgaggtggtggcgggcgacgggcctcgagacgcggagcgacgcggcctagcgcggcggacggccgagggaactcgggcagtcgtcccgtcccgccatggaaatggagaaggaattcgagcagatcgataaggctgggaactgggcggctatttaccaggatattcgacatgaagccagtgacttcccatgcagaatagcgaaacttcctaagaacaaaaaccggaacaggtaccgagatgtcagcccttttgaccacagtcggattaaattgcatcaggaagataatgactatatcaatgccagcttgataaaaatggaggaagcccagaggagctatatcctcacccagggccctttaccaaacacgtgcgggcacttctgggagatggtgtgggagcagaagagcaggggcgtggtcatgctcaaccgcatcatggagaaaggctcgttaaaatgtgcccagtattggccacagaaagaagaaaaagagatggtcttcgatgacaccaatttgaagctgacactgatctctgaagatgtcaagtcatattacacagtacggcagttggagttggagaacctggctacccaggaggctcgagagatcctgcatttccactacaccacctggcctgactttggagtccctgagtcacctgcctctttcctcaatttcctattcaaagtccgagagtcaggctcactcagcccagagcacggccccattgtggtccactgcagtgctggcattggcaggtcagggaccttctgcctggctgacacctgcctcttactgatggacaagaggaaagacccgtcctctgtggacatcaagaaagtgctgttggagatgcgcaggttccgcatggggctcatccagacggccgaccaactgcgcttctcctacctggctgtgatcgagggtgcaaagttcatcatgggcgactcgtcagtgcaggatcagtggaaggagctttcccatgaagacctggagcctccccctgagcacgtgcccccacctccccggccacccaaacgcacattggagcctcacaatggcaagtgcaaggagctcttctccaaccaccagtgggtgagcgaggagagctgtgaggatgaggacatcctggccagagaggaaagcagagccccctcaattgctgtgcacagcatgagcagtatgagtcaagacactgaagttaggaaacggatggtgggtggaggtcttcaaagtgctcaggcatctgtccccactgaggaagagctgtccccaaccgaggaggaacaaaaggcacacaggccagttcactggaagcccttcctggtcaacgtgtgcatggccacggccctggcgactggcgcgtacctctgttaccgggtatgttttcactgacagactgctgtgaggcatgagcgtggtgggcgctgccactgcccaggttaggatttggtctgcggcgtctaacctggtgtagaagaaacaacagcttacaagcctgtggtggaactggaagggccagccccaggaggggcatctgtgcactgggctttgaaggagcccctggtcccaagaacagagtctaatctcagggccttaacctgttcaggagaagtagaggaaatgccaaatactcttcttgctctcacctcactcctcccctttctctggttcgtttgtttttggaaaaaaaaaaaaaagaattacaacacattgttgtttttaacatttataaaggcaggtttttgttatttttagagaaaacaaaagatgctaggcactggtgagattctcttgtgccctttggcatgtgatcagattcacgatttacgtttatttccgggggagggtcccacctgtcaggactgtaaagttcctgctggcttggtcagcccccccacccccccaccccgagcttgcaggtgccctgctgtgaggagagcagcagcagaggctgcccctggacagaagcccagctctgcttccctcaggtgtccctgcgtttccatcctccttctttgtgaccgccatcttgcagatgacccagtcctcagcaccccacccctgcagatgggtttctccgagggcctgcctcagggtcatcagaggttggctgccagcttagagctggggcttccatttgattggaaagtcattactattctatgtagaagccactccactgaggtgtaaagcaagactcataaaggaggagccttggtgtcatggaagtcactccgcgcgcaggacctgtaacaacctctgaaacactcagtcctgctgcagtgacgtccttgaaggcatcagacagatgatttgcagactgccaagacttgtcctgagccgtgatttttagagtctggactcatgaaacaccgccgagcgcttactgtgcagcctctgatgctggttggctgaggctgcggggaggtggacactgtgggtgcatccagtgcagttgcttttgtgcagttgggtccagcagcacagcccgcactccagcctcagctgcaggccacagtggccatggaggccgccagagcgagctggggtggatgcttgttcacttggagcagccttcccaggacgtgcagctcccttcctgctttgtccttctgcttccttccctggagtagcaagcccacgagcaatcgtgaggggtgtgagggagctgcagaggcatcagagtggcctgcagcggcgtgaggccccttcccctccgacacccccctccagaggagccgctccactgttatttattcactttgcccacagacacccctgagtgagcacaccctgaaactgaccgtgtaaggtgtcagcctgcacccaggaccgtcaggtgcagcaccgggtcagtcctagggttgaggtaggactgacacagccactgtgtggctggtgctggggcaggggcaggagctgagggtcttagaagcaatcttcaggaacagacaacagtggtgacatgtaaagtccctgtggctactgatgacatgtgtaggatgaaggctggcctttctcccatgactttctagatcccgttccccgtctgctttccctgtgagttagaaaacacacaggctcctgtcctggtggtgccgtgtgcttgacatgggaaacttagatgcctgctcactggcgggcacctcggcatcgccaccactcagagtgagagcagtgctgtccagtgccgaggccgcctgactcccggcaggactcttcaggctctggcctgccccagcacaccccgctggatctcagacattccacacccacacctcattccctggacacttgggcaagcaggcccgcccttccacctctggggtcagcccctccattccgagttcacactgctctggagcaggccaggaccggaagcaaggcagctggtgaggagcaccctcctgggaacagtgtaggtgacagtcctgagagtcagcttgctagcgctgctggcaccagtcaccttgctcagaagtgtgtggctcttgaggctgaagagactgatgatggtgctcatgactcttctgtgaggggaacttgaccttcacattgggtggctttttttaaaataagcgaaggcagctggaactccagtctgcctcttgccagcacttcacattttgcctttcacccagagaagccagcacagagccactggggaaggcgatggccttgcctgcacaggctgaggagatggctcagccggcgtccaggctgtgtctggagcagggggtgcacagcagcctcacaggtgggggcctcagagcaggcgctgccctgtcccctgccccgctggaggcagcaaagctgctgcatgccttaagtcaatacttactcagcagggcgctctcgttctctctctctctctctctctctctctctctctctctctctctctctctaaatggccatagaataaaccattttacaaaaataaaagccaacaacaaagtgctctggaatagcacctttgcaggagcggggggtgtctcagggtcttctgtgacctcaccgaactgtccgactgcaccgtttccaacttgtgtctcactaatgggtctgcattagttgcaacaataaatgtttttaaagaac

SEQ ID NO: 2972 - DNA, 1765 bp, Rattus norvegicus
  Genbank Accession No. M34007
atgggattgtgtgcaccccttcgaggactctcaggactgctgctcctgctgtgtgccctgccctgggctgaaggtggaaaggtgctggtgtttcccatggagggcagccactggctgagcatgagggatgtcgtgagggagctccacgcccgaggtcaccaggctgtggtcctggctccagaggtgactgtgcacatgaaaggagaggacttcttcaccctccaaacctatgcctttccatataccaaggaagaatatcagcgggaaatactgggcaacgctaagaagggcttcgaaccacaacattttgtgaagactttctttgaaactatggcatctataaaaaagtttttcgatctctacgcaaattcttgtgcagctctattgcacaataagaccctgatccagcaactgaattccagttccttcgatgtggtcttaacagaccctgttttcccctgtggagcattactggccaagtatctacagattcctgctgtgttttttctgcgctctgttccctgtggcatagactatgaggctacacaatgtccgaaaccttcctcttatattccgaacctactcacaatgctttctgaccacatgaccttcctgcaaagggtcaagaacatgctgtaccctctgaccttgaagtacatttgccatttatcaatcactccctatgaaagcctggcctctgagcttttgcagagagaaatgtctttagtggaggttctcagtcatgcatctgtgtggctgttccgaggggactttgtgtttgactacccgaggcccatcatgcctaatatggtcttcattggaggcataaactgtgtcatcaagaagcccctctctcaggaatttgaagcctatgtcaacgcctccggagaacatggcatcgtggttttctctttgggatccatggtctcagagattccagagaagaaagcgatggaaatcgctgaggctttgggcagaattcctcagacgctcctgtggcgctacaccggaactagaccatcgaaccttgcaaagaacactattcttgtcaaatggctaccccaaaacgatctgcttggtcatccaaaggctcgggcgttcatcacacactccggttcccatggtatttatgaaggaatatgcaatggggttccaatggtgatgatgcccttgtttggtgatcagatggacaacgccaagcgcatggaaactcggggagctggggtgaccctgaatgtcctggaaatgactgccgatgatttggaaaacgcccttaaaactgtcatcaataacaagagttacaaggagaacatcatgcgcctctccagccttcacaaggaccgtcctatcgagcctctggacctggctgtgttctgggtggagtacgtgatgaggcacaagggggcgccacacctgcgccccgccgcccacgacctcacctggtaccagtaccactccttggacgtgattggctttctcctggccatcgtgttgacggtggtcttcattgtctataaaagttgtgcctatggctgccggaaatgctttgggggaaagggtcgagtgaagaaatcacacaaatccaagacccactgagaagtggcaggaagtgaaggagaagtattagtcccttatccaatcagttgaaacttggaaacaagtgttaaatccatgttgcttttattagggaaataattcaccatacactatacacccagaacatttttttttctttttctttttttcggagctggggaccgaaccc

SEQ ID NO: 2973 - DNA, 2078 bp, Rattus norvegicus
  Genbank Accession No. M34253
ctcgacgaaggagtaggacgagctctcactgtctgagccaaaccgaaccgggccgagctgagccgaggtcagcggtggccagaggaacccagcatctcgggcatcattcgctccgtgcacgcatcgtgtacctacaccgcaactccgtgcctcattcccgggtaccctctgtgactcgctcctgcagcaaagccaccatgcctatcactcggatgcgaatgagaccctggctagagatgcagattaattccaaccaaattccagggctgagctggatcaataaagaagagatgatcttccagatcccatggaagcatgctgccttgcacggttgggatatcaacaaggatgcctgtctgttccggagctgggccattcacacaggccgatacaaagctggggaaaaagagccagatcccaagacttggaaggcaaacttccggtgtgccatgaactccctaccagacatcgaggaagtgaaggaccagagcaggaacaagggcagctctgctgtacgcgtgtaccggatgctgccacccctcaccaagaaccagaggaaagagagaaagtccaagtccagccgtgacactaagagcaaaaccaagaggaagctgtgcggagattctagccctgacaccttatctgacggactgagcagctctactctgcctgatgaccacagcagttacacagctcagggatacctgggtcaggacttggacatggacagggacattaccccagctctgtcaccgtgcgtcgtcagcagcagtctctctgagtggcatatgcagatggacatcatgccagacagcaccactgatctgtacaacttgcaggtgtcgcccatgccctccacctctgaagctgcaacagatgaggatgaggaagggaagttacctgaggacatcatgaagctctttgaacagtctgagtggcagccgacgcacgtggatggcaagggatacttgctcaatgaaccaggagcccaactctctactgtctatggagacttcagctgcaaggaggaaccagagatcgacagccctggaggggacatcgagataggcatacagcgtgtcttcacagagatgaagaatatggaccccgtcatgtggatggacaccctgctgggcaactctaccaggccgccctccattcaggctattccttgtgcaccataatttgggtccctgacccgttcttgccctcctgagtgagctaggtccagcatcatggtggctgtgatacaacataaagctaaacttccgtggaccccttgatgtggcaaaacataatcccattgccaagcagggaagggaccaaaccatcctccttgggtcagtggactgactcttcagagcttaggaggcagggtctaagtttttcaagctggtcctgactcctaggaagatggattggcgttctgaggttagtgtgaggcagaggacctggacggaagttaccttctagctctttgaaagcttcattgcttagagagggtctcaccactgggctggcctgggggatagaccagcgcccacagaagagcattgcactggccttagggctggctccacactgggagacaattgcactaagtcctattcccaaagaactgctgcccttcccaaccgagccctgggatggttctagagccagtgaaatgtgaaggaaaaaatggggtcctgtgagggttgtctcccttagcctcagagggattctgcctcactccctgctccagctgtggggctcaggaaaaaaaaatggcactttctctgtggactttgccacatttctgatcagaagtgtacactaacatttctcccaagtcttggcctttgcatttatttatatagtgccttgccctgtgcctgctgtctctcctcaggcctcagcagtcctcagcaggcccagggagggggttgtgagcgccttggcgtgactctgaacattggaaacgccacctaactactaagttgtgtctgatctcgtgtggatctgtgtaaatatgtatattcatctttttataaaaacctaagttgtttaaaaaaaaaaaaaaaaaaaaaaaaaaaaaa

SEQ ID NO: 2974 - DNA, 451 bp, Rattus norvegicus
  Genbank Accession No. M34331
tcctctttctctcgaaccgggcggcctcatccgcgaacagcgcagcaatggccaagattaaggctcgggacctgcgcggcaagaagaaggaggagctgttgaaacaactggatgatctgaaggtggaactgtcccagcttcgcgtggccaaagtgacaggcggcgccgcgtccaagctctccaagatacgagtcgtacgcaaatccatcgcccgtgtcctcactgtcattaatcagactcaaaaggaaaacctcaggaaattctacaagggaaagaagtacaagcccctggacctgcgacccaagaagacaagagccatgcgccgccggctcaccaagcatgaagagaagctgaagaccaagaagcagcagcggaaggagcggctgtacccactgcgcaagtacgcagtcaaggcctgagacgacgacaataacaataaagtccaaaactg

SEQ ID NO: 2975 - DNA, 1574 bp, Rattus norvegicus
  Genbank Accession No. M34452
tgagccaatcttcaaggaatatggtgtgttctttgccaatggggaacgctggaaggcccttcggcgattctctctggctaccatgagagactttgggatgggaaagaggagtgtggaagaacggattcaggaggaagcccaatgtttggtggaggaactgcggaaatcccagggagccccactggatcccaccttcctcttccagtgcatcacagccaacatcatctgctccattgtgtttggagagcgctttgactacacagaccgccagttcctgcgcctgttggagctgttctaccggaccttttccctcctaagttcattctccagccaggtgtttgagttcttctctgggttcctgaaatactttcctggtgcccacagacaaatctccaaaaacctccaggaaatcctcgattacattggccatattgtggagaagcacagggccaccttagaccccagcgctccacgagacttcatcgacacttaccttctgcgcatggagaaagtgagtcctgcatggatgagagaggagaagtcgaaccaccacacagagttccatcatgagaacctcatgatctccctgctctctctcttctttgctggcactgagaccggcagcaccacactccgctatggtttcctgctcatgctcaagtacccccatgtcacagagaaagtccaaaaggagattgatcaggtgattggctctcacaggccaccatcccttgatgatcgtaccaaaatgccatacactgatgcagtcatccacgagattcagagatttgcagatcttgccccaattggtttaccacacagagtcaccaaagacaccatgttccgagggtacctgctccccaagaacactgaggtgtatcccatcctgagttcagctctccatgacccacagtactttgaccatccagacaccttcaatcctgagcacttcctggatgccgatgggacactgaaaaagagtgaagcttttatgcccttctccacaggaaagcgcatttgtcttggcgaaggcattgcccgaaatgaattgttcctcttcttcaccaccatcctccagaacttctctgtgtcaagccatttggctcccaaggacattgacctcacgcccaaggagagtggcattgcaaaaatacctccaacataccagatctgcttctcagctcggtgatcgggctgaggcagccaggtgccccagttctgttgggaatggcctcatgtttctgcctctgggggacctgctgaaaaccaggctcaaggccactgctcacatcttcctattgcagttctccaaagtcccaaggcttgttcttattcctgtgaatggcactgaagaagtcaatcgactgtcttattttgacatgtgaacagagatttcatgagtacacatctcatgctgagtcacttccctcttcctcctaatagcccacgtccccacttatcagccctccatggtctgtgatctgtgctaatggactctgtatatggtctcagtgctatgtctacagacttacatagtatgtatggttcaggtaaacagaatcacagagtgtgtg

SEQ ID NO: 2976 - DNA, 1595 bp, Rattus norvegicus
  Genbank Accession No. M35270
aggacaaacatcgatcagggtcaaattgacaataaaagggctggagcaagcaacagggactcaccaaccaggcctcgcctctgagttcagcccagagctagctgggaaatgttccggatgttggccaaggccagtgtgacgctgggctccagggcagcaagttgggtacggaacatgggctcgcaccagctgctggtgccacccccagaggccctgagcaagcccctgtcaattcctaagaggctcctgttgggtccgggaccctccaacctggctcctcgtgtgctagcagctggaagtctgaggatgattggccacatgcaaaaagagatgtttcagatcatggatgagatcaagcagggcatccagtatgtgttccagaccaggaaccccctcacactggttgtcagcggctcaggacattgtgccatggagactgccctgttcaacctcctggagcctggggactcctttcttgtgggaaccaatggcatctgggggatacgggctgcagagatcgctgagcggattggagcccgtgtgcaccagatgatcaagaagcctggagaacattacacactgcaggaggtggaggagggcctggctcagcataaaccagtgttgctgttcctgacccacggggagtcatccactggtgtgctgcagcccctggatggtttcggggagctctgccacaggtatcagtgcctactcctggtggactcggtggcatcattgggcggagtccctatctacatggaccaacaaggcatcgacatcttgtactctggctctcagaaggtcctgaatgccccaccagggatctccctcatctccttcaacgacaaggccaaatccaaagtctactcccggaagacaaagccagtctccttctacacagacatcacttatttgtccaagttgtggggctgtgagggcaagaccagagtaattcatcatacgttgcctgtcatcagcttatactgcctgagggagagcctagcactcatttcagagcagggcctggagaattcctggcggcgtcacagggaggctacagcacatctgcacaagtgcctgcgggagttgggcttaaagttctttgtgaaggacccggaaatccggctacctacaatcaccaccgtgaccgtgcctgccggctacaactggagggacatcgtcagctacgtgctggaccacttcaacattgaaatctctggtggtcttgggccctctgaggataaggtgctgcggattggcctcctgggctacaacgccaccacagagaatgcggaccgtgtagcggaggccctgagggaggccctgcaacattgtcctaagaataaattgtgagcatcgtctcaccagactgtgccctcctggaggggctgggaatatagcaggaacgagaagactgtgcaagccctccagccagcaaaggctgccgatgtaaccaggcgggaagggtcagggcgaagctgcccctctccccacagatggagccctgtggtcacatgatgctaatcaccttccgatgaagctgcattctgcaggccactggacttcgggaatattcaataaagtacttgccagac

SEQ ID NO: 2977 - DNA, 1552 bp, Rattus norvegicus
  Genbank Accession No. M35495
tcagttctgtaattaattaactaacgtggatcaaatgagaaggtgaaagttcacacaggagcactcctgtcgtcttggactgggtctccatcccaccatccagtgccctggtctacgaagagtccacagggaccttgtgaagaatcaacaaggcggggtccagaggagtcacgtgtgccttccactccgggtcgccctgtcaggatggggatgtcccagcccggggtcctcctcagcctcttattggtcctcctgcctcagacctggggagcggagccccgtctcccactgatgtatcatcttgcagctgtgtctgacttatcaacggggcttccctctttctgggccacgggctggctgggtgctcagcaatatctgacctacaacaacctgcggcaggaggctgacccctgtggggcctggatatgggaaaaccaggtgtcttggtattgggagaaggagaccacggatctgaaaagcaaagaacagctcttcttggaggccatcaggaccctggagaaccaaataaatgggaccttcacactgcagggcctgctgggctgtgaactggcccctgataattcttcattgcccacggctgtgtttgccctcaatggtgaggagttcatgcggttcaacccaagaacgggcaactggagtggggagtggccggagacagatatcgttggtaatctgtggatgaagcaacctgaggcggccaggaaggagagcgagttcctgctaacttcttgtcctgagcggctgctaggccacctggagaggggccgtcagaacctggagtggaaggagccgccatctatgcgcctgaaggcccgtcctggcaactctggctcctcagtactgacctgtgctgctttctccttctacccgccggagctcaagtttcgattcctgcgcaatgggctagcctcaggctctgggaattgcagcactggtcccaatggtgatggatctttccatgcatggtcattgctagaggtcaaacgtggagatgaacaccattaccaatgtcaagtggagcatgaggggctggcccagcctctcactgtggacctagattcgcccgccagatcttctgtgcctgtggtcggaatcattcttggtttattgctggtggtagtggccatcgcagggggtgtgctgctatggaacaggatgcgaagtgggctgccagccccatggctttctctcagtggtgatgactctggcgacctattgcctggtgggaacttgcccccggaggctgaacctcaaggtgtaaatgcctttccggccacttcctgatgccaacccaggccccatacccattgcagcctgtggggctgtgtgacctcctgaactgtctctgagcctcccgagggagccctgggctggatgtcctcctcgtggatcccttcttttgtggcctgcttcagtttcccctcttaatgtcaatggctatttccatctccacataaatttgggcccaaatctgtgtgtgcatcgttattctcaggtttcaggcagccggaataaattgaacaagtttgag

SEQ ID NO: 2978 - DNA, 511 bp, Rattus norvegicus
  Genbank Accession No. M35601
  misc_feature (1)..(511): n = a or c or g or t
cctgaacttggttccttttatgacagccgctttggttcactcacaaagaacttcaaagaatttggcagtaagacctctgattctgacatcttcacagacatcgagaaccctagctcccatgtacctgagttttcttncagtagtaaaacctcaactgtcaggaaacaagtaaccaagagctataaaatggcagatgaggcagcaagtgaagctcaccaagaaggagacactcgaaccaccaagaggggccgagctcgcacaatgagaggtatccacgcttaactctgggaagttgccctgaccccctagactaagttaaccatttctgcaaagtgcttaccaggcgcgctctttcttaacctcttctagtgctttggtggaatctcattttttttcatgctagactgtacgttccttgggggcagggactttgccatgtgtctatttctctaattccccaatgcataacagtgcagtcatttctcaataaatatattttaaataaatgaac

SEQ ID NO: 2979 - DNA, 1157 bp, Rattus norvegicus
  Genbank Accession No. M36410
ggcaggctaggttgcgctgtctgcgtgctgaccggggcttcccggggcttcggccgcgccctggccccgcagctggccgggttgctgtcgcccggttcggtgttgcttctaagcgcacgcagtgactcgatgctgcggcaactgaaggaggagctctgtacgcagcagccgggcctgcaagtggtgctggcagccgccgatttgggcaccgagtccggcgtgcaacagttgctgagcgcggtgcgcgagctccctaggcccgagaggctgcagcgcctcctgctcatcaacaatgcaggcactcttggggatgtttccaaaggcttcctgaacatcaatgacctagctgaggtgaacaactactgggccctgaacctaacctccatgctctgcttgaccaccggcaccttgaatgccttctccaatagccctggcctgagcaagactgtagttaacatctcatctctgtgtgccctgcagcctttcaagggctggggactctactgtgcagggaaggctgcccgagacatgttataccaggtcctggctgttgaggaacccagtgtgagggtgctgagctatgccccaggtcccctggacaccaacatgcagcagttggcccgggaaacctccatggacccagagttgaggagcagactgcagaagttgaattctgagggggagctggtggactgtgggacttcagcccagaaactgctgagcttgctgcaaagggacaccttccaatctggagcccacgtggacttctatgacatttaagcccatgtcctgtcacagcgccccccccccccagccctgcctaacacacatacaagccctccaacccagccagcgggagccacgggcactgccagtcctgagaaggcttctgcagaggctcgggagagagctgatgtgtactggagtcctctgtccccaggaagagaacttagggctgggagagcaggagaagcagaaacactgagcagatgaggcagagtctctcgtctgtggtcgttctcaggtgaagagggcggggtctgattcacagagaggaccgagggtattgaatctttgttgtactgccttcatcctggggtattcactggtcctccctcgactctggtcaaatacatggttatggcagatgccctaga

SEQ ID NO: 2980 - DNA, 1561 bp, Rattus norvegicus
  Genbank Accession No. M36453
ggacactagaatgctgtgttgttagaggagtggagagaggaagatgtgctaagtgtagcagtacacacctataatcctagcacttgagaggttgaaggcaggaggatgagacattcaggtcattcttagctacatgaagagtttaaggccagcacggattacaggatatctgtttctggggaaaaaggaggggaagagagagaggaaagggcaaagggcagagtgtgggctccctgtcgtcagggcaagagaactatggtgatccagccgtctctgctgctccttttgctgttgactctacaggatgtggacagctgccaggggccagaacttgtccgggagcttgtcctggccaaagtgaaggcactattcctagatgccttggggcccccagcaatggatggggaaggtgggggtcctggaataaggcggctgcctcgaagacatgcccttgggggcttcatgcacaggacctctgaaccagaggaggaggatgtctcccaggccatccttttcccagccacaggtgccacctgtgaggatcaggcagctgctggagggcttgcccaggagcctgaggaaggtctcttcacttatgtattccggccatcccaacacatacgcagccaccaggtgacttcagcccagctgtggttccacacggggctcgacaggaagagcacagcagcctccaatagctctaggcccctgctagatcttctggtgctgtcatctggggggcccatggctgtgcctgtgtccttgggacagagccccccacgctgggctgtcctgcacctggcggcctccgctttccctctgttgacccaccccatcctcgtgttgctgctgcggtgcccactctgttcttgctcaggccggcctgagaccactcctttcctggtggcccacactagggctcgagcccccagtgcgggggagagggctcgacgttcagctccctcgatgccttggccttggtctcctgcagccttgcgtttgctgcagaggcctccagaggaaccctctgcccatgccttctgccatcgagctgccctcaacatctccttccaggagctgggctgggaccgctggatcgtacaccctcccagcttcattttccactactgccatggtagctgcgggatgcccacatctgatctgcccctgccagtccctggggctccccctaccccggctcagcccctgtttttggtgccaggggccaagccctgctgtgcagctctaccagggagcatgaggtccctacgcgtccgaaccacctcagatggaggctactctttcaagtatgagatggtaccgaacctcattacacaacactgtgcttgtatctaaaagcacctcgtctcctcctccacagccactggccaccatcacctcaccatcccacggtcggtcggtcggtcggtcgtcagctaggaggaaggtgggtgtggaaagtagacagtttccacttccttttcccttcatctttctgtctgaggcttccacaccccactccacccaggtcctgtggataacaataaagaaggaagtgtgt

SEQ ID NO: 2981 - DNA, 1495 bp, Rattus norvegicus
  Genbank Accession No. M36708
caatccaagacaagatgtccagcaagggctctgtggttctggcctacagtggtggtctggacacctcctgcatcctcgtgtggctgaaggaacaaggctatgatgtcatcgcctacctggccaacattggccagaaggaagactttgaggaagccaggaagaaggcactgaagcttggggccaaaaaggtgttcattgaggatgtaagcaaggagtttgtggaagagttcatctggcctgctgtccagtccagtgcactctatgaggaccgctatctcctaggcacctctctcgccaggccttgcatagctcgcaaacaagtggaaattgcccagcgcgaaggggccaagtatgtgtctcacggcgccacggggaagggcaatgaccaggtccgctttgagctcacctgctactcgttagcaccccagattaaggtcatcgccccctggaggatgcccgagttttacaaccggttcaagggccgaaatgatttgatggaatacgcaaagcaacatggaatccccatccctgtcacccccaagagcccctggagcatggatgagaaccttatgcacatcagctacgaggctggaatcctggaaaaccccaagaaccaagcacctccaggtctctacacaaaaactcaggaccctgccaaagcacccaacaccccagatgtccttgagatagaattcaaaaaaggggtccctgtgaaggtgaccaacgtcaaagatggcactacccacagcacatccttggacctcttcatgtacctgaatgaagttgcgggcaagcatggagtagggcgcattgacatcgtggagaaccgcttcattggaatgaagtcccggggtatctacgagaccccagcagggaccatcctttaccacgctcatttagacatagaggccttcaccatggatcgggaagtacgcaaaatcaagcagggcctgggcctcaaattcgcagagctcgtatacaccggtttctggcacagccctgaatgtgaatttgttcgccactgcatcgacaagtcccaggaacgggtggaaggaaaggtgcaggtatctgtcttcaagggccaggtgtacatccttggccgggagtctccactttcactatacaatgaagagctggtgagcatgaacgtacagggtgactatgaacccattgatgccaccggcttcatcaatatcaactcgctcaggctgaaggagtaccatcgccttcagagcaaggtcaccgccaaatagaccgtgacaaagaggccgggcctccccgctctgcagctctcccaggctccagcattaattgttgtgataaatttgtaattgtagcttgttctcctaccacctgactggggctgctgtgccccccctcacctcccccccacccacaggctttgttccctggtcccctatagcctacaaaagtggtcatcgaagggaagggggggtggcaggcagctgcagaaagcgcgtaaaatgacaattaa

SEQ ID NO: 2982 - DNA, 1957 bp, Rattus norvegicus
  Genbank Accession No. M37828
gggcatgagtggctcggctctgagcttcaccatattcccaggaagtatccttgggttcctccaaatagccactgtgctcactgtgctcctgctgctcctcaagacagcccagttctacctgcacaggcgatggttactcagagctacccagcagttcccatccccaccttctcactggttctttgggcataagatcccaaaggaccaggattttcaagatattctaacacgggtaaagaatttcccaagtgcctgtccacagtggctctgggggagcaatgtgcgaatccaagtgtatgaccctgaatacatgaagctgattctggggagatcagacccaaaagctcatggttcctacagatttctagctccctggattgggtatggtttgcttctgctgaatggacagacatggttccagcaccgacgaatgttgactccagctttccactatgacactctgaaaccttatgtgggcatcatggcagactctgttcgcataatgctggataaatgggaacagattgttggacaggattccaccctggagatcttccaacacatcaccttgatgaccttggacaccatcatgaagtgtgccttcagccaagagggcagtgtccagttggacagaaaatacaagtcctacatcaaggcagttgaggacctgaacaatctcttttttttccgtgtacagaacatgtttcatcagaatgacttcatctatagtctgtcctctaatggccgcaaggcccacaatgcctggcaacttgcccatgattacacagaccaagtgatcaaatcaaggaaggctcaacttcaggacgaggaagagttgcaaaaggttaagcagaaaagacgattggatttcctggacatccttctgtttgccagaatagaaaatggaagcagcttatctgataaggacctgcgtgctgaagtggataccttcatgttcgagggccatgacaccacagctagcggtatctcttggatcttctatgctttggccacaaatcctgaacaccagcagggatgcaggaaggagatccagagtctcctaggagatggagcttctatcacctgggacgacctggacaagatgccctacaccaccatgtgcatcaaggaagctctgaggatctacccacctgtaacagctgtgagcagaatgctcagcacacctgtcaccttcccggatggacgctctttacccaaaggtatcacagtcatgctctccttctatggccttcatcacaacccaactgtgtggccaaatccagaggtgtttgacccttatcgatttgcaccagagtcttcccgacacagccactcattcctgcccttctcaggaggagcaaggaactgcattgggaaacagtttgccatgaatgaactgaaggtggccgtggccctgaccctgctccgctttgagctgctgccagatcccaccaggatcccaatccccataccaagactcgtgttgaagtccaagaatgggatctacctgcgtctcaaaaagctccaataatcttgacagcacaagacagctccaacagcatgctgtctgccatttgtctttctgtcagtcactcttgtccccactccatctgctcacatctcattctttcttctcaccttgttcacctccacccaccttctgctgtgcttctggtctccttgtctgtcagtctttctatctcgacttctggaatttctacctgcttttctctctacctggcccctacctgacttcatgtttgaccttgaccttaatgatctccctaaattacaccctgccttctcttctgcatatttccttctattctactgtttgtctgtgcttaaattgagctttataccaatgtcataattgattacaatagaagtattgccctatgattcgatataccaggtgtttttcatgatttcattagaataaagctcaggtcattgc

SEQ ID NO: 2983 - DNA, 680 bp, Rattus norvegicus
  Genbank Accession No. M54926
tccaccatgattaagggtctctatggaatcaaggaggatgtcttcctcagcgtcccatgtatcctgggacaaaatggaatctcagatgttgtgaaggtgacactgactcctgacgaggaggcccgcctgaagaagagtgcagataccctcgggggaactcagaaggagctgcagttctaaagtctttcccagtgtcctagcacttcactgtccaggctgcagcagggtttctatggagaccacgcacttctcatctgagctgtggttggtccagttgtgttgaggtggtctgggggaaatctcagttccacagctctaccctgctaagtgctacttgtgtactggtaacctggttagtgtcacaatcccactgtctccaagacacactgccaactgcatgcagctttgattaccctgtgagcctgctgcattgctccgcaccctcaccaaacatgctaggccatgagttcccagttagttataagctggctccagtgtgtaagtccatcgtgcatatcttgtgcataaatgttctacaggatattttctgtattatatgtgtctgtagtgtacattgcaatattatgtgaaatgtaagatctgcatatggatgatggaaccaaccactcaagtgtcatgccaaggaaaacaccaaataaaccttgaacagtgagtgattg

SEQ ID NO: 2984 - DNA, 1247 bp, Rattus norvegicus
  Genbank Accession No. M55534
aagaacattttctgtctttttaatgtcagggtcttctgaacctagatcaactcggggttccagtcagacacctagttctgacatcttggtggtcacagctctcctctgggactccacaaagagttaatgtccctggggctcagcccaggaagattccagcctctgcccaggcccaagatagttgctggctcaattcccctggcatgcaagactggagaggaggaggggcccaccagcagctgcttgggattccagaccctgtcctggctccagagaacaaggatggggtgggtgggtgccactaggtgtggacagagagctagtgaaacaagaccgtgacaagtcaccggccagctcagccctgccccgtgtttctcttttcttagctcagtgagtactgggtatgtgtcaccctgccaaatccctgatcacaagtccccatgaactgtcggggagctgggataataaaacccctgacatcaccgttccagaagcttcacaagactgcatatataaggggcaggctgtagcagcggctgaaggagttgaccggctaaccgactctacactcatctagccatcatggacatagccatccaccacccctggatccggcgtcccttctttcctttccactccccaagccgcctctttgaccagttcttcggagagcacctgttggagtctgacctcttctctacagccacttccctgagccccttctaccttcggccaccctccttcctgcgggcacctagctggattgacactgggctctcagagatgcgtatggagaaggacaggttctctgtgaacctggacgtgaagcacttctctccagaggaactcaaagtcaaggttctgggagacgtgattgaggtgcacggcaagcacgaagagcgccaggacgaacatggcttcatctccagggagttccacaggaagtaccggatcccagccgacgtggatcctctcaccattacttcttccctgtcatcggatggagtcctcactgtgaatggaccaaggaaacaggcctctggccctgagcgcaccattcccatcacccgtgaagagaagcctgctgtcactgcagcccctaagaagtagattccctttcctcgttgcattttttaagacaaggaagtttcccatcagcgaatgaacatctgtgactagtgccgaagcttactaatgctaagggctggcccagattattaagctaataaaaaatatcgttcagcaac

SEQ ID NO: 2985 - DNA, 3775 bp, Rattus norvegicus
  Genbank Accession No. M55636
gagcgaggtcatgacgtcactcctgggcttggctgtgcggttactgctcttccaacccacgctgatgttctgggcctcccaggtgaggcagaagtgccacaatggcacctacgagatcagtgtcctgatgatggataactcagcctacaaagaacctttgcaaaacttgagggatgctgtggaggaaggactggacatcgtgcgaaagcgcctgcgcgaagccgaactaaatgtgactgtgaacgcaaccttcatctactccgatggtctgatccataagtcaggtgactgccggagcagtacctgtgaaggccttgacctcctcagggaaattacaagagatcgtaagatgggctgtgtcctcatggggccctcgtgcacgtattccaccttccagatgtaccttgacacagagttgaactatcccatgatttccgctggaagttttggattgtcctgtgactataaggaaaccctaaccaggatcctgcctccagccaggaagctgatgtacttcttggtcgatttctggaaagtcaacaatgcacctttcaaaaccttttcctggaactcttcatatgtttacaagaacggatcggagcctgaagattgtttctggtacctcaacgctctagaggctggggtgtcctatttttctgaggtgctcagcttcaaggatgtattgagacgcagtgaacagttccaggaaatcctaatgggccgtaacaggaagagcaatgtgattgttatgtgtggcacgccagaaaccttctacaatgtgaaaggtgacctcaaagtggctgacgacactgttgtcatcctggtagatctgttcagtaaccattactttgaggatgacaccagagctcctgagtatatggacaatgtcctcgtcctgacactgcctcctgaaaagttcatcgcgaacgcctctgtctctgggaggtttccatcggaaagaagcgacttttctctcgcttacttggaggggaccttgctgtttggacacatgctgcagacgtttcttgaaaatggagaatctgtcaccacgcccaagttcgctcgtgcgttcaggaatctcacttttcaaggcttagaggggcccgtgactctggatgacagtggggacattgacaacattatgtgtcttctgtatgtgtctctggataccaggaaatacaaggttcttatggcgtatgacacccataaaaaccaaacgatccctgtggctacgagccccaacttcatctggaagaaccacagactccctaatgacgttcctgggctgggccctcaaatcctgatgattgccgtcttcacgctcacggggattgtggtcgttctgctgctgattgccctccttgtgctcagaaaatacagaagagatcatgaacttcgacagaagaaatggtcccacatcccttctgaaaatatctttcctctggagaccaacgagaccaaccatgtcagcctgaagattgacgatgacaggaggcgggatacaatccagagagtgcgacagtgcaaatacgacaagaagaaagtgatcctgaaagacctcaagcactgtgatggtaacttcagtgagaagcagaagatagaactgaacaagctactgcagtcagactactacaacctgaccaagttctacggcaccgtgaagctagacaccaggatctttggggtggtcgagtactgcgagagggggtccctccgggaagtgttaaatgacacgatttcctaccctgatggcacgttcatggattgggagtttaagatctctgtcttaaatgacattgctaaggggatgtcctatctgcactccagtaagattgaagtccacgggcgtctgaagtccaccaactgcgtggtggacagtcgcatggtggtgaagatcactgattttgggtgcaattccatcctgcctccaaagaaagacctgtggactgcccccgagcacctgcgccaagctactatctctcagaaaggagacgtgtacagcttcagcatcattgcccaggagatcatcctccgcaaggaaactttctacacgctgagctgccgggatcagaatgagaagattttcagagtggaaaattcctatgggacgaaacccttccgcccagatctcttcctggaaaccgcagatgagaaggagctggaggtctatctattggtcaaaagctgttgggaggaggatccagaaaagagaccagatttcaagaaaatcgagagcacactagccaagatatttggcctttttcatgaccaaaaaaatgaatcttacatggacaccttgatccgacgtctacagctgtattctcggaacctggagcacctggtggaggaaaggactcagctgtacaaggccgagagggacagggctgaccaccttaactttatgctgctcccacggctggtggtaaagtccctgaaggagaaaggcatcgtggagccagagctgtacgaagaagtcacaatctatttcagtgacattgtcggtttcacgaccatctgcaagtacagcacgcccatggaggtggtggacatgctgaatgacatctacaagagttttgaccagattgtggatcaccacgacgtctacaaggtagaaaccatcggcgatgcctacgtggtggccagcggcctgcctatgagaaacggcaaccggcatgcagtggacatttccaagatggccttggacatcctcagcttcatggggacctttgagctggagcatctccccggcctccccgtgtggattcgcattggggttcattctggcccctgtgctgctggtgtggtggggatcaagatgcctcgttattgcctgtttggagacactgtcaacactgcctccaggatggagtccaccggccttcccttaaggattcacatgagcagctccaccattgccatcctgaggagaacggattgccagttcctgtacgaagtgaggggagaaacgtacttaaagggaagagggaccgagaccacatactggctgactgggatgaaggaccaagagtacaacctgccaaccccaccaacagtggagaaccaacagcgtctgcaaactgagttctcagacatgatcgttagtgccttacagaaaagacaggcctcgggcgtgaagagccggaggcccactcgggtggccagctacaagaaaggctttttggaatacatgcagctgaacaactcagaccacgatagcacctatttttagaccacgtgcggtctaagaactgacagtagcaacctctgatatcctgaatctgcattttcccagaaacctcaacaacacagacaagtgcttagccccagtgccctgtctggaatgtagaaccagcccccaagtcatgtgggtgttctgggttgggttgggttgggtttggttggttggttttgtttctattgagacagagtctcatgtatcccaaactggcctcaaactcgctgaggagctatggatgaccttggacttctaagaccatccatgtgtgttcctggctgtgtgatgccctgtccagagtcgtgtcccacagttctccacggagcatcaacgtcagcctgaagggaggaaggaggaacgtactatacagaacttggggtttcattctaatttcatttctgctttttttcattttgtttactggatccttccttatgtacacatgaatttttttaattgtctggattaagtagcttatctccaagaaagtgtgtttaactagtgatttttgcagaaaccatgctggatattaggtaaaaa

SEQ ID NO: 2986 - DNA, 1408 bp, Rattus norvegicus
  Genbank Accession No. M57235
acgggaccgggacgcagcggagcccgcgggccccgcgttcatgcaccgcctgctggcctgggacgcagcatgcctcccgccgccgcccgccgcctttagacccatggaagtggccaacttctactacgagcccgactgcctggcctacggggccaaggcggcccgcgccgcgccgcgcgcccccgccgccgagccggccatcggcgagcacgagcgcgccatcgacttcagcccctacctggagccgctcgcgcccgccgccgcggacttcgccgcgcccgcgcccgcgcaccacgacttcctttccgacctcttcgccgacgactacggcgccaagccgagcaagaagccgtccgactacggttacgtgagcctcggccgcgcgggcgccaaggccgcaccgcccgcctgcttcccgccgccgcctcccgccgcactcaaggccgagccgggcttcgaacccgcggactgcaagcgcgcggacgacgcgcccgccatggcggccggcttcccgttcgccctgcgcgcctacctgggctaccaggcgacgccgagcggcagcagcggcagcctgtccacgtcgtcgtcgtccagcccgcccgggacgccgagccccgccgacgccaaggccgcgcccgccgcctgcttcgcggggccgccggccgcgcccgccaaggccaaggccaagaaggcggtggacaagctgagcgacgagtacaagatgcggcgcgagcgcaacaacatcgcggtgcgcaagagccgcgacaaggccaagatgcgcaacctggagacgcagcacaaggtgctggagctgacggcggagaacgagcggctgcagaagaaggtggagcagctgtcgcgagagctcagcacgctgcggaacttgttcaagcagctgcccgagccgctgctggcctcggcgggtcactgctagcccggcgggggtggcgtgggggcgccgcggccaccctgggcaccgtgcgccctgccccgcgcgctccgtccccgcgcgcgcccggggcaccgtgcgtgcaccgcgcgcacctgcacctgcaccgaggggacaccgtgggcaccgcgcgcacgcacctgcaccgcgcaccgggtttcgggacttgatgcaatccggatcaaacgtggctgagcgcgtgtggacacgggactgacgcaacacacgtgtaactgtcagccgggccctgagtaatcacttaaagatgttcctgcggggttgttgctgttgatgtttttgtttttgttttttgttttttgttttttttttggtcttattatttttttgtattatataaaaaagttctatttctatgagaaaagaggcgtatgtatattttgagaaccttttccgtttcgagcattaaagtgaagacattttaaaaaaaaacggcacgag

SEQ ID NO: 2987 - DNA, 16299 bp, Rattus norvegicus
  Genbank Accession No. M57718
  misc_feature (1)..(16299): n = a or c or g or t
attcaattgatatagtcccgttgaagacacactttattcaacctctcaaaagtccaagacaataaagtctcaaaccaaaagaaatatgccaagtctcatataagcatgggcttggtagaatattattagagtctacagcagaaacttttcataaatggactaaactttccaagcgttaggttgactgaatggatttttttaatgaaattcaactgtatgctatctacaaaaaaaatctcacaagaaggtgctaagggatggaaagaaacccactgattccaggaaagcaaaacaagcaccagagagagcccttggcatcccaaggcatggactgcccgtgagactggcctacctagaaggagaagagcagcagtgcctagatgctttctagtctgaattagcaaccagccaccatccatttggcatggacaattcagaagaaactatgtaggtgctgggtctgctgtggaaactcaaggacctcacaagagcaacaaataaagccacagacataagctatgcagcttgggaaagagccagtgtgtgaggacccccatatcacacaagactttaacaagagatatttatttttatatgacaaccttgtttgatttttaataattaaatgtttcaagaaaagataaaaagattaatggatgaatatttaaggaaattatgattattctgcttaacttatatgtgcagtacccaggtgttgaaatatcacactgtatcctataagtgtatacgccaaatacaatgaaaaagggaaataaaagccaaacaagtcaatgttcttgactagcacaaagagaggaaaatgggtgcaggtctggctattagccactgtcggctggaaaaaaaaaaatcatgtctctgattcccaaggtaaatcattcctgccaactgaactttgagatcaagattggtctgcctcacctttctccctcccacaggtaggcgggcaatccttacaggatttaggcaagaggcagaaaggatctgtgagagtgagggcagctactgaggagtggctgcaccatgagcgtctctgcactgagctccacccgcttcacgggcagcatctctggcttcctccaagtggcctccgtgcttggtctgcttctgctgctggtcaaagcagtccagttctacctgcaaaggcaatggctactcaaggctttccagcagttcccatcacctcccttccactggttctttgggcacaaggtatgaaggaaagggaaggatgggtgggaaagcagggaagatgggtgtctcagagactggtnatcgaaatcacaggacaaagcctgatgtataaaaattccaagtacctcatgagatacccagctcaggctgaggcacaccatccaacgatagggttattcaaccagtctggctgttgctcaactctgtactgatagccccacactttgaaagctttagttggtcttacctagtctcctcctcttctggctgagtacctttaatatctctgctgttctcaaacaacttttaagtagttccttacctagtgagttacctaccgctattctctcccaagctcagggcttgccagggaatgnatcagtgagttgaaaatcttgcccctgtgggttcttggtagagcagtagtgcacatcttagaagataccaggcacaggaagggttcacattgctgggatcagtgggtggctgccccagactaggagtattttcaggattggtgaaggtccaaattgaaatcccaaagtcatggcacattaaaggaaaaggctggggagggtcctcagatgacagcactaatgttagaattcccacagggtcatttagctctcccttctccttcccacacaccctgcactgtaagctacttagattgaatttatttccttgtaccacagagttcagctcaagagccaggaacagattataaaattccctagaaagggatagcagcctgtaggctaggaaggctgtaggccactgacccattgcactgtcaccccagggaataatgtacagagccaatgaggctacatagaaaggcgttcaacaaaggattgtgcaatagatgctcttagaaagacctgggtatgcagtgttttgtgtgcagatctgagaatctgaccctgtggctcctctgaggaacacagctccaaccaccaggactctcgaatctccctcaggatcagccctcgtacagcaaagctatgagtaatagcacagataattcatcgaactgcctcaccctcctgacagcttcggaaaaatccaaaactatgttcctgtgtttggtctcctcttgtctccagtccaaaaaataatcaagagtcccactaccttctttttccctcaacagcagtttcaaggtgacaaagaactacagcaaattatgacatgtgtggagaatttcccaagtgcctttcctcgatggttctggggaagcaaagcctacttaattgtctatgaccctgactacatgaaggtgattctcgggcgatcaggtgagcgtgacacgctgttgtgaagacataagcacattcctccttggtacttgccctaggctgtcaaattccagaagagcgtgaccctccacactctaccattcttccagactacaacccagcacagggccaacaatactcagaactgaaaagtcaaatctcttagcctaatgtctttgtctttctttattatttattcaaattaagatggtaagtctagttaattgtttcaggtttgaaatctctaattgttacctgcctgactcatagaataacgaagccaccacaaacacaccaacacacacacacacacacacacacacacacacacacacacacacacacaccacttgttccattctttgactttgatctcatggactgtttctcaccagctcagcatctcagccatggaggagtccagctactagaacacgaatcctaaccttcctaagcctgaatgttaggacagagtttgaagggaatatgagaaattgggcagtgagttcagacagtttgccaacagacagcacttaaaacatcatagaaactcgtgcctttaaccacagttgccttggggctgccttttaatcccttttcttgttaagtcattgtttccctttcagatccaaaggccaatggcgtctacagattgctagctccttggatcggtatgtatgtctaagttgggaatgtggtctacttctaattggattttccgagtgctgtgcctctggttcacagagaataaatgtgacagactgccactatcatggtctacccccaaatctctacttctgacccttcacttctccaaacagtcctatctgaacatcagtgtgatctgcctccttctaactctttccgagttttatctcacagctctcataatcacagcatgtatgccagtgccgctagctgggaaattcacgttctggactgtagcattcttcagaattatctctaacacttcatagttccctgtccccaatttatttagtggtctctctgatttgatcacacatatacacacacctctctcctgcccaggatatggtttgctcttgctgaatggacaaccgtggttccagcaccggcgaatgctaaccccagccttccactatgacattctgaaaccctatgtaaaaaacatggctgactccattcgactgatgctagtgagttcatttaactttattctcctctattcccctcagctgtgctgttctttctacatcagctgcagctttggctactactactgccacagataccatagctgctgtggctgcggctgcttcttcttcttcttcttcttcttcttcttcttcttcttcttcttcttcttcttcttcttcttcttcttcttcatcgtcttcatctccttttttcttcttccttctctgcttatagtctcctctctcctcaatctctctcttcacctactcagtgtatgcatcaacaagctttacatatgtattctactttgaatacaggttcttcacatatagttaaaatagaaatattccaggtactaggatatggccatacttgcttattacccaaggcaaagagcatcagagcatcttctccttcttcaaatcttcaactttagagagacttcccaggatgacacttagttggggtttcccttgggtcttagtgcttctgcatggacttgagtcagagagatggactccagatccacattgtcagagccaaaccttccataccaccacctttcaacaggcctctgggttatgactgttttagttcattggagctagcttatagttcagaggttggtccattgccatcatagtggaaattatggtagaacacagacatatatggtgtgctagggaggtagctaagaattctatatcctgatgcaaaggcagcaggaagagagtgagacactagtgtgccttgagcatctgagttctcaaagccctaccccaatgaccacttcctccaacaagactacccctactctaacaaggccacacctcctaatggacctatgagggccgttttcattcaaaccaccaaccacattcctctccctgacccccataagcttgtagccatatcttaatgcagaaatacaatcagttcaacttcaaaagtcctcatagtctaccacagcactgttcaaaagttcaaagttcaaagtctaagagactcatgcaatctcttaactttaatcctctataaaatcaaaataaaaaaaacagattacatactcctgacatgtacgggatataccttacaatcccaaaatggagaaaaggcagcatggtgaagaaatactgaaccaaagcaagactggaaaaacgttggcaaactccaaactctgcatctcaatgtcttatgtcaaagtgctcttctgatttccaactcctttcagctttgttggctggttccactccctgttagcagctttgctcagcaaacaacccacggcatctccaacactgtaggcttccaaggcaattgtggcttcatcttcaagcttcacacagtaacctctttaagcctctatgcaagaacacccatcacacgtgcctggcttcagcagttttccttagacaaggagggcaatcccataatccattccttctttccttgactctaaaccagaaccatgtggccaaagctgccaagttctcatactcattcaattacatcttcaccagctggttttgatggtttcctttactgcctaagcttggctgtcctaaaactcaatctgtgtaacaggccagccttaaactttaagatccacaaacctctgcctcctgagcacttggatcaaaggtgtgcaccaccaggcctggccctgggcttttctttaattccttttcacttttctttaatttcttttccaaaattggaagtttatctgggtgggatcttggtctgaggtcaccgctccctttattccacttagcatcaagcttttctctaatctgtttatctccttcaacacaggccttagctacagtctacttcctggtgcctcctttctcctcaaagtatgcatttttgtattttttctctttctcagtttgctccttttcactgtagatttgcatgagcgaatactaataaccatacaacaaaatccatactaggcaattgtaagatatcctctgccaatgcagctaatccaactcttcaccttagccttaggcaaaccttttgaacaagggcaaaagcagccacattctttgccaaaatatcataagatatctacgccacatactaaaatttttctcctctgtaacctcttgagccaggaccccacaattcaaattaccctcagccccaccgtccttcaactactacagcccattaagccccacttaaatcattcaaatgcttttataatccaaagttccaaagtccacattactccaaacaaagcatggctaggtctatcgcagcaataccccattgctggtaccaacttctgtcttaattagggtctcattgctgtgaagagacactataaccacacaaccaattataaaggacaacatttcatggaagccagcttacagtttaaaggtttagtccattatcatgatgggaagcatggtagcacaaaggcatacatgatgctagagaggtagctgcgagttctacgtcatatccaaaggcagcaggaagagagtgaaacactgggtcaagcttgagcatctgagacctcaaagcctgccccgcagtaacgactttctccaacaaggtcacacctaatccaacaagtccacacctcctaatagtgctgcttcctagaggcctataggggctattttcattcatccacaataatgagtcaattgttctcagcaagcttttgatgaatacactggggacccccattagaaatgccttcgtggctacttgggtgtttttatactctatatgtagaagtcctaccattatctcaggttgagctgagctctccaatcactgatgtatcatctttttaatctcctaaaaacagaattgcttatcaggtaaaacatgttaactaactgcaaacatgtgaaacttgtttcctttcttatgagtttctatatttaattttgaagtaatttacaagaatataggtgtcctttcacaaagatttgttttgcagtctgtaaaacatctgttatcaaaattgagtaacttagaacatagtatcttacaatatagggaaacaattcagtctattgagcacatattttctagggaaattaagtcaatgttcccctcccactacaggacaaatgggaacagctggcaggtcaagactcctctatagaaatctttcaacatatctccttaatgaccctagacactgtcatgaagtgtgccttcagccacaatggcagtgttcaggtggatgggtgagtgacaacccttgatcttcagggcctttgatcttaccaactaatatggatttatctgtgatgcatgtgggacattttggatactcaataaagagtcttatcccagccccaagtcaatccctgacccaattgaatcctatcccaaccacagaccactgatccctagctgaggtggaatcctagacactcatgccaccttctaccaccttctaccttgaaaattacaagggttatgagacagagttatgtgcctcagtgttgtctcttcttatcatatagaaatctccccagagtccgtactatctgtgggttggagagctctacagtctaatctgttctacttcttcttcttcttcttcttcttcttcttcttcttcttcttcttcttcttcttcttcttcttcttcttcttcttcttcttcttcagaaattacaagagctatatccaggccattgggaacttgaatgacctctttcactcccgtgtgaggaacatctttcatcagaatgataccatctataatttttcttccaatggccacttgttcaaccgtgcttgtcaacttgcccatgatcacacaggttctgtttgtgccttctgtctccctcatttcctaagatcagctcaagggggctattgatgacttctgaggcagatccagacccttcagtgcatccccctataggacctgggtcacatccatgctagttacttttacactgacaatgttagcagttggaatgtcagaatgccaggtgttgaatgtatgtcatcatattggtaatgtgtagtgagacctgacccagcaactcaagcagagcttctattgcccatggtgctaagagagttctgacctgtgtcagatcacactggtcctctaaccctacccaatcctatatagcgcacccgcacatagcttcaggcaaggagacacatggagctacatggggttactgtagctctcaggtctttggaataattgatgttctggaatagatggtgtgatcaagctaaggaaggatcagctgcagaatgcgggagagctggaaaaggtcaagaagaaaagacgtttggattttctggacatcctcttacttgccagagtgagtatgtgcagcagaggcctgagagtctgcctgggaacacacaaggaacaagtatagttctgatgatgcctgttgtttccctcagatggagaatggggacagcttgtctgacaaggacctacgtgctgaggtggacacatttatgttcgagggtcatgacaccacagccagtggagtctcctggatcttctatgctctggccacacaccctgagcaccaacaaagatgcagagaggaagttcagagtgtcctgggggatgggtcctccattacctggtaagagttcaagtagaagtgcccttattctttgggtctccagtctacctgacctccacattggactttatttcagggatcacctggaccagattccctacaccaccatgtgtatcaaggaggccctgaggctttacccacctgttccaggcattgtcagagaactcagcacatctgtcaccttccctgatgggcgctctttacccaagggtatgaatttcccaggcctttcatcctagagagaatggatgctcagtagtctgtgtccttcaacagttctgaatccctctgagtgccgtttccttttcagtaaataaatgcttcttactcataaagtacagtaataagcttaaatgacctcctataaagttaaatgctactttgcatgaatgacattgaaagcattcttcatcagctaacattccttcttcttttgaatctatgatctcatcatgaagcatccattctaatttgggaacaatgatgttttccagactcaattccagatgccagcaccatataactcatagccacacttattcttcagatgtcctcactgtcacatatgttttcatgttggggctggaaacacaggcatatgtttgtacatagaagtgggaggcagaggtcagcattagttgtcattccacaggcactgtccaccatgatttttcagttcaggaggtcttgtactggactgtagctcatctcttaggctaggctggccactgagctaggaacctgcctgtccccacctcaccagcagtgggataacaagcatgtgccaccacacacagtcttttttatatggattgaggtctttctctcaatccccaatcttttatcatgttctacatttgatataatgtgtagacatttttataaaaaactactatttatatatagatcagtaaataaaatgtgacctcagattcttgccaaggcaagtaaccggttactctccataacctgatagtcagaccctattgctgaagacacaacttatgtcatcaaacacagagaaaatgatctggtgcccaactagatttagacctaattattaacccaaatagtgaatagggtctctttttcaagcttatttcactaatagttttacattatacatttatacatatatttatattatacaggcacagaacacacacacaagggtggggagagagagagagacagagacagaggcagagacagagagacagtgacaaagacagagagagagagacagagttttcaaaaataaaaagagcaaatcaggcaaatttaaacagaagaggaagagttttttcttgcagagctccttggaatcttcaatgtgtctatctagatgtctgtgaaggaaataaggaacagagtttcctcacgccctgatgattgacatcttgtctctagcgtacattggaagtggagccccacagttcttttctgctgaccttttgctgtggcttggtatttgtttcctgccaaactcatacagctatgtaatacccagagtcacacgttaatggggttgggagggtgaaagctttgtgaatttatgttaatcatggtggtgctctaaattgtactgaaggcctcctgtttgctaagcatgtgctctaggactgagccacttaccatccccaagatgagatggataaacttggcttgactacgtgctttagagcacctgggagtggatagattacattagggttggtctcacattattctatatagtggctttagaaagagaaggagggagactgctaagatatacacctgtcctcaccatgataggatgcaaccaagggagagagctgtttgaactttcagctccaaatctgagctaaataagcttcatatatacatatatatacatacatacatatatacagacatacatacatacatacatacatacatacatacatacatacatacatacatacatacactgggatgtacagggtagatagagaatcagacaggggctagaggaatgtgtttcttttatgagacaaagcaagtaaaaaagagcaatgaattccatgccgtgagtcatatgtggtccagtctctgagaaggcacttgggttagtgacagagatgaactgatcaccaaatacaagacccctgcaatgtcaggaaagcaccctttgtctcacagctcattatggcaaaactctagtattgccacatcctgctttggtgatatgtaacccctctctgaaattttagtaactcacctgaaaaaaaaaacagaataaatcaactcactctggggacttaatatcttaatatcttaacatctttagtggaaatccttcatcaaatttaagttctaactttatttattcccaaaaccggttcatcttttttgcttctctctctctaattccatttttttatacttctcacttgtgcctcaggtttgtttccaactcatgcacatgtgctgaaagtgatggtctatagcaccctaacctcttgtgcaaacgtatcattccctgctgtctcaggaaccaaggagtcacccctgggtgtaacccatcttctctcacatttctatctgccccacaggtatccaagtcacactctccatttatggtctccaccacaacccgaaggtgtggccaaacccagaggtaggaggttcccccaaggagggcagaggagttggtctcaagatcaataccacctattgtccccacctctaggcacattgtccattgtgagttgcaagcaagggtttgacctctatctatcctgactgaagtgctgtctccctgcaggtgtttgacccttccaggtttgcaccagactctccccgacacagccactcattcctgcccttctcaggaggagcgaggtgagatagcctgtgtatgatgattgatatactgtaaagatctttgcagcattccttggttttatctcatgcatatatggcatcttcgggtatatcctgattgggggtgggggggagaagcttcttgaggatgtgtctgtgcaccaaaggagggtggcatttcatgacacactgtgaagacattaacccattggccaaacaaatttctatgcagtgcatgcacttgcttgtgttctgatgtttccctcactttaagggcaggactttacattgatttttttcacatgactttaacttcaggtgtccagcttgtccaatttgggggctcttaaagggcatgtcttttccacacctctatctgacccatcactattcctgcgtagttctctattctagaatcactgtgcaaggaattaatttgcttgcatgtctgccacattcaactgtccagtgaagtattacatcatttgaggcaaggttcacaccagggtatgctaattccacctttgctctctctctcccaacacaattttcaatccgtgttgatgctcacatctctcttgcaattgcccaatggccaaagcttgacagataatgtatattcctcaagtgaggctatgtagtctaacttcagacaaaaggcattaaaaagaaggagagtaatctgctctgaagtaaacctctattttacatataacagcatttttaaggtttctgggagtgaaatagaagacactcttgaaatagctactgaactggacaaagactttcccatggcttctagggaaatccttccacgggacctaactcactgcaaactttaaaaggtggtgcagaagaaggattttctgagcctatttttcatgaattcatgaagtggcaaatcagttttcacagaacaggctagaagtaagttgttcttccagacacaggctatgtccacacacttggcaaacttcaggattgaatgcactcaccgcaaatcatgccactgccactagaagacaggagagtattgtcttaactcagtagtaactcagcttaactcaccgagccatgctgctggtggtgtttgctaagacagagtctcaggcttgtctggagctcatggtccctctacctctgcctcccaagtgttgggattcagacacagtcccccatggcttgctttggtcagaagctttttcatctttattatatttcgttctattttttttcatcccttaaatccacatgaattacattttaagaaccaaggaaaggtaactattttaactgcaaaataaattttaaacaactcctgtgtgtccggtgctatgctataaaaatatagaaataatgatactatcccattcctgcctctaagagttcaaaactgtggcccacaaagacaaatatatctgtgattaaaatatattcttcccccattctttcactcatccactcagcagtttgcagaatgttccatgttcctggcatcatcccacgccctgagggtggcatggccttgaatatggtatagatggtgccttgaggcctagaaggagcagggtcagtcatcgaagaaataagagccaatcactcattgacctgagcttaggggatatgaaggaaggggtggtcctcaaatacctcaacagcttgatcttaagtaggaagtgggatgggcaggaaagaggtgagggcagcagccagtagagggtataactgcagctagacctttgttgttttgttttgtttaattttatatttttatttattcactttacattctacngccttccttccagtcacccctcccacaattctcccccctttcccctcccctcttcccctcctctgagcagatggaggcctccagagtgccgccaccccccacccccccaacccccccaccctgtgtacttcaagtctctatgagactcggcacttcctctcccactgaggccagacaaggcagcccagttagaagaacacatctcacatacagacaacagaaaagctaaacaagaagaaaagcctaagtaaggaagctcaaatctcacttagaagaggaaataaaagtcataagaggcagatggagggagagaactgggaggaagagaaggagaggagggggtgggggtttaggatcaggtatggggaaggacaggagagatggccggatggccatgaaaattaatggaaatctgcaactgatgggggtgggggaagcatctccaggaggagacagagacctgggataagggaggagcccaaaaatcaatgggggtgaccttagctgtgactcactacactggagatatggaacctgaagaggcaactaggcattgaacacagccctacctggtggaggtatagaggatcagtgtggagggagggccagggagaccaaagaagcccaggaaaggaaactgaagaaggaatagtgtacatttctgaagtagagttggaaagctatagaggccgatggattaaggatgtggggtaccctaagtaggaggcagatggggcagacacttgaagatcctcaacacagtcttcctgtaggtcctcttctactgatacccaattccactctgtgaaagctatatgctagatcttcctgaatgaagtaaacgattaacttattaaatgattcacaagtttgacttctagtccttaaaatactgtcctaacagatttcatacgtctaaaacaagaaaaactaggatcaaggtggcattgaaaaatgttgaggctatgtcaaaaagtcaggagagccaagtaggcatgacccgtcatctcagccattaaactgaacctgtgacagtaggccctgagtgttgttctgggatccttcacgggtcagcccttaaaacaggtaagaagctaatgagttttattttccctttctgacccaggaactgcattgggaaacaatttgctatgagtgagatgaaggtgattgtggccctgaccctgctccgctttgagctactgccagatcccaccaaggtccccatccccttaccacgacttgtgctgaagtccaaaaatgggatctacctgtatctcaagaagctccactaattccggtaaggacaaggacagactctatgaacatgtggcctggcaccttgtcccctgtcatcccttcctgtcaccatcttgctttctgtctgttcatcctcacacctatttgctccctggcctcttggtctcctcctctctctctctctctctctctctctctctctctctctctctctctctctctctcctctagattccccatttgttttttggtctcctgctacccacatctgactgtgcacctgatcctgaacatccttcatcctccatccttctctccttgcctcttcacttcttaccatctttttcccctacaggacttcttcattataccaataatcaacggtcacaaccttgatggtcgggaataacaggacgttattatcttacagttgtggagctccgaaatctgaaatgagtttcactggcagaaagctgagttggtggtgtgactagccttcttcagaagagtgcttcagagagtcctctcctcctctcttcagtacagatcacccttctcagcactggaatattcctctgctttaaagccagcacccttcccataccccctcttctaaaagccttcccttttacaaatgttcttatgacatcatcaagaccactgaaaaactccaagataatttcccatctcaatattccttactccatctaacctactaagtcccttttgaattatgaggaataattcaatttgttccatgggctccaaaactcaaggcctgagcattattgtgaaacctttattcagcctaatatcatcttcacaagactgttacctggtacgttcatctaaatctcccctgcatagtctctctacctgactattcctcacacaagtttctttaccttccctcctttctccaataaagtgtccagtgtcctgcacagcatctgtcttctcatgctggctctgaacacaggttcccattctgtttgaaactgctcctggatcaggatccatgatgagttctctgccttccctgagatgccatgctctgctttctcacacacacacatacactcacacatacacacacaacacatacacacacactcacacacacacatacacacacactcacacacactcacacgtacacacacaacacatacacacacactcacacacacacatacacacacacactcacacacactcacacgtacacacacaacacatacacacacaacacatacacacacacacacacacacatgcacacatcagagttcttggatttattcaaatactcatgaagaactggtattaataatggtgtcttgattagaagacaccagagtcaggaagcttcagctcaagttccttctagattagtgttccgccggttccttcctttaatatttaaattcagtcacagcctcctcctatcagagagggggtacctccacccagtctacactacccgagtgccaaggtgctgaagaaacaaatgttacagtttagactcaggcaccacccagtgacgcatgatggttatgactggagaatcagcgcccacgtcataactgttgaaatcttgctacatctgttcagagaacagtttatctgtgtgctagggcaaaagggcaagttagttgcattaaggcttctagctaacaggcacactataatgggaccttaacatcccagcttcgagtgtacagggagggctttacaggagttagcaagtatcttagggcagagcttccaagctgtggacttcttccaagcagaaaagaattggtagtaggaaaggtatatggcacatttcccaagatgccctagagtggtggttctgaaccttcccaacgctttgaccttttaatacagttcctcatgttggggtgactcccccacccccacccccaaccataaaattaactcattactactttataagtgtaacttcgcaaagaacataatataaaatctgtgctttctggttattgttggtggctcctgtgaaagagtcattcaactaccaaaggggtcatgagccacaggtaaagccactgccctagtcccagggctagaattc

SEQ ID NO: 2988 - DNA, 3413 bp, Rattus norvegicus
  Genbank Accession No. M58040
catagagttcactgacatcatcaagcagctgagccagaatacatatactcctcgtgaggctggatctcagaaagacgagaatcttgcctattatattgaaaatctgttccatgactttaaattcagcaaagtctggcgagatgaacattatgtgaagattcaagtgaaaaacagtgtttctcaaaacttggtgaccataaattcaggtagtaacattgacccagtggaggctcctgagggttatgtggcatttagtaaagctggagaagttactggtaaactggtccatgctaattttggcactaaaaaggactttgaagaattaaattattctgtgaatggatctttagtgattgttagagcagggaaaattacttttgcagaaaaggttgcaaatgcccaaagctttaatgcaattggtgtcctcatctacatggacaggaatacgttccccgttgttgaggcagaccttcaattctttggacatgctcatctaggaactggggatccatatacacctggctttccttctttcaaccatactcagtttccgccatctcagtcatctggattgccttctatacctgtgcagacgatctcaagagctcctgcagaaaagctattcaaaaacatggaaggaaactgtcctcctagttggaatatagattcctcatgtaagctggaactttcacagaatcaaaatgtgaagctcactgtgaacaatgtactgaaagaaacaagaatacttaacatctttggcgttattaaaggctatgaggaaccagaccgctacattgtagtaggagcccagagagacgcttggggccctggtgttgcgaagtccagtgtgggaacaggtcttctgttgaaacttgcccaagtattctcagatatgatttcaaaagatggatttagacccagcaggagtattatctttgccagctggactgcaggagactatggagctgttggtccgactgagtggctggaggggtacctttcatctttgcatctaaaggctttcacttacattaatctggataaagtcgtcctgggtactagcaacttcaaggtttctgccagccccctattatatacacttatggggaagataatgcaggacgtaaagcatccgattgatggaaaatatctatatcgaaacagtaattggattagcaaaattgaggaactttccttggacaatgctgcattcccttttcttgcatattcaggaatcccagcagtttctttctgtttttgtgaggatgaggactatccttatttgggcactaaactagatacctatgagatattaattcagaaagttcctcagctcaaccaaatggttcgtacagcagcagaggtggccggtcagttcattattaaacttacccatgacattgagttgaccctggactatgagatgtacaacagcaaactactgtcatttatgaaggatctgaaccagttcaaagcagatataaaagatatgggtctaagtctacaatggctgtattctgctcgtggagactacttccgtgctacttctagactaacaactgattttcataatgctgagaaaacaaacagattcgtcatgagggaaatcaatgatcgtattatgaaagtggagtatcacttcctgtcaccctatgtatctccaagagagtctcctttccgacacatcttctggggctctggctctcacaccctctcagctttagtggagaacctgagacttcgtcagaaaaatatcactgctttcaatgaaacgctcttcagaaaccagttggccctggctacgtggactattcagggagttgcaaatgccctctctggtgacatttggaatattgacaatgagttttaaatgtaatgtgcataattaagtgagagagggtagtctgtttctagacttgagctggttgtgctaaattttcattagagctcgaattaatgttaaaaattctacccaatcatctaatgtgtttaggcagcagcttttagtgcagggttggacccacacttcaagttacagtggacaacactttccatgttcatgataccttcttagattatctttagaattttgagtcttttgtaataccttgctctttgcttcatggtcatgaaaatgtcagaaccagttgtaagaacattgctataagtcctgagggcactactagtatcttgaggtgggaggaagagggtgtatgtgaggggcagagtggtcgctgggtgtgattccccatctccatctgaccctcactgggattctccaattgagctgtatgcctgaaggatttagctggcttccattcccctaaagtagacagttacttttcagaagaggtgcaacttgttttcttgccagcaaggttgaactaggtccttctgctggataaaagaaaggaagtttgtctgtttacaggaataaggccttattggtttaacctttgtgttatttaggatgagaccagaagccaaagacttcaagttttctctccactgtcatctacccagtagtctttagttctttgggttgttttgtttttgttttgtttttcttttccaacactttctgaaaaagaacaggtttagactcagtctgtcagcagaacacactgccgagctcggtacccggggatcctctagagtcgacctgcaggcatgcaagctttccctatagtgagtcgtattagagcttggtgcatgcctgcaggtcgactctagaggatccccgggtaccgagctctggccaaagtgctggtcttcagggaagctctgtcgtttttggcactgagatatttattgtttatttatcagtgacagagttcactataaatagtgtttttttaatagaagataattatcggaagcagtgccttccataattatgacagttatactgtcgttttcttttaataaaagcagcatctgctaatgagacccacagatactggaagttttgcacttacggtcagcacttgcgggctttagaaaggagaaagccacaagccaaacaatatccgatgagctagaagaggattgggttaaataagagattcctagttgagttggaaaaaaatgataattctaagtccagtgagttgtggccaagttaaatgtcatttaaaggctatgatagtacatcaacaaaattctatagctcagtttattcaagatgtaactcaaatccaattttgcaaaatttccagtacctttgtcacaaacttaactcacattatcgggagcagtgtcttccataatgtataaagaacaaggtagtttttgcctaccacagtgtctatatcggagacagtgacctccatatgttacactaagggtgtacgtaattatcgggaacagtgtttcccataattttcttcatgcgatgacatcttcaaagcttg

SEQ ID NO: 2989 - DNA, 1715 bp, Rattus norvegicus
  Genbank Accession No. M58041
gaaaaagaaaaaccaacaagaaagccaatggctctcttcatttttctggggatttggctttcttgtttggtttttctttttctatggaatcagcaccatgtcagaaggaagctcccacctggtcccactcctctaccaatttttggcaatattttgcaagtgggtgttaaaaatatgagcaaatctatgtgcatgctagcaaaagagtacgggcctgtgttcaccatgtatctgggcatgaagcccactgtggtgctgtatggatatgaagtattgaaagaagctctgattgaccggggagaagagttttctgataaaatgcattcgtcaatgctcagtaaagtcagccaagggttaggcattgtcttcagcaatggagaaatatggaaacaaacacggcgtttctccctcatggtcttaaggtctatggggatgggaaagagaactattgaaaaccgaattcaggaggaagttgtttatctgctggaagcactgagaaaaaccaatgggtccccgtgtgaccccagcttccttctggcctgtgttccctgcaatctgatctccagtgtcattttccagcaccgttttgactacagtgatgagaaattccaaaaattcatagagaatttccatacaaaaattgaaattttagcatctccttgggcccagttgtgcagtgcctatcctgttctatactatctcccgggaatccataacaaattcttaaaagatgtgactgaacagaaaaagttcatcttgatggaaataaacaggcatcgagcatctctgaacctcagtaaccctcaggactttattgactatttcctgattaaaatggaaaaggaaaaacacaatgaaaagtctgaatttaccatggacaacctgatagtcaccataggtgatctttttggagcaggaacagagacaacgagttccaccataaaatatgggcttttgctcttgctgaagtacccagaggtcacagctaaaattcaggaagaaattactcgcgtgattggtagacaccggagaccctgcatgcaggacaggaaccacatgccctatacggatgctgtgctgcatgagatccagagatacattgattttgttcccattcccttgcctcgtaagacaacgcaggatgtggagttcagaggataccacattcccaagggcacaagcgtaatggcatgtctgacttctgccctgcacgatgacaaagaatttcccaacccagagaagttcgaccctggccactttctcgatgagaaaggcaacttcaagaagagtgactacttcatggctttctcagcaggaagaagagcctgtattggagaaggtttagcccgcatggagatgttcttaatcctgaccagcattttacagcattttattttaaaacctcttgtcaatccagaggacatcgacacaaccccagttcaacctggtttattgtctctgcccccaccctttcagctctgtttcattccagtctgaagcggcatagtctttcacacagatgactgagaccctgcttctacttgtgagcaaacaggtcctcctgtcctcgtgtacctgtaactggcagtccttcctgaatggcagggatgctacctctgaactgtcctacatttttttcaattctttgtgaaccagttccaatttttcatatgtgaaaaaacttcactgttttagcactaataaagttttttttc

SEQ ID NO: 2990 - DNA, 2136 bp, Rattus norvegicus
  Genbank Accession No. M58308
ggtgagccatgcctaggtacacggtgcacgtgcgtggggaatggctggcggtaccctgccaggacgggaagctcagtgttggctggctgggccgcgaggctgtgcggcgctacatgaagaacaagccggacaacgggggcttcacctcggtggatgaagtgcgattccttgtgcgccggtgcaagggcctgggcctgttggacaatgaggacctgctggaggtggccctggaggacaatgagttcgtagaagtggtgattgaaggcgatgtaatgtctcctgatttcattccatcacagccagaaggcgttttcctttacagcaaataccgggagcctgaaaagtacattgccttggatggggacagtctgagcacggaggatctggtcaacctaggcaagggacattacaagataaagctcacttcaatagctgagaagaaagtgcagcagtcccgggaagtcattgacagcatcataaaagaaagaacagttgtttacggcatcaccacgggttttggaaaatttgccagaactgtgatccctgccaataagctacaggagcttcaggtcaacttagtccgttcccattcttcaggtgttgggaagccactcagtcctgagaggtgtcggatgctcttggctttgaggatcaatgtcttagccaaaggatacagtgggatttccttggagaccctgaaacaagtgattgaagtatttaatgcctcctgcctgtcctatgttccagagaaagggaccgttggtgccagcggagaccttgccccactctcccatcttgctttggggctcattggagaaggaaagatgtggtccccaaagagtggctgggccgatgccaaatatgtcttagaagcccacggattgaaaccaattgttctgaaaccaaaagaaggcctggcactcatcaacgggacacagatgatcacttccctgggctgtgaagccgtggagcgagccagcgccattgcccggcaagcggatatcgtggctgccttgaccctcgaggtgctgaagggcaccaccaaagccttcgataccgacatccacgccgtccgccctcaccgcgggcaaattgaagttgctttccggttccggtccctcttggactcagatcaccacccgtcagaaattgcagaaagccacaggttctgtgatcgtgttcaggatgcgtacaccttacgctgctgtccacaggtccacggtgtggtgaacgatacaattgcctttgtgaaggacatcatcaccacagaactgaacagtgccacagacaatcctatggtctttgccagtcgaggggagacaatttcgggaggaaacttccacggtgaatacccagccaaagccctggactatttggccattggcgtccatgaacttgcggcaattagtgaaagaagaatcgaaaggctgtgtaatccttccctcagtgagctgcccgccttcctggtggctgaaggaggtctcaattctggattcatgatagcccactgtaccgcagcagccctggtgtctgagagcaaggctctgtgccacccttcatctgtggactcactctctaccagtgctgccacggaggaccacgtctccatgggaggatgggcagccaggaaagctctcagggtcatcgagcacgtggaacaagtgctggccattgagcttctcgcggcctgccagggcatagagtttctgcgccccttgaaaacaaccactccgctggagaaggtgtacgacctggtgcgctccgtagtaaggccctggatcaaagatcgcttcatggccccggacatcgaggcagcacacaggttgcttcttgaccagaaggtttgggaggtggctgccccgtacatcgagaaatacagaatggagcacattccggaatccagaccgctttctccaacagcgttttcactagaatctctgaggaagaattcagccacaatcccagagtctgacgatctttaacgggcttcctcgagaacaggcacatgtgtcggatctgggcacatcactggtgtggtgacggagagtctcaggaaccgcccatgatgtgtagaactcatctcttttcaaacaaactctggttaaatcatggcagcaatacagtcattgaacccag

SEQ ID NO: 2991 - DNA, 539 bp, Rattus norvegicus
  Genbank Accession No. M58404
cctcggcctccgggctgcgggaacgcccggactgggaacgccacgtcgagaggcgttcgcggaaggcgcgggatccaggacgtgctggtcacccccaaaccccaggccacccattatcgccttggttcgcccatcagagttgtaagaaaatggcagacaagccggacatgggggaaatcgccagcttcgataaggccaagctgaagaaaaccgagacgcaggagaagaacaccctgccgaccaaagagaccattgaacaggaaaagaggagtgaaatctcctaaaagcctaggaagatttccccaccccaccccttcatctccaagaaccccctcgtgatgtggaggaagagccacctgcaagatggacgcgagccacaagctgcactgtgaacccggcactccgcgccgatgccaccggcccgtgggtctctgaaggggacccccccactaatcggactgccaaatttcaccggtttgcccagggatattatagaaaattatttgtatgattgatgaaaataaaacacacctcgtggc

SEQ ID NO: 2992 - DNA, 1164 bp, Rattus norvegicus
  Genbank Accession No. M58495
tggaggtcagatgaggatgctggatcccctgtagctgagttacaagtggttgtgggcagccccattaggtgctgggaactaaaaagggtcctctggaaaagcagtcagttactctaacagctcccccttccacttcctgacaaggccctacaagttctgtaggataactttaccatttttgttttgttttgggaaaggttcttaccatgtagccttaactatcctagaaattactacattgaccaggctagtcttcaactcacaagttccgtttgccggctcactcctgactgctgggattaaaggcatgggccaccatgccccacaaacataatttttatttaaggacatttaaaacctttttgtccagttctatattctgatgtaaatttcgtgtaaagttattaagttccacctgtggctacacaaatatttccctatggctgctgtctcccccgccagttttgctctggttcctggagggccacacagatgagttcgggggggggggggtggaggggtggggccacgacaccaaagctgaagagacccaagcgtgtacacccaagggccaccttttgcagtttctaagagcagaatcagaacgctgaaaagaagaaacgaattcactcacactagagacaagtctctcagagatttcagtctagagtcacagtgacttggcaaaatctgagccggtcctttagctgccccacccttccccttgcgtgcaaaggcgatttcccacatctgaccaaggactaacccacacaggcaggtcccacgaagctcgaaaattttctgttggaactttccattttgttcccagaagatcttggacagggagcagttgaatttacccaatatgtaaccatatcctcaaaacctctctcactctcaagctcccagaaacccttttgacttccatatacagaagtcctaggccagccctaaactgcttctccctgccaataacttggtatcctccccccagcgcctctgggctcggcaatccagccccgccctcgctggctgccctgcacagtgggctgggccggaaaagcaagatataaagcctgaaagtgctcagtacagctcgcactagcctaggctgtggcacgcaggatctttcctgaagcatttcagggtctgcctggcaaccag

SEQ ID NO: 2993 - DNA, 4614 bp, Rattus norvegicus
  Genbank Accession No. M58587
aattccgtgggcggcgggcggcggagaagctccgagcggggccgggcggcggcagattggagtcgcgacacagccgccgtccgcttcgggctccacgtagaaggaaccatgctggccgtcggctgcaccctgctggtcgccctgctggccgcgcccgcagtcgcgctggtccttgggagctgccgcgcgctggaggtggcaaatggtacggtgacgagcctgccaggggccactgttaccctgatctgccctgggaaggaagcagcaggcaatgctaccattcactgggtgtactcaggctcacagagcagagaatggactaccacgggaaacacactggttctgagggccgtgcaggtcaatgacactgggcactatttgtgcttcctggatgatcatctggttgggactgtgcccttgctggtggatgttcccccagaggagcccaagctctcctgcttccggaagaacccccttgtaaatgccttttgtgagtggcatccaagcagcactccctctccaaccacgaaggctgtgatgtttgcaaagaaaatcaacaccaccaatgggaagagtgacttccaggtgccttgccagtattctcagcagctgaaaagcttctcctgcgaggtggagatcctggagggtgacaaagtgtaccacatagtgtcactgtgcgttgcaaacagtgtcggaagcaggtccagccacaatgtagtatttcagagtttaaaaatggtgcagccggatccacctgccaaccttgtggtatcagccatacctggaagcctcgttggctcaaagtcagttggcaagaccctgagtcctgggacccaagttactacttgttgcaattcgagcttcgataccgacctgtatggtcaaagaacgttcacggtgtggccgctccaggtggcccagcatcaatgtgtcatccatgatgccttgcgaggagtaaagcatgtggtgcaggtccgagggaaggaggagtttgacattggccagtggagcaaatggtccccggaggtcacaggcactccttggctagcagagcccaggaccactccggcagggatcccggggaaccccacacaggtctctgttgaagactatgacaaccacgaggatcagtacggaagttctacagaagcaacgagtgtcctcgccccagtgcaaggatcctcgcctatacccctgcccacattcctggtagctggaggaagcctggcgtttggattgcttctctgtgtcttcatcatcttgagactcaagaagaaatggaagtcacaggctgagaaggaaagcaagacgacttctcccccaccgtatcccttgggaccgctgaagccgaccttcctcctggttcctctcctcaccccatcagggtcccataacagctctgggactgacaacaccggaagccacagctgcctgggtgtcagggacccacagtgccctaatgacaacagcaacagagactacttattccccagataattgtctggagggtacctggcagctggcacgcaagtttctcactgccggccccgtccaccagggctgggggcggggtgggcggggctgcagcttcacgatcccacaggagccttgcaaaggttctgagtgggagaagactggtgtgctgcacgggcttcgaaagaaggggctgtgaggagcacgagccatcatgaagagagcctgtgatgactctgaatagagacgcccgcccatcagctacacacctgatggtggctctcaagctatcctctcaggaagcctctgggaggggcgacaaaggctgccccagttgcctagctctggctcactggcccaagctgccttttagcttgaactcctaaaatccaagcaccttggccattctcttcctaggccaccgaggccgcggggaagcttggttctactttccttctcaacacctggagaagcagctgcccggtggtggtgactaacgtatcagggcctgatggcttatgaggaatgacaattaattcctcataagcagtttttaaatgtgaatagtaatcctaggcactgctgacttgaggttttattttcttcgatctcaggacttcaggagagaagcagagcagaagtagagagaggatgggtgtccattgtccgtgtggtacttgagggggatacagcctggaaaacacgtttcctgtccccctactctcccagaagaggtagggggtggcgcctcttccagggcagagagtataactactttacctggccttgcccatactggtttcaactggacttgagctactaggaaaaatgacattcatgcaaaaagaaaactttaactagcaagaatgcacttccactttggtttctagaggactgttgctcctcttgagacgctggaagaggccgctcactgtaccctggtgtatgagccctcaccccccaccccagggtaagtgcagtaactttagtctaaacaccgagtcaggtaaaaatcgaggaaaaaacaaccctgtttcctgtaacagaaaagcctttggtttcgttttgtattttgattttttttttgtcttaaaaagtgtaaaaatagtctgtccatactctgcttcagggaatgacctgtgaatactccccaggcgtgggcaggaagggtgtctgcttcctgctacacctcactgccacctcggccttccttgctttacattcaactgagttgcctcagctgctttcccctggggcgctgaaaaagccagtgatgttggtggtcaccgagaagaccacagagccacagagtaatgctgtgattgaagcgagttacgcaaccacagcaccccacatttgctgtattatagaactatgctaggagcttgccttttcacaaaataccaccaccacgagacgtggcagagctcggaagctgtcaccttgtgccatctgcttgccagctccaaggggccactgacttaagcagttattttctttgtgggctttgttcatttcagggcctgttgctgtcttagaaaaagctctgtcggttgacaaaaacatcagacaggtagtcatgtttatttattttttttccttctttgctaagtctttgggactcaagggtagtaaaaaatgctgtgaaaagggaaacattagaaacagcgatcttcggggaataggtgactgtgcccacgcactgttcttcagtccctcacgtggctctgcccgagtgctgttccaagccaggcagagcaggctggcggaagattgaaatccagatagctcgttatctctgagagctaaatagctttgatctccaagctgttattgctttcactattgtaacaggatagcctccccccccatgtcaaaaggatgcttttcccttttgactttttataagctaagtcagtgaagtctgtttcatctgagctccagcttcgttcagttcgcacaggtgtatgccctcagctgcttcgggcctcagatctgtgctagttgaatggttgtcccatccttgggtcatccttaccagagtttctgcagcccacaggtctgccttgtcaacagtaccacttaacaccagcattcagtgcccaggcagccagatgtggagggtttacccagagatgatttaaacatgaccttaaacgtgtatggtagaacgaggggaacccataccagctcaggttctaaagagatctttgattcttctggcattagtgaaatagctttaaactatttcaaggaagaagccttggccacacccacgacatttggtgacaatcctttctctccatgagccttgtctttacaccttctcacctggctgaaagctcacactgaatctttcctatgtccctggtgtcttgggagaaaggaaactggtatgggcttcactgctggaattggcttggagccagcgtgtggcgcagccctggcagggtgggccaggcttagttatggtgtgctggtttaaggaatgcctggcttgcctggttgcttgggttctgagctgcagagtttcctagcagttctttatggctgacctagttggggaagattcccacactcaactgcaggtggaggtggtgagaaagctgttttcatttggagaggcaggatcagcccaagaagctttcagtgggagagcctacagtgaggctgtacctcactgtgggaggaggcaggccagctggctcaggtcctgggactggcactggggagggtctgccaaaggtccctccagcctgtagtcctagcatagtcgggtgccagttccaggaagtttctatggcaaccttagtgctcattaaggaacattgtcagttttgtgaacatatgctcagatggagatcttgttttcagagaaaggactggtacagtgtgtaacaagctggagcagacagagagactttttggcaagagatcacatccgttaagcagaatacctcagtgctacatgtttttgtctttgagacaatgtttttaaggtttttatgctctgttacctgtaagctgatacctaaaactttctgcaaagtcagggtttttcaatgccttttttttttttttgccattgtttgctttaaagtgaagattgtaactgtttgaaataaataatttctaaaactg

SEQ ID NO: 2994 - DNA, 1500 bp, Rattus norvegicus
  Genbank Accession No. M58634
cgccgagcacaaacccagcgagcattgaacactgcacacggccatctgcccagagagctgtgaccaccacttccgctactatctactcagaaagtcgtgactactgagccactgctgcctgcccagattctcatccaccgcctgctgcgtctggttgcgatgccggagttcctaactgttgtttcttggccgttcctgatcctcctgtccttccaggttcgcgtagtcgctggagccccccagccatggcactgtgctccctgcactgctgagaggctggagctctgtccacccgtgcctgcttcgtgccccgagatttctcggcctgcgggctgtggctgctgcccgacatgtgccttgccactgggtgctgcctgtggtgtggccactgcgcgctgcgctcagggactcagctgccgtgcgctgccaggggagcctcgacctctgcatgccctcacccgtggccagggagcctgtgtactagaacctgccgcacccgccacgagcagcttgtccggttctcagcatgaagaggcaaaggctgctgtggcctctgaggatgagcttgccgagagcccagagatgacagaggaacagctgctggatagcttccacctcatggccccatcccgtgaggaccagcccatcctgtggaatgccattagcacctacagcagcatgcgggcccgggagatcactgacctcaagaaatggaaggagccctgccaacgggaactctataaagtgttagagagattagctgccgctcaacagaaagcaggagatgagatctacaaattttatctgccaaactgcaacaagaatggattttatcacagcaaacagtgcgagacatctctggatggagaagctgggctctgctggtgtgtctacccatggagtgggaagaagatccctggatctctggagaccagaggggaccccaactgccaccagtattttaatgtgcaaaactgaaagttgtttcctccctccttcttcacacaaaatatttaagtatatagtgtatttatactccggagcacaccattttatatatgtgtatatgtatatatccaggaactagtttttatactccacatgctgcttgatgtacaagtgggtttgtatttattcactctaagtttatttttttctaccctgtccttgtgctgtattaatttatataactgaagcttttctcatctccatacatgtaaatactaccatctcagctcttccagagttctgctttgaaagggcagcgcggtagtgcctagaacgagcacaagtcagtctgaggtaggggcctttcagtgggttcagggaggaaggttagccctggctcggggagacttcctcatcgaatcccacaggtctgtgtctgatgcctattggctgggaaggttccgatgttggttgtgtaatcaaagctaaacgtggaaagctgcgtcccatgcactgttaaacacacgtctggaataaaacattctacctgga

SEQ ID NO: 2995 - DNA, 8275 bp, Rattus norvegicus
  Genbank Accession No. M59786
cgcagaattctaaatctgagagcaaaagctcaaattcactgccaagcgataaggccgtatgagatttttatggccttcaaacgtggccacagacattgtttctgagtttttaaaaagtacaaggaaaaatacaagtgggatagctgttcagttgtgacatcagctgttggtccccaactggagtcacaatgattcgggccttcgctcagccatccacacccccataccagccgctctccagttgcctgtctgaggacacagagaggaagttcaagggcaaggtggtacacgaagctcaactcaactgtttctacatttctcctggaggttccaactatgggagcccacgcccagctcatgccaacatgaatgccaatgcagctgcaggacttgcccccgagcacatccctactccaggggcagcactgtcctggctggcagccatcgatgccgcccggcaggccaagttaatgggcagtgctggcaatgcgaccatctctaccgtcagttccacacagcggaagcggcagcagtatgggaaacccaagaagcaggggggcacaactgccacacggccgccccgggctctgctctgcctgactctgaagaaccccatcaggagggcatgcatcagcattgttgaatggaaaccatttgaaataattattttattgacgatttttgccaattgtgtggccttagcaatctatattccctttccggaagatgactccaacgccaccaactccaacctggaacgggtggagtatctcttcctcatcatttttaccgtggaagcatttttaaaagtgattgcctacggactactcttccaccccaacgcttacctccgcaacggttggaatttactagattttataatcgtggttgtagggctttttagtgcaattttagaacaagcaaccaaagctgacggggccaacgctctgggagggaaaggagcgggattcgatgtgaaggcactgagagctttccgtgtgcttcgtcccctgcggctggtgtctggagtcccaagtctccaggtggtcctgaactccatcatcaaggccatggtgcccctgctgcacattgccctcctcgtgctcttcgtcatcatcatctatgccattatcggcctggagctcttcatggggaagatgcacaagacctgctacaaccaggagggcataatagatgttccagcggaagaggatccctccccttgtgctttggagacaggccatgggcgacagtgtcagaacgggaccgtgtgcaagcccgggtgggatgggcccaagcacggcatcaccaacttcgacaacttcgccttcgccatgctgacggtgttccagtgtatcaccatggagggctggacagacgtgctgtactggatgcaagacgctatgggctatgagttgccctgggtgtattttgtcagtctggtcatctttggatcctttttcgttctaaatctggttctcggtgttttgagcggagagttttccaaagagagggagaaagccaaagctcgaggagacttccagaagcttcgtgagaagcagcagctagaagaagatctcaaaggctacctggactggatcacccaggcggaagacatagaccctgagaatgaggacgagggcatggatgaagacaaaccccgaaacatgagcatgcccacaagtgagactgagtctgtcaacaccgaaaacgtggctggaggtgacatcgagggtgaaaactgtggagcccggcttgcccaccggatctccaaatccaagttcagccgctactggcgccggtggaatagattctgcagaagaaagtgccgtgccgcagttaagtccaacgtcttctactggctggtgatcttcctggtgttcctcaacaccctcaccattgcctccgaacactacaaccagcctcattggctcacagaagtgcaagacacggccaacaaggccctcctggcccttttcacggcagaaatgctcctgaagatgtacagcctgggtctgcaggcctactttgtatccctcttcaaccgctttgactgtttcattgtgtgcgggggcatcctggagaccatcctggtggagacgaagatcatgtcgcccctgggcatctcctgctggagatgtgtgcggctgctcaggattttcaagatcaccaggtactggaactccctgagcaacctcgtggcgtccttgctgaactcactgcgctccatcgcctccctgctgctactcctcttcctcttcatcatcatcttctccctcctggggatgcagctgtttggtggaaagttcaactttgatgagatgcagacccgtaggagcacgtttgataacttcccgcagtctctcctcactgtgtttcagatcctgaccggggaggactggaattcggtgatgtatgatgggatcatggcttatggcggcccctcttttccagggatgttagtctgtatttacttcatcatcctcttcatctctccaaattatatcctactgaatctcttcttggccattgcggtggacaacctggctgatgcggagagcctgacctctgcccaaaaagaggaagaagaagagaaggagagaaagaagctggccaggactgccagcccagaaaagaaacaggaggtgatggagaaaccagcagtagaggagagcaaagaggagaaaattgagctgaagtccattacagcagatggagaatccccgcccactaccaagatcaacatggatgacctccagcccagtgaaaatgaggacaagagtccccactccaacccagacactgcaggtgaagaggatgaggaggagcccgagatgcctgtgggcccacgcccccggcccctgtctgagctgcaccttaaggaaaaggcagtccccatgccggaagccagtgcatttttcatcttcagcccaaacaacaggttccgcctgcagtgccaccgcattgtcaatgacacgatcttcaccaacctcatcctcttcttcattctgctcagtagcatctccctggcggctgaggaccccgtccagcacacctccttcaggaaccacattctgttttattttgacattgtttttaccaccattttcaccattgaaattgctctaaagatgactgcttacggggctttcctgcacaagggctctttctgccgaaattacttcaatatcctggacctgctggtggttagcgtgtccctcatctcctttggcattcagtccagcgcgatcaacgttgtgaagattttaagagtgcttcgtgtcctcaggcccctgaggatcaacagggccaaggggctaaagcacgtcgttcagtgtgtgtttgtggccatccggaccattggaaacattgtaattgtcaccactctgctgcagttcatgttcgcctgcattggggtccagctcttcaagggaaagctctatacctgttcggatagttccaaacagacggaggcagaatcgaagggtaactatataacatacaagaccggagaagttgaccaccccattatccagcctcgaagttgggagaacagcaagttcgactttgacaatgttctggcagccatgatggccctctttaccgtctccaccttcgaggggtggccagagctgctgtaccgctccattgactcccacacagaagacaagggtcccatctacaactatcgtgtggagatctccatcttcttcatcatctacatcatcatcattgccttcttcatgatgaacatcttcgtgggtttcgtcattgtcaccttccaggagcagggggaacaagaatacaagaactgtgagctggacaagaaccagagacaatgtgtggaatatgccctcaaggcccgacccttgccaaggtacatccccaagaaccagcaccagtacaaagtgtggtacgtggtcaactccacctacttcgagtatctgatgttcgtcctcatcctgctcaacaccatctgcctggccatgcagcactacggccagagctgcctcttcaaaatcgccatgaatatactcaacatgcttttcactggcctcttcacggtggagatgatcctgaagctcattgccttcaaacccaagcactatttctgtgatgcatggaatacatttgacgccttgattgttgtgggtagcattgttgatatagcaatcaccgaggtacacccagctgaacatacccaatgctctccctctatgagtgcagaggagaactcccgcatctccatcaccttcttccgcctcttccgggtcatgcgcctggtgaagctgctgagccgaggggaaggcatccggaccctgctgtggaccttcatcaagtccttccaggccctgccctatgtggcccttttgattgtgatgctgttctttatctatgcagtgattgggatgcaggtatttgggaagattgccctgaatgacaccacagagatcaatcggaacaacaacttccagacgttccctcaggctgtgctactgctcttcaggtgcgccactggggaggcctggcaggatatcatgctagcctgtatgccaggcaagaagtgtgctccagagtctgagcccagcaacagcacggaaggggagacaccctgtggcagcagtttcgctgtcttctacttcatcagcttctacatgctctgtgccttcctgatcatcaacctctttgtagctgttatcatggacaactttgactacctgactagggattggtctatccttggtccccatcacctggatgaattcaagagaatctgggccgaatatgaccctgaagccaagggtcggatcaaacacttggatgtggtgaccctcctccgtcgaattcagcccccactgggttttgggaagttgtgtcctcaccgtgtggcctgcaaacgcctggtgtccatgaacatgcctctgaacagtgatgggacggtcatgttcaatgctacactgtttgcccttgtcaggacagccctgaggatcaaaacagaagggaacctagagcaagccaatgaggagctgagagccatcatcaagaaaatctggaagaggaccagcatgaagctgttggaccaggtggtgccccctgcaggtgatgacgaggtcacagtgggcaagttctatgccaccttcctgatccaagagtacttcaggaaattcaagaagcgaaaagagcaggggctggtcggcaagccctcgcagaggaatgcactgtctctgcaggctggcttacgcaccttgcatgacattgggcctgagatccggagagccatctctggggatctgacggctgaggaggagctggacaaggctatgaaggaggcagtgtctgctgcctccgaagacgacatcttcaggagggctggaggcctgtttggcaaccacgtcagctactaccagagtgacagcaggagcaacttccctcagacgtttgccacccaacgcccactgcacatcaacaagacagggaacaaccaagcggacaccgaatcaccgtcccatgagaagctggtggactccactttcacccccagcagctactcatccacgggctccaatgccaacatcaacaatgccaacaacactgccctgggccgcttcccccaccctgctggctactccagcacggtcagcactgtggagggccatgggcctcccttgtcccctgctgtccgggtacaggaggcagcatggaaactcagctctaagaggtgccactcccgagagagccagggggccacggtgagtcaggatatgtttccagatgagacccgcagcagcgtgaggctgagcgaagaagttgagtactgcagtgagcccagcctgctctccacagatatactctcctaccaggacgatgaaaaccgacaactgacctgtctagaggaggacaagagggagatccagccatgtccgaagaggagtttccttcgctctgcctctctaggtcgaagggcctccttccatctggaatgtctaaagcgacaaaaggatcaagggggagacatctctcagaagacagccttgcccttgcatctggttcatcaccaggcattggcagtggcaggcttgagccccctcctgcagagaagccattctccttccacgtttcccaggccacgccccacgccccctgtcactccaggcagccggggcaggcccctacagcccatccctaccctgcggctggagggggcggagtccagtgagaaactcaacagcagcttcccgtccatccactgcagctcctggtcagaggagaccacagcctgtagtgggggcagcagcatggcccggagagcccggcccgtctccctcaccgtgcccagccaggctggagctccaggcagacagttccacggcagtgccagcagcctggtggaagcggtcttgatttcagaaggactgggacagtttgctcaagatcccaagttcatcgaggtcaccacacaggagctggctgacgcctgcgatatgacaatagaggagatggagaacgccgcagacaacatcctcagcgggggcgcccagcagagccccaacggcaccctcttaccttttgtgaactgcagggacccagggcaggacagggctgtggtcccagaggacgagagctgtgtatatgccctggggcgaggccggagcgaggaagcgctcccggacagcaggtcctatgtcagcaacctgtagtccgcaggctggcgagacgcgggtgttttttattcgtttcaatgttcctaatgggttcgtttcagaagtgcctcactgttctcgtgacctggaggtaaccggaacagcgtcttcattcactgctgtcgggataagcctcagagctgggcggtgtaccgaagtcggcttttcagggagaagccaaggccgttggtgcgggggctccagcaccttcccacggcagcaccgcccaaaggaccccaccccccctaagcaaaagggtgttttccccttgcttgtataaacagtcatttgcacatgttctgtctgagcctggccgtctctatggagcagggccccagggatctatggcaggaatgggccagtgtccccagtaggagccggaaggtggctgcaaggttcccagcagtgcagatctggtccctatgtcccttcagggacccttcccctgctggaactgaggagcaggtgcaggagccagtgcagaccacaccacctgccctcagctagccagacctgggggcgcaggctgcttgcctggtgctctgggtttcatagtttgatggttcttgtcagcatgttgcggttttctaggttttgatttctttattactatttgttgtgttttccacggggaggggaggaagaagagcgtttacaactgcgcagcctcacttcaccggttccacatttgcatatttaagttggatttggtttattgtattctttaaatggtgcggtccaacccccaccctcacccctattggagcaagggttcattatcaccaacggggttcattatcaaccaacggggaggttttacctgctctgtgtatgcccaagtaacatgttacaattttccttaagtcaaagcaactttttcccctttcggtttggttgagcatcacgacctgcaggttaacagtcagtttagataaggcggtgtgtgcctgggcgactgagctgggctcctttctgggcatatggattggttcaggagagaagaaatatgggcatctttgcgtcacacgtgtgtccatagtgggtcgtcttgtgtgtctgtgcatccacacggtacgtgagcaccccgccccacccccgctcaaagtctgtagatcccgttcgggtttgacggccggggagttcaaaatctggggcgattcgaaagcaagaacaaaccactgtctctgcttctgcttctgaaacgagaatctggtaactgcattttctgtcccacgagatatgcaaaagcaatgcaataatatccattttaaaatacgattgtgagttgtgtcacagcattaaaattctattttaaaaaaaacatgaaatttaaggggaaaaactccaagaagacattttgactttcgatatattctgtgtaatgttttattgcattgataatgtttctgttgaagaaactgttatacttgaattcaggtcagtttcagtatttttcaaatatttttttaaaactgaattgcaattgtgccttgcaaatataatgacttaagtttgttttaaaattcacttcttgtatattttgctgcatgtaaagtaaatcattttgtatttgg

SEQ ID NO: 2996 - DNA, 3109 bp, Rattus norvegicus
  Genbank Accession No. M59861
cccgtctgggagctcgcggttcctgtgctgactctcaaagggctgactgaccctcgcacctagcaggtacttctggattgcaagtccagggttctgggccggtgaccctgttttctctacttcctgtctttgaccttgggtaccttccaacccactgttgccatgaagattgcagtaatcggacagagcctgtttggccaggaggtttactgccagctgaggaaggagggccacgaggtggtgggtgtgttcacaatcccagacaaggatgggaaagcagaccccctgggcctggaggctgagaaggatggccgtgccgtgttcaagtttcctcggtggcgtgctcggggacaggctctgcccgaggtggtggccaaataccaggctctgggtgcagagctcaatgtgcttcccttctgcagccagttcatacccatggaggtcattaatgcccccaggcacggctccatcatctaccatccatccctgctacccaggcatcgaggggcttcggccatcaactggaccctcattcatggagataagaaaggaggcttcaccatcttctgggctgatgatggcctggacactggtgaccttctgctgcagaaggagtgtgaggtgcttccagatgacaccgtgagcacgctgtacaatcgtttcctcttcccagagggcatcaaagggatggttcaggctgtgcgactgatcgcagagggtacagccccccgctgcccccagtctgaggaaggagccacctatgagggcattcagaagaaggagacagccaagatcaattgggaccagccagcagaggccattcacaactggatccgtgggaatgacaaggtgccaggtgcctggacagaggcttgtgggcagaagctgacatttttcaactcgacactcaacacttcaggactgtcaacccagggagaagctttacccatcccaggagcccatcgtccaggcgtggtcaccaaagcaggactcatcctctttgggaatgagcatagaatgttgctggtgaagaacatccagctggaagatggcaagatgatgccagcctcccagttcttcaaggggtccgctagcagtgacctggagctgacagaggcggagttggccacggcggaggctgtgcggagctcttggatgcgaatcctgccgaacgtcccagaggtggaagactctacagatttcttcaagtcaggagctgcttctgtagatgttgtgaggctggtggaggaagtgaaggagctgtgtgacgggctggagttagaaaatgaagacgtttacatggccaccacctttagggagtttatccagctcctagtgaggaagctgagaggggaggacgacgagagcgagtgtgtcattaactacgtggaaagggcagtgaacaagctgactctccaaatgccctaccagctcttcataggcggcgagttcgtggacgctgagggctctaagacctacaataccatcaacccaacggatggaagtgtcatctgccaggtgtccctggctcaggtgagcgatgttgacaaggcagtggcagcagcaaaggaagccttcgagaacggactgtggggaaagataaatgctcgtgaccggggccggctcctgtacaggttggcggatgtcatggagcagcaccaggaagagctagccaccattgaggccctggatcgaggtgccgtctacacgctggccctgaagacgcacgtgggcatgtccatccagaccttccggtactttgctggctggtgtgataagatccagggtgccaccatccccatcaaccaggctagacccaaccgcaacctgaccttgaccaagaaggaacctgttggggtctgtggcattgtcatcccctggaactatcccttaatgatgctatcctggaagactgcagcctgcctggcggctgggaacaccgtggtgatcaagcctgcccaggtgaccccactcacagccttgaagtttgccgagctgacactgaaggctggcattcccaagggtgtggtcaacatcctcccaggatctggatccctggttggccagagactctcagaccaccctgatgtgaggaaaatagggttcacaggctccacggaggtggggaaacacatcatgaaaagctgtgctctgagcaacgtgaagaaagtctccctggagctgggtggaaagtcaccccttatcatatttgctgactgcgacctcaacaaggccgtgcagatgggcatgagctccgttttcttcaacaaaggggagaactgcattgcggcaggccggctctttgtggaggagtccatccacaaccagtttgtgcagaaagtggtggaggaggtggagaagatgaaaatcggcaatcccctggagagggacaccaatcatggcccgcagaaccatgaggcccacctgaggaagctagtggagtattgccaacgtggtgtgaaggaaggggccacactggtctgtggtgggaaccaagtcccaaggccaggattcttctttcagccaaccgtcttcacagacgtagaggaccacatgtacatcgctaaggaggagtcctttgggcccatcatgatcatctctcggtttgctgatggggatgtggatgctgtgctgtcccgggccaatgccacagaatttggcctggcctctggggtcttcacccgcgatatcaacaaggccctgtatgtcagtgacaaactgcaggcaggcactgtgttcatcaacacgtataacaagactgatgtggccgcaccttttggaggattcaagcaatctggatttggcaaagacctgggagaggcagccctgaatgagtacctgcggatcaagactgtgacttttgagtactgaagccaagtctgtgatatttctcctgtaccctgttgcctcccctcagggagccctggcccctgtctggtgtcttagcaccctcctgtccccaacactgttcccttcagctgctggagctatcagtgtggacccctgctggtgacaggacacctccggacaattggaagtggttccaagtggagtgagcagtcatgtcccggatgaataaaggttgtgagcagaagtcacctgcaaaaaa

SEQ ID NO: 2997 - DNA, 4190 bp, Rattus norvegicus
  Genbank Accession No. M60103
ttcaagatcctgtacaatgggcagagcgtggaggtggatgggcactccatgcggaagctgattgcagacctgcaacccaacacggagtactccttcgtcctgatgaaccgcggcagcagcgctgggggcctacagcacctggtgtccatccgcactgccccagacctcctgcctcagaagccactgcctgcctctgcctttatagaggatggccgcttctccctctccatgcctcaagtgcaggacccctcgctagtcaggtggttctacattgtggtggtgcccattgaccgtgtgggcgggaacctgctggcaccaagatggagcacaccagaggagctggagctggacgagcttctggaggccatcgagcagggtgaggagaaacagcggaggcgtcggcgccaagcagagcggctgaagccttacgtggcagctcaagtggacgagctccctgagaccttcaccctgggggacaagaagaactaccgtggcttctacaaccggcccctgtctccggatctgagttaccagtgctttgtgctcgcctccctcaaggaacccatggaccagaagcgctatgcctccagcccctactcggacgagatcgtagtccaggtgacaccagcccagcagcaggaggagcccgagatgctgtgggtgacaggccctgtcctggcagtcattctcatcatactcattgtcatcgctatcctcctattcaagaggaagagaacacattccccatcgtcaaaggatgagcagtcaatcgggctgaaggactccctgttggcccactcttctgaccctgtggaaatgcgaaggcttaactaccagaccccaggtatgcgagaccacccgcccatccccatcactgacctggcagacaatattgaacgtctcaaagccaatgatgggctcaagttctcccaggagtatgagtccattgaccctggacagcagttcacgtgggagaattccaactcagaggtgaacaagcccaagaaccgctatgcaaacgtcattgcctatgaccactctcgagtcctcctcacctccattgatggtgttcctgggagtgactacatcaatgccaactacattgatggctaccgaaagcagaatgcctacatcgccacacagggtccgctgcctgagaccatgggtgatttctggaggatggtgtgggaacagcgtacagccacagtggtcatgatgaccaggctagaggagaaatcccgggtgaagtgtgatcagtattggccagcccgtggcactgagacctatggcctcattcaggtgaccctggtggacactgtggagttggccacgtacaccatgcgcaccttcgcactccataagagcggctccagtgagaagcgtgagctgcgtcagttccagttcatggcctggccagaccatggggttcctgagtaccccactcccatcttggccttcctgagacgggtcaaggcctgtaacccgctagatgcaggacccatggtggtgcattgcagtgctggtgtgggccgcacgggctgcttcattgtcatcgacgcaatgctggagcgtatgaagcacgagaagacagttgacatctatggccacgtgacgtgcatgcgctcgcaaaggaactacatggtgcagacagaggaccagtatgtgttcatccacgaggcactgttagaggctgccatgtgcggacacactgaggtgcttgctcgaaacctctatgcccacatccagaagctaggccaagtgcctcccggggagagtgtcactgccatggagcttgagttcaagttgctggccaactccaaggcccacacgtctcgcttcattagtgccaacctgccctgcaacaagttcaagaaccgcctggtgaacatcatgccctatgagctgactcgagtgtgcctgcaacccatccgtggtgtggagggctctgactacatcaatgccagctttctagatggctacagacagcagaaggcctacatagctacacaggggcctctggccgagagcaccgaggacttctggcgcatgttatgggagcacaattccaccatcatcgtcatgctgacgaagcttcgggagatgggcagggagaaatgtcaccagtactggccagcagagcgctctgctcgctatcaatactttgtcgttgacccgatggctgagtacaacatgccccagtatatcctgcgtgaattcaaagtcacagatgcccgggatgggcagtcaaggacaatccgacagttccagtttacagactggccagagcaaggagtacccaagacgggggaaggcttcatcgacttcatcgggcaggtgcacaagacaaaggagcagtttggacaggatgggcccatcacagtacactgcagtgctggtgtgggccgcacaggggtgtttatcaccctgagcattgtcctggagcgcatgcggtacgagggcgtggttgacatgttccagaccgtgaagaccctccgcacacagcgccctgcaatggtgcagacagaggaccaataccagctgtgctaccgtgcggccctggaatacctcggcagctttgatcactatgcaacgtaactactgctcccctctcctccgccgctcccctgaggggctccggaggggacccagctcctctgagccataccgaccatcgtccagccctcctgcacggatgctgttgccggcagagcacagcccactgggatcacagcatttcgggaacattgccacaccagtcagagagcccagaacacctgggcaagtaggcggactggcagcctggctctgggccctcgtccaccgggcccaagtggagccctgcttcaagctctctgttcagctccgcgattctcatgcttctcatggggtgggaaagggggcagagccccccacgttttatacatttaggcggggtagactgcggggtcctagcctcttcctccgactttccttttgcaggtctttcactacagattgggctgctgtgggagttgggacttacttgttttcctttttgagttcacgttggatccttgtacaacttctgcggaaggacacagtacacgctttccttcctcgagcagagctagggccctacctgagcaagtcggctgtggcccgggaggcagctgagactcctgctgtcctccagcctttcagaggagatcctattccagccaaatgcagggaaacactttattttgttttaggttttgtttttccttgagagcctttttttaggccccacagacagtggtgggcggggaggcgataggaaacacatccccagtgtgcatttaacattcatagcctacaaccacagacgtgtctggggggagcctggcaaggcgttcctcgtcaccatcgtgtttgcaaaggttcaaaaaagcaaaaattaaaaaaaaaaaaacataaaaatatttttttttaaaaaaaagaaataaagattcatcccctggcctctccttctgctccgaagtgggaggcaactcaatgtgcctggggctcgttgtgggcccacagagtcttgctgtcatccccagcggtgcagtgtggcaggtgtttgtaagctgtgggttctggccacctcggtaactgaatggcacaggtgagggcctgtgccacgccccacacacctcagggccaagcgggggcgtggccggcccttcaggtctagccagtgggcctggtagcacatgtctgtcctcagcgggacagatgctttctctcctggtttgcagctgtcttcaaatcccccatgactcgcccttcccactccttcaagtcgccctcacaaaccaatgtggcaagactactggacttgtatccatggtactctactcagtcctcttatctcagcttgctgaggggcagggagagggtctcttcctctgggcagcactatctaggtagtaagtgggggcgggaaagggtgcatagctgttttagccgaaggactcgatgtggacgtcctcagatatagctaggctaagcggagatcgacggtccggggttggtggtgttggatgagacattcatttttaccttgtggacgctagtgctgtagagttcactgttgtacacagtctgttttctatttgttaaggaaaactacagcatcattgcatacttcttgatggtaataaatttgaataatcagatttcttaca

SEQ ID NO: 2998 - DNA, 1491 bp, Rattus norvegicus
  Genbank Accession No. M60753
cctgttgttggccctcctcctgctcttgcgacacctgggctggggcttggtgactattttctggtttgagtacgtgctgcagccagtccacaacctgatcatgggtgacacaaaggagcagcgcatcctgcgctacgtgcagcagaatgcaaagcctggagaccctcagagcgtcctggaggccatcgacacctactgcacacagaaggaatgggccatgaatgtgggtgacgcgaaaggccaaatcatggatgcagtgattcgggagtacagcccctccctggtgctggaactgggagcttactgtggctactcagcagtgcgaatggctcgcctgctgcagcctggagccaggcttctcaccatggagatgaaccctgactacgctgccatcacccagcaaatgctgaactttgcaggcctacaggacaaagtcaccatcctcaatggggcatcccaggatcttatcccccagctgaagaagaagtacgacgtggacacactagacatggtctttcttgaccactggaaagaccgctaccttccagacacacttctcctggagaaatgtggcctgctgcgcaaggggacagtgctcctagctgacaacgtcatcgtcccgggaacccctgacttcctggcgtatgtgagagggagcagcagcttcgagtgcacacactacagctcatacctggagtacatgaaagttgtagacggcttggagaaggcaatctaccagggtccaagtagccctgacaagtcttgatccctcagcctgcccccctgctccccttccagcttctctctgcgagatgacacacattcaatctgaccctttctatgctcctggggcttgtcctcgggggctgtggttccagactgtcatacactggcacattttaaaggtagtgagcccactatgcaaaatcacttcaataaccctgaaaagcacctatggatgaaaggctgaattgaggccaaaggtacactagatcacagcctgcccagcatgcaaaaggcctcaaggttaatcctctgcacccgagcctcatggtctcgctaactagaagaggagatcttcacggggtttcagtgtgggatcactaggcattgtatcaccagttaggcccagcaggaagtcagcaaactgtaaatgtccagacgccaaataacagcagaggctcagagacagtactgtcacttactgtccccagcagctcacaccacatctcatctgaagaatgagtcacaagctttccaggtatggtggtgcacgcctgtcatccccagtatccaggaggcagaggcatcggagttcagcgccagcctggtctacataagtgagttccaagacagccagggctacgtagaaatacatttttaaaaaagttataaccttggggttggggatttagctcagtggtagagcgattgcctagcggggcgcggggccctgggttcggtccccagctccggaaaaaagaaaaaaac

SEQ ID NO: 2999 - DNA, 923 bp, Rattus norvegicus
  Genbank Accession No. M62388
gggactcttttctttcagactgaccgcggggcagctgcggagcatgtcgaccccggcccgtaggaggctcatgcgggatttcaagcgattgcaagaggacccacctgtgggggtcagtggtgcaccatctgaaaacaacatcatgcagtggaacgcagttatatttggaccagaagggacaccctttgaagatggtacttttaaactagtaatagaattttctgaagaatatccaaataaaccaccaaccgttaggtttttatccaaaatgtttcatccaaatgtgtatgctgacggcagcatatgcttagacatcctgcagaaccgatggagccccacgtacgacgtctcctccatcttaacttcaattcagtctctgttggatgagccgaatccaaacagtccggccaatagccaagcagcacagctttatcaggaaaacaaacgggagtatgagaagagggtttcggccattgttgagcagagctggaatgactcataatagacacctggtctgtccacctttccatcgtcgttgtgtataatttacctcccagtaggaaggctagcaagttttaagtgccacgggttttaaggattctgcagagaaaaaagaaaaagtccttcagtttagaacctacaaaagcttgtgtatcttgattaatgtactttttattgcatggtgtgaactaagttattgctgcataaatttgtaatatatcctgtttgtatttttttccaagtgtataatgttggtgtggagttttcatgacagaatatacacattttgtaaatctgtacttttttcaaatattgaatgccttatttttgaattctttagatttttaaattggagaaaagcacttaaagttttttatatatgaatattacatgtaaagctgttaaaatacataacttcagtg

SEQ ID NO: 3000 - DNA, 1893 bp, Rattus norvegicus
  Genbank Accession No. M63282
tgtctcactcagcgagacgcgcggtgcacggtgcttccccggcggacgaccgaccaacccgcgctccggcagagtccttggcgctcgcctgccggcgggacagacagcccgcctctagccgctctctggaccctggccgccccgagcgaagactggagcaaaatgatgcttcaacatccaggccaggtctctgcctcagaagtcagcgcgaccgccatcgtcccctgcctctcacctcctgggtcactggtgtttgaggattttgctaacctgacaccttttgtcaaggaagagctgagattcgccatccagaacaagcacctttgccatcggatgtcctctgcgctggagtcagtcaccatcaacaacagacctctggagatgtcagtcaccaagtctgaggtggcccctgaagaagatgagagaaaaaggaggcggcgggaaagaaacaaaattgctgctgccaagtgtcgaaacaagaaaaaagagaagacagagtgcctgcagaaggagtcagagaaactggagagtgtgaatgccgaactgaaggcccagatcgaggagctgaagaatgagaagcagcatctgatttacatgctcaacctgcaccggcccacgtgtatcgtccgggctcagaacgggcggacgccggaagacgagaggaacctttttatccaacagataaaagaaggaacattgcagagctaagcagaggtggcatgggggcaattggggagtccttactgaatcctccttttccaccccaaaccctgaagccattggaaaactggcttcctgtgcacttctagaatctcagcagccacgagctgttgggtcaggagggcctgcggtgactactgcgttgtcccactctgtccccgagtgaaccgtggagcaggcaggagcatcctttgtctcaccggctccaggatttaggccttaccatcccggccattctcagatgacctagctggccccaggctggggtcccatgcaaagcaggatcgcactaatgggatgcaggcagaagtgtctaccttgacaggtggggtggaccacgtcctccactgcggctgacaacatccctcctagggaagatggagtgagaacattcatcattgaagttgtccaatggccagggtatgctttctagaaactatgctgttctgtcctagactgactgtgcatagggcattcatttctgagcctggtgttgtgctatttagatgtttgtcttgcacaacattggcgtgatttttttccgggagtttcatcagacctgatttccgagagtttgggggtctgccactgtggacaatatcccccaaaagtgtttgggtggccatgtaaactggctgatgaccagctgtgctactctgtgctgaccgaggactgatgcctccttcccctgtacccactgctgaggaagaacccgggcacagcagctgtccttggctacaaactgttacaatgtcacagaacgaaggcacaaagtcccgctttcaaagggcgtaggactccacactcagtgacagggcaggaagagccaaggattctccgttttcccttccttcccaccaaaaaccacagcccgtggagactggtatttgaagccaggagtggggcaaggaaggtgtctgcactgtgggatgttaactgcgcttttgtcttgaagctattttgagatgcggtccagagtatttcagctgggaggtccctcccactggccaccagggctctggctactgttaaaattctgatgtttctgtgaaatcctcagtgttcaatccagactcagtagtatattacagttttctgtaagagagaacgttacttatttatcccagtattcctagcctgtcaacgtaataaaatatcagaatgagacctggt

SEQ ID NO: 3001 - DNA, 853 bp, Rattus norvegicus
  Genbank Accession No. M63983
ggcacgagggacttacctcactgcttttcctagcggtacgacctcctccgccagcttcctcctcagaccgcttttcccgcgagccgaccggttctgtcatgtcgaccctcagtcccagcgtcgtgattagtgatgatgaaccaggttatgacctagatttattttgcatacctaatcattatgctgaagatttggaaaaggtgtttattcctcatggactgattatggacaggactgaaagacttgctcgagatgtcatgaaggagatgggaggccatcacattgtggccctctgtgtgctgaaggggggctataagttctttgctgacctgctggattacattaaagcgctgaatagaaatagtgataggtccattcctatgactgtagattttatcagactgaagagctactgtaatgaccagtcaacgggggacataaaagttattggtggagatgatctctcaactttaactggaaagaacgtcttgattgttgaagatataattgacactggtaaaacaatgcagactttgctttccttggtcaagcagtacagccccaaaatggttaaggttgcaagcttgctggtgaaaaggacctctcgaagtgttggatacaggccagactttgttggatttgaaattccagacaagtttgttgttggatatgcccttgactataatgagcacttcagggatttgaatcatgtttgtgtcatcagcgaaagtggaaaagccaagtacaaagcctaaaagacagcggcaagttgaatctacaagagtcctgttgatgtggccagtaaagaactagcagacgttctagtcctgtggccatctacttagtaaagctt

SEQ ID NO: 3002 - DNA, 3662 bp, Rattus norvegicus
  Genbank Accession No. M64301
agacctgccgggcgcatatttattcacagttttgtcccatgttaagtcggttagcatagtgaatctgagtgcatagtatgtcatttcattccgttgagtttctcgagtgttttctttaaatgtctgcagagtcgctacccttccttgaactatgaagcactgcaatcttcttaattctcagtatgaagagagatttttgagctttaagtctgaggggaactcagcaggcctggttggcgtctgcaatgaacatcaagaaaccatcgtgctgtgggaatgtgatcgtttttctccctttttgagagatctttccttttgatgccagttttcttccttgtttacacaagttcaacaatttgaaaggaaaaggcaattgtaagggttttaaaatggcagagaaatttgaaagtctcatgaacattcatggctttgatctgggttccaggtacatggacttaaaaccattgggctgtggaggcaatggcttggttttttctgctgtagacaatgactgtgacaaaagagtagccatcaagaaaattgtcctcaccgatccccagagtgtcaaacatgccctccgtgaaatcaaaattattagaagacttgaccacgataacattgtgaaagtgtttgaaattcttggtcccagtggaagccagctgacagacgatgtgggctctctaacagagctgaatagcgtctacattgttcaggagtacatggagacagacttggcgaacgtgctggagcagggccctttactggaggagcatgccaggctcttcatgtaccagctgctgcgtgggctcaagtacatccactctgcaaacgtgctgcacagggatctcaagccggccaaccttttcattaacactgaagacttggtgctgaagattggtgactttggcctggcccggatcatggatcctcattattcccataagggtcatctttctgaaggattggttaccaaatggtacagatctccacggcttttactttctcctaataactatactaaagccattgacatgtgggctgcaggctgcatctttgctgaaatgctgactggtaaaaccctctttgcaggtgcacatgaacttgaacagatgcagctgatcttggagtctatccctgttgtgcacgaggaagatcggcaggagcttctcagcgtgattccagtttacattagaaacgacatgactgagccacacaaaccgctgactcagctgcttccggggattagtcgggaagcactggatttcctggaacagattctgacgttcagtcccatggaccggctgacagccgaggaagcactttcccatccttacatgagcatctactctttcccaacggacgagcctatttccagccatcctttccacatagaagacgaagtggacgacattttgctaatggatgaaacacacagtcacatttataactgggaaaggtaccacgattgtcagttctcggagcatgactggcctattcataacaactttgatatcgatgaggttcagcttgacccgagagctctgtctgatgtcaccgatgaagaagaagttcaagttgatcctcgaaagtacttggatggagaccgagagaagtatctggaggatcccgccttcgacaccagctactctgctgagccttgctggcagtacccagatcaccacgagaacaagtactgtgatctggagtgtagccacacctgtaactacaaaacaaggtcgccatcatacttagataacctggtgtggagggagagcgaggttaaccattactatgagcccaagcttattatagatctttccaactggaaagagcaaagtaaggacaaatccgacaagagaggcaagtccaagtgtgagaggaacgggttggtcaagcgcagattgcgcttgaggaagcgtcccagcagctggctgagagggagaggggccaaggctttgactttgatgccttcatcgcaggcaccgttcagctcagtgcccagcgtgagtctgctgacgtagttgacaagttaaacgacttgaatagctcagtgtcccagctagaaatgaaaagcctgatatccaagtcagtcagccgagaaaagcaagaaaagggaagggctaacctggcccagctgggagccttgtaccagccctcctgggagagccagtttgtgagtggcggggaggagtgcttccttatcagtcagttttgttgtgaggtcaggaaggacgaacacgtggagaaggagaacacttacaccagctatttggacaagttttttagcaggaaggaggattctgaaatgctagaaactgagccagtggaagaagggaagcgtggggagagaggccgtgaggcagggcttctgagcagcggtggggagtttctcctgagcaggcagctagagtccataggcaccccgcagttccacagtccagggggatccccactcaagtccatccaggccacgttaacaccttccgctatgaaatcttcccctcaaatccctcacaagacatacagcaacattctgaaacatctgaactaaacactcagcagacacttcttttgttcttcatgaaatgtgttgtgtcttttttatcactaatgttttaagtcattttttttttacttgaatcagaaggtgtcattaatttgcaaggatttttcttggttctcagtttgtaaaacacagagttttttctacatgtgagttagttttcatttgaactggcatgtcgtttgcacacacacaaagaatagagcaaaacaatgcagtgcaggaggagacaagatgcgctaggatggacagacattctcacagaccagtgacctgcttacaggaaacaaaaccttgccttgaaacttacacagtgagactgtacataattgcatgaaaagatctatttttttcctgaaacatttttcattcattagtattttcaagtttttcatactgtacacatttcttaagacacatgataccagcagcaactgaaaacgaatgccgaatttggtacacatgtgttatctacctcaaggtaacaaaagtatgcgggcgaaacctaacccacccatagtcgtccgcggcatatgcacttgtatctagccagcgttggccgcagtaaccaatgagactcgtccgccatttatcaatgtcctggtgttcatcctttacagtgaagtgttagatacatcacatcttatttatttttagcaaatcagtatattttctgtatttaattataaaaggtaacttagtttaagtttatttgcaactgcccttcttcccgtttggcactatggtttgttgcctgccgagctgatctgagaagtcagcttgtcccgaggctgtccatgtacgttaagtaaagtgctcactgtgtataggaatctgtattttggaggtgcttgatctatctacaaagaaaaaaattaggaatttattataaaatgctcctagaagtcttaatggtgtttattttttaaaaccttgtaatgttagacttgtgtgcatggaagtgattaaggtacatcattattgtagtttgaacattgtacatgataagccttcccccacccccgtttttactgtatgtttttattgaatgatctattccccatccctaggcaagcatgaataaaattaggttaaatgt

SEQ ID NO: 3003 - DNA, 945 bp, Rattus norvegicus
  Genbank Accession No. M64392
atgacagaagagaaccaaactgtgatctcccagttccttctccttttcctgcccatcccctcagagcaccagcacgtgttctacgccctgttcctgtccatgtacctcaccactgtcctggggaacctcatcatcatcatcctcattcacctggactcccatctccacacacccatgtacttgtttctcagcaacttgtccttctctgatctctgcttttcctctgttacgatgcccaagttgttgcagaacatgcagagccaagttccatccatcccctttgcaggctgcctgacacaattatacttttacctgtattttgcagaccttgagagcttcctgcttgtggccatggcctatgaccgctatgtggccatctgcttcccccttcattacatgagcatcatgagccccaagctctgtgtgagtctggtggtgctgtcctgggtgctgaccaccttccatgccatgctgcacaccctgctcatggccagattgtcattctgtgcggacaatatgatcccccactttttctgtgatatatctcctttattgaaactgtcctgctctgacacgcatgttaatgagttggtgatatttgtcatgggagggcttgttattgtcattccatttgtgctcatcattgtatcttatgcacgagttgtcgcctccattcttaaagtcccttctgtccgaggcatccacaagatcttctccacctgcggctcccatctgtctgtggtgtcactgttctatgggacaatcattggtctctacttatgtccgtcagctaataactctactgtgaaggagactgtcatggccatgatgtacacagtggtgacccccatgctgaaccccttcatctacagcctgaggaacagagacatgaaagaggcactgataagagtcctttgtaaaaagaaaattaccttctgtctatga

SEQ ID NO: 3004 - DNA, 19080 bp, Rattus norvegicus
  Genbank Accession No. M64733
  misc_feature (1)..(19080): n = a or c or g or t
tcaacggatctcactcttgactgtccagtgccagcaccttagcaaactcccccagcttggaggcagtggcccaccacatcatggaggtgtcgtctgagcacaggttccggaagactgtcaaagtctgccttaataggcaggggtactcaggggtagcaaactgagaagagaccacaggccaaggtgtgggaggtgaaccagtctctacccaccagccacttcatcagaggcaccaagtgagcctctaaaacggaaggtgggtgctcatgtgagatgccccacacggactttactactgtctcttccactgtggccagtgactcaagaggtggcagcagacagtgtcacatactcaggacctcccaccaaagtgtgaggctcccagctattcagccaaggccaagaggaccttggtgtcacagatggcatctgtaaggaagggcaggagctaacttctggttcattcaatgacaaaggcaaaggccatggtggagagcatcttgatacagttgagacagagctgagtgtcctcatcacacagttcatctatgagcaccatggtggggtagagcgaatcgttgccgttgacagctgctgtcttggctccttggcatttctttttaaaaagaagagaaaaaggtcagcagtctgttttacttatgtttgtttgtaaatacacacactgtactagaagcatgaaattcagaaagaagctgacagtaagatggatagggaggttggttactgactgtgtattcaccttaaatctctgagggaatgtggagccagcaatgactgtgtgtttgtgtctccaagcctagcccacaggttagcttacattggtgtgaggaacacagtattgtataacaccatacaaaagtgagcagagacagggcccatgaaatcacaagtagaaagtgtttgttactgttccacctggtcacccaaccaggtgtcctgtgtgtctaaaagccacacagaaagacaaaatggagtatgtttggggtggggcgaagagagtgaggtattggcagcccacgtgcgaaggggattgaaggaaacatgggtaagattggatacaagttgggttttcagctgtttgaagaattggcttgtagaggaaaggacactatattgtgcactgtcttaggaataagacacaggaggccgttgtatggaggaaaatgcaggggcttcacgagagtgagcaaagacctgctagaggtcttctgagtccccatgctctctgtgtgtttatatatgcatatacatagcatattaatgtattaataaattacatatataataagacaagatatattatgtatatgtggtgtttgaatatgcttggaccagggagtggcactatcaggaagtgtgaccttgttggaagaaatgtgtcactggttgtgaactttgagaccctcctcctagctgtctggaagacagtcttctcctggctaccttggatcaagatgtagagctctcagctccttctccagcaccaggtcttcctggatgctgccatgctcctcccttgatggtaatggactgaacctttgaacctgtaagccagccccaattaaatggtgtcctttgtaagagttgccttggtcatggtgtctcttcccagcaataagaccctaagtaagacagaatatattaactatttatctattcagatgctgtgacaggttaaaccattctctctgatagggagaactcagctattggtaattttagtataatttaattgaattttttagacaggatcttacatatctcaagccggcttcaaactcttatatagccaaagatgatcttgacatctggattctcttgcctttgccccctgagacctgggtttcagcatgcgccatcacaactggagtatgtggttctgggaattgtaccaagatcctcatgcagccttaggtaagcctaccaactaagctttgtccctgggcctcattggtaatatttagaattaccaagtagttcttttggttagccattgactggttctacagaaatcacagctgtgaagtaataattggggtcagggtgattgtagaagaaatcttgatttgaagccgattcttttggccaattgtcttggggctcattagcttacattcatagataaaggctgtgataaaggctgtgactgggaagtttcgaaatgaaattcagaaagcgtggcccgtctgcagcatgaggaaagctaaagatggcttaaggaacatcatctttctccaggcacgtgctaagcagtctaggactgagtagccactgtcctttctcctgggaaatcccagatgggaaggatcaacccacaaagcatttctggcctcacggatgcccaagaaaaggtgctaaggaaactttctcaacccttggcagattcaaccacttatgattttattagccatggcttcgtcatgtggttgacttgatgtacccttaaagaagtgctgcctagagactggttcttagtgtgggtcacgggactctgctcatgcccacttctactttcttttcttggtaactgaagctgcctggtcgcatgctgagctcactgagccggctaatggcagggctgtaggatgtgcaggaagggcaccaggtagacagtcagatgcaaagacatttgggcagccagagatgctgagcaaagcttaaagagaaaaaatagatcaccacaaagctctttgtctcactccagccctcttccccacgaccacagagggaagaagccaagcctgagtcctccgtcacagctgcacatgtcccgtgactcagcacctcgctcgaggctaatgtggagtctttagggtaaggaagtgggtggtcctagtctgctctgcatggtcaggtcactcactcggcattgataaactcagagctgggtttggggatttcaagagcggcaaggtcagaaggtcaaagcctggaagagtccgcagatgaagataagcaaggagcttccggttccaggtctccaggggaagccgactgaggcttcaaccataagatggacttcgggagatataactagtatttctttgtgtggttctgaggacagaattgagctcagggtcagcccttacagagcagggagctccatcaaaaatggctttcctaaagaatgaattgcttgcaagggaggtagccagttctcaggttgggagcatccaaaaataaaagcaggaaaacctggcggggaccctgagagacaagtaggaagaggatcttgggtgaagggcagagtggtggccttctgcagtttccctagaatactgaaatcctagggcttgagagatgaggtagttggtaagacagaagcatgaggatctgaattggatccctggtacctgtgtacaacatggcccatactcataaaccagagctgggagggtagagttgggatcctacagattgttgggcagctggtgagttccataccagtaagcgagcctgcctaaggtacaaacagttggatggtgtaacatctgaggtcatcctgtggtctcacacatgcacgtgtatgcatttgcgcgcgcgcgcgcgcacgcacgcacacacacacacacaaatcaagaagtgcattcaagatttgtgtcagtttgcttaaagctgaattcccaagcttacaaggtttgggaacaggagaaaagtgaccacttgtaattgtgtcggggacatccttatctccctctccccagatctccctctgctaaggcatatctccctgcctgattaccaaaggacgacttttatagacactgctattgtaccctgtccctactacacacaacgggagggagctgctgatcaaaaaaagttacaaggacatcagtgtccatggaaaatgtagctgttactgataattctttctttttatttttctttataaagaaaacaaagagaagtttcggggggaggggcattcctccaagtttctgttgactctgcttttctggttagttatcttcccaaacttggcactgaaccagattaggctaaagaaagtcttagagagggctcatttcagattcatctgccccagactgaagaaactaaggccagagggcagagtggtttgtctaaaggcactggatgcctcggggcacagctgggactgaagccagccttagcccacttctgaccaagcctagacatttccagtaggctgccttttgggaaaggaccaaatcaccatagcctctgggccttggacaaatggaaatctggcctcatggctgttcctttaaagatgtgagagggaagctcggccctcgaccacacgtttctccttcaagccagttttcttttatttacatcgttttcaaggtctgccgcccaaactgcgcgctgcctacatgggttcctcgctattgcctgactcttgatacacaaatgttccagggtccagagtgggaagcttggcttctcccccaagaagtagcatggtggggggcttctaggttgtttctcctttccagagatgcctgtaacagatgtttctgctcttagccaaaagcagctaggaatcctcttagcacctctggacacagctacttaatcagcagggctccatggagaacttccactatagcttcttgttcaggaaccaatgtgaaggccaagtgtgagacaagtagtttttgtctaaaaatttgtattattatatattaattatacacaatgagtatatatatatatatgtgtgtgtgtgtgtatatatattcagcctccccccccatttccctttctcctcccataatctcttctctctgttcctctcatgaatttctttagggttgctcacaggagcatggagaggagggttattcacaggaacatggacacttaccagggactatactactgaagacagttgggtagtgtacttgaaaataggtgtgaggttcctaggtccagtgccagtgaagcccaccctgcctgactgggttccaagtgggtaagaaccatgtttaggttttatgcatctcagagacaggggaggccttctacgttatctcattcttttttttttttttttttttttttggttctttttttcggagctggggaccgaacccagggccttgtgcttcctaggtaagcgctctaccactgaactaaatccccagccccggttatctcattcttaacccgtttctgattccttcatctgtctgccaagggaccggcagcccagtgcagcatttagggagccaggtacttcatgtatgctcttccctagcaagatgcctgtaccatcttcagtttcttttactcttccattaaaataggaacaaagaaaaggagtgcagtaatgggttaatgtgaaagatgaacgtgggcgtcgggcggtgaaatcctgaacctgtttggggctaggagcggtccagagtagagtgtggattcctcttcccttaaggctcttctgttggggcctgctgagcccttaggtacctagcagagaatagaacagccatcaatctagctaggggccctcaggcaaccagcgcggtcatttgtgatgcccctgcgccccctggtgcccccgctgggctgtgcgcctctcgtcccctcccgacccccccaccaggcttccagaaagctcctagtgcattccccggcattctctggcgtgagtcacgcaggtttgcagccagccaaagggggtgtacttgagcagagcgctataaatagggcgcttccccggtgctcaccacccgcgtcaccaggaggagcgcactggagccaagccgcagacgggtgagacagctgcaccttttctaccccaacaccgaaggcacaccggcagggatgggagggcaagggtaggagccaggtagagagctgccgtgggtaagtgggaggtgctagagccccatcaccaggcagtcgagcttggggtagggggtgcacgctggctcagattcaggagccacccccccgcccctgttctttaacccgcatcacaattccaaggctgttcaataggccacatgcaaagatcttccttttgcaaaaatggggaaactgagacgtgaagcctgcagtgagatgcggatcgcgagggcgctagtnntgaacgccgcgagtaggtgcggatctctgtagtggctgttgtcttaccggcatgagtcattgcatttggaccttccctccagctcctgggacagcgcataataaataagatgttgtgtatttaaaaggacgtgctgcagccatcgagacctgctttactgaacagaatgcatgcattcagttctttagagaaatgcttccccaggcctgagatgtcnnnnctaccggatcattttatagatggtaatctgaggactggagacgataagaggttcagcctccaaacgttctatgaatgagaaactgaagccctttggctttccagaatttctagacccagttttaaaaaacggtgctggtgctgtttttaaaggacaaagttaggaattcaagagttcatacaagttctctaacaggaaggtcttgggacaataccatttagtgcctgaccttgtgagaataagaaaacaaaccacaaatggtagttggtggaatattaggcagcagcaaatgtgtgactttaaaaatatttgaaaacaggacctatgatggcattgtttataaaaatgcattgaaagaaaaggagaaaatatgccacaatggaagagactgtgttttcttactagataaggtggtccttgcgctggtggggctgttgtaccagggtagttggcagccaggcagtaggccagcctccaaatgatgacaggaagtgagtcagtgtagaggaanaggcangcnngntgagctgtgttgtcctcggaccaacagcaccacagcacctagaagcttgggagacaaacagattctgaccagagacagtattactggcagacctcaggggagtctattcttagatttacagaatagaggatcgcttctttgagatatcaggcccattttacagataaagaaacagaagctgtgagacttttgttgtcaaggaaataacctgggaggcgaatgacttttgttgtcaaagaaagaatattaaaatgaggttttggagggctgcattctttcctggggtgaccactggcttgcagtgtgtcttgagaagcccaacaggtgtcttagaagtgctgaggctgtctctctagaccccaggctccttacagctcatcttgctactgcttcccctcccattcagtgaccttccttgctgcctgcttcctcttctgggcattgtactgtcctcacatcagaagttatttccaaggcagttaaatggtttttccaaaaatggtcacacttaaggcctctcccacctacagatatctctgtggctttgtctctgatgtggcaaggggtctgtccctgcctggggcatttcaggcctcagtgagcacctgggaggtctatgagatcagggccatcctggtggatcatgaaccagggcgccagccacccaccatctctgggaaagtgcttgtctcttctcccacaccactcctctgctctgtgtgcataattatgcctcaggaaagccttgcctattaatgatctgcccagtgtcctgatgggcctgcctagctgggagcaggttttaagagcaaggcatttcaggaagacagatcgctcccctttccctgttcttgtggctgtaggaagctggtgagcccagataagccattctgggcagggttagagatgcaagatgggtgtgtgtgtgtgbtgtgtgtgtgtgtgtgtgtctctttatgcaaccaatccagcttctgggaaaggatccattgtgtaatactgggcttcggcctgtgtccctggctcaggcagccggcccagtggtggctggggcaccttggcagagcatgctagttcaggcttagagggagcaggcatgtgaaagggatttgctggagccaatgggcttgtcctcctgaaggggctttcctgggggctcactgctaatctctggctttgtccttcccttttctagtgctgccttctctacagtcctaaacagtccctcccttccctttttgattttacccaactcccctccccagtccatactcagcctggcacaagcttcacccagagatggtgcattgggttgaatttcctgtgctgatggaagggcgtgcatattaccacggactcctgaaaagcacacttagacagcctcgggaggctgtaccgtaaggggagcccaggactgtgttgtgagtgaggttcagtcccatggaagggattggcgccagccacccaccatctctgggaaagtgcttgtctcttctcccacaccactcctctgctctgtgtgcataattatgcctcaggaaagccttgcctattctgcctcggggatttatgggaagaaaggactctgcttggagcttgtcccttccaactccagatagcctgggtcctctgtgcggctgaaccatggttcttcccagggccccactgcttccattgtcttttgaaggcatgaatttaatcttgtttttgtccccacgttcttcagaagtaaactgcagtgatgccagatggggaaacagatgagggccatgagttccaatcccatcccacctcccctctcaggagcagaaaacccctaagctgcccagaggttaccatgacattctgctgttctttgcaggactccagactccaaagaggccacaccatgaagattctcctgctgtgtgtggcactgctgctgacctgggacaatggcatggtcctgggagagcaggagttctctgacaatgagctccaaggtagactaaactgctgtccctctggtgggtctggcagagccacccctcaaagttcagtccctaagtgctgagggctgtttgcatactgcacctgggactgtccatgtcctctgcactctcagagtctctaagctctagctcttgccttggtgtttttgtggtcagatgccttctagacattggcctctgtctcaagcttctctgttggctgcatgccatacctttgtttcctctaggtccccttacctggctctcctattcttctctcaaagctgtgtccggaccctttgaaagtttgtcagtctcccctttgtgtgacaaccagagttcttaccaatgtgtctccaagctgatttccccctggaaaccttgctctaccagtttccttctctggaaaagggcagcacagttcaacatgaagtagtcaactgagagcgttctctcccttcctccccatcttctaatgcttttctggaaacccgcctttccttccctccttctctcctaatctccgctcatagctgaccagttctgtgagaatttcattaaaaataatatgatctgactctctgatatggatatgcttggtgaaatgactgctgtggtcaagcgcttagctgcccatcacctcaacttattgttgggttcagacacgtgagatgcattattcacttagtgcacgtttttttttttttttttttggagctgggaccgaacccagggccttgctgtgctaggcaaggttctaccactgagctaaatccccaacccgacttagcgcacttcaagggtagaacacattgatcaaccacgagctctgcttggaccgtggaccttcaggcttagtcatgcattgagactcttgcccttgctcggcagccccccccgcccccatgcccttctgtttggaagtgtttggcagtggcatcaggtagaacacagcagaggtgtgggaaatggcacttgacacaggataagtaagtggtaccccgtgacataatgtgtcactgccttgtcaccagggctgagtcttggttacggtctctatggtgaatgcagctcttcatttatctccccgtctccatggtgtttggtgccaagtcactcatcttccggtcaccatcacctgacactgtgcattgcagcaaagaagtgccaagactgggttaacctgaatgtcacaaagatcgtgtccaaaatggcacttttattatattttgatgcttaggttaactatcttttttttctgtatttccttgaaatatcctctgtggctgttggctccccagggtggcatggtggggtcagtcatacatagtatggctgccctctttgcaccactcctgtgcttctgagctgtgacgcagggtctaccatggaccctttgatgagaccaagggacaggactgaggccacaggactgccacaggctgggggtagtagtgacagcatctcacgttgacagcctccagcactcccatcagagcatggctttctcaccgtcccgccggcttccaggctatttctccagccatttcttcccttctcaactcactgtaccttcctgtctctcacagaactgtccactcaaggaagtaggtatgttaataaggagattcagaacgccgtccagggggtgaagcacataaagaccctcatagaaaaaaccaacgcagagcgcaagtccctgctcaacagtttagaggaagccaagaagaagaaagaggtaggcccagccttgactgagccctggctctccctgctggaacacggtggcaggtgccttgctgggttgccatgtgtcctggtgcagtctttgcagggctttgctaatactgggccagactaaggagccaggaaaagcacattcgcttgtggagcctcagggctgaggtcttggatctggtttccttgcaagtctgcccaggcctgaagccaagattcatttcaataggtttttctaacccttgctgtgtgcagggcatggtgcaggactcgggagaggggtcatggcagcacctggccacttcccaccactcttttcttctgtattcaaagtggctcttaacatgaatgtgcttatttttaacatgaatggcaatattttaaagttaacgtaaaatcctcatgatctatccttagacatccattcatccccactcagcttcgggtgtggggttggggaccgttttcaaagcccttagcagaggctgaggttatgggtagaaccaggccctctatagattgtccctacctgtgataatgcttactttataaattacagacagtagggtaggagcagcaacgatgacgtagaatagttacaatgttacaccaaacaaaaggttatgcagatgcaatttctcccactctcagaatatctcagttcctcagcctcagcaacactatttttagactgtggttgaccatgggtagctgagaactgataacaggggactgccctgttaccatttgtttaacttgccttttctacatgtggacgtctatgttgaccctggtacacacacacacacacacacacacacacacacacacacacacacacacgaacacacatactagaacttatacacagatccatccactcatttattttccatatctttatgtagacgtacacatttgctgtaaactaatatctcttcaggtggagaatttaaattttttattttggtgatccctggagccaataattgggtcagggggcatggtaatgaggttgtggtcgatttgacttcaggttggatagctttgatttgcacatcaggggccacggttctaatagaaagagaagactggcctctttggggagatgagaagagacagtgaggtggcataagggagagatgggtcctgaagaagagacagtcagagcagcaaatcagagcggacagggaaaacttagagaacagctgggccttgaaggatgagaggcccctgtgagcggtgtggggacgccatgacggatgggctagagcaaagctgtgggctgagtagcaccttgtacacagatgggagagatcggctgggtctctgtgtgggtcacctcaccttgtcatctccatgaagggtgctctagatgacaccagggattctgaaatgaagctgaaggctttcccggaagtgtgtaacgagaccatgatggccctctgggaagagtgtaagccctgcctgaagcacacctgcatgaagttctacgcacgcgtctgcaggagcggctcggggctggttggtcgccaggtgagaaggagacatgtccatggcctgggttctggatggggagtgtggagaatccacgaaataggcctcactccatatactgggtacagttgattagcgttgcttgactgcatgcctttctagtgtcgtggtcgattggtgatgtctgacacgagtacacatgtagccaatcatcatgggtatgcatgacagtcttacaagacctttaaccagctgggtaaaatggcctcatggtatggtagaaccccatgctcatataggaaaggggggctaagaatatttagtatatttgcatcaattctatccctacctgtgagcttcactggttgggactcagtgaaactcactgtttcctgaaggctgagcagccaagtgggagccgctgtccttcatgaccaaagatgagccctctgagtttcaccgtgagaggtggctgcagggcctgacagggtattcaggaggcagaacagcgggaacttgggtgagctgctgtgtggtcacagggtgaggcaggctggggtgcacaaggccttactgtacttctctgggtcccagctagaggagtttctgaaccagagctcacccttctacttctggatgaacggggaccgcatcgactccctgctggagagtgaccggcagcagagccaagtcctagatgctatgcaggacagcttcactcgggcgtctggcatcatagatacgcttttccaggaccggttcttcacccatgagccccaggacatccaccatttctcccccatgggcttcccacacaagcggcctcatttcttgtaccccaagtcccgcttggtccgcagcctcatgcctctctcccactacgggcctctgagcttccacaacatgttccagcctttctttgatatgatacaccaggctcaacaggccatggacgtccagctccatagcccagctttacagttcccggatgtggatttcttaaaaggtcagaaagcattcgttgtctttccaagacggaatgggagtctccaagatgtttaggctctgctagggcttgacatgtgttttatgttcccagcagcccctgaggctggtattttcccccatttgcagggtaaaggagcatggatgggggtaaagcaatgcagaaggcaaactgggacccagttcaatctcacacttgtagagcttggagcctgtgttctttacagccagctcagggtgtgatccagctgtacctcctctaggaccctggcttttctttcttgggaacttttgaggatgtggtgttggaggcctgcctttccaggcaacaggtctgcgtcatcttaaagaagatggtcatgactgcggcctaagcatgtaacacctgtaagatgaaatgtgatgtggacacgagaaacccgtgtctgaggagtgattttcttcatcagtgtgtgtcctaatgccgtgtccttcacgtatggtttgcacgagaaacataggaaggcctggcacccaattcacgtctcttgtagctctgttatctaaggatggtgtatgttgtcaggacacacttgtgctttctggggcttgatggccagttagggagtaccgccagccaaggagaatgaagaacagccacgatgccagaaggcacacagctgagggaatgtgtgagatctctcagagggagatggtgagaaggcaggcagtacctcgtaagagccatgggaatatggctagggagccccagggaaatcgcatgtctgcaagcgaacgactaagcttcgtcttgcctgaccacagcgctgagcagaggtgtggggactcgggggtgggtgtctttccaatgtgacacgtgcctcattctgcgcccctttctcctcatgtgtccagaaggtgaagatgacccgacagtgtgcaaggagatccgccataactccacaggatgcctgaagatgaagggccagtgtgagaagtgccaagagatcttgtctgtgggtgagtcgggaaccagtctataatctgggcatctgactaagggtcaccagtgactaactggtactgtccttcagagactagttctctgcctgtgatctgtagtccctgggagactcctccctggtgcatagcttactatgctcatacctacagcttcgttatttgggagctggggtagaacccgtgcctcatgcatgctgggtgagtgctctaccgttgagccacgccaattttacttagaatcaaatccaggggcagatttttctcaagtagatgaggtctgtctaaagcacccacacaccctggtggctcatggcaaacctgcaacccgcggtggatatctccatagaatttaaccgtagccaccagcaatctgcagctcattcccctggttgctttgttccacagtgccaagtacagtagaccctgctttttaactttagattatgaaatctttgacagcatgcattttgtttaatcagtgttccacatgcctggcactgttgcgaacatgtcacaggtgtttgttctcagaatgatcttgtgagcctggttcagctttctttacattttgcagaatggctacatgacttatctaagattacatgacatgagacatctcacttaggctgtgctcaggaacagcctgctggggtttctccctgggaaccctgagctatgtccttgcgatggtggtccttgatatcctggccacattccttttggttgattagtccctcagaaaggaactgttttccttcatcggcttcccaggcagtctgggtatggcggcggcacatccctatagtaccaacatctgggaggctgaggaaggagggtggtgaatctgaggccagtcttggctgcatagcaaggttctgtctcagtgaaaacaaagtacagcaaacccagaaccgttccccacagatttgtcaggtctggcggtcaatcaaatgtttctgctttcagtccggtcttcacagtggctcacggtatacagcgcttcctgctcagatcacaaggagttaatcgtcctctttgttgttttgtcatatgtgtagttggcagggacagacgttcagagtctggttaaatattcccagcctcactcctgcaatgttaggagcccaggaaagatacattactgctttcaaaggttatagtgtgaaattataaacaaatatgtacccacaccagcaggccgacccccaggaaaccgtcagggatctcttccatcaggcttagtgaccctctcaacagtcaccgtttctgtcacctgctagctcctgtgtacggtgcttacaatgacagggaggctccacagggacctctcatctgggacaacttgactcagcctgcgggtggacccgaacatggctgagcatttaacgtttttggcttctacctgccatgtgccaagtgacaatcagaaatatcttcagaacgtgtggaatgtccctggtgggtagtgtggtcccaggttgagaaccacagttctacaccactggtcccctccaggactcttccttgtttgggctaagagtaagggtactcaggctattcctcaaagatttcttctcatctgtgctgcttgtctttaatcctctttcttgccccatgcaacattttatcttatttagtatgaatgattgcagctgtcacgtggggcacagaggctcccttgtcttgcttagttttgatacacagactctcctagatgttttaaaaatagtagaggagggggttttcagaaaaaatggttttcagaaaacatgggcattttgtaggacccagatgcctgatacctgcaatgtactcatggaccagagggaagacaccagttttcctgttttctgtaggagccttcctggccagctgtgggtggacaagggcaggcaaggaccgaccctcagcaccggatgcctgtgttttgtagcctaggaacctggctgtctcttctgcagcttgggttctgggaaaatggtattgtggaaatttctcaaatatgttccaaaataagcttggagaatgttctagaaccatggtctcaggggaggaagagctcaggttgaggagctgaagatgcgggttcagtcctggttccagagattgcttcccctctagatctgggcaagttccttacttccaaaaccctgtttcatgactggtaaatcaggagtgttgatgcttgtgtcaagcccagcatactttgaggcacacagtaggtccacctaagggaataatgctcctcttctctgtggagtgtccagtgcaacagtagcttccttctacttggaaatgagctaagtggggagctaagggaatgagaataactccaggtctgagaacatggagtagttggtgtcagtactctccagaacatggtcagtggcattgtgacaggtcatcgagattggtcatgcctaccacccagagaggattcaaccacactgctccaacacagcctagcatgggcactattgcctcccaaagcgtgaagggagcagccccttgatttccatgtcagggggactgttctgtgggaactgtaagaactggtttgtagacttccattgaagagctcctctgcttcagatcccagagctggagccatcccccttaacatctctctcatgcttctgccttctgcttctttcttccctggccagactgttcgaccaacaatcctgcccaggctaacctgcgccaggagctaaacgactcgctccaggtggctgagaggctgacccagcagtacaacgagctgcttcattccctccagtccaagatgctcaacacctcatccctgctggaacagctgaacgaccagttcacgtgggtgtcccagctggctaacctcacacagggcgatgaccagtaccttcgggtctccacagtgagtagtatcccagttatttgatgagctaaggcccacgtgtgatccagaggtgatggatgcctcttagaggtgccgtgggacaaaggtttacaccatcaggaactgggaaaaccatactcgcgttgtagcattgaaatgccttcacccctcgaggtcagatatccaagtcttatttccaagatgaggaaagagagaggttctgtggcttgctaagtagacggaactttgggcagcttccctgagtcagcctgtcagctgctgctttctgcccagggccatgctgagtgccgcatgaattagtgttagccagtgagatcggcttcctttagtgctcacagcccccctcgtcctctttccaccatagactggctagcatttgtacaaagcaaatgttggggtcaggtgttgtggtgagtgtctgtaagccggcaccaaagaaactgaggcaggaaagtggagatcttgagcccgggctggactatacagtgaaggcctctctcaaacaaggcaaaacaagaagaaaacatttgacaatcatttcaagtttctggggtgcctacttggctagtcagttttcaaataacatctgtcccttcaaatcgagatagttttgctcagaattctctgaacatcttgagtagcaacaggtaacctggagctccatactcggttgcaggggcaaagagaagggcacgctctgtagacattgtgcagagacacttctcctgccttcttctaggtgacaacccattcttctgactcagaagtcccctctcgtgtcactgaggtggtggtgaagctgtttgactctgaccccatcacagtggtgttaccagaagaagtctccaaggataaccctaagtttatggacacagtggcagagaaagcgctacaggaataccgcaggaaaagccggtaagcgggcagcctttctgtgaccctgagggctgataaacaagtctttctaaacaagaccctggaggactggaaagtccgaaggagcccagagaaggagcaaaatatgcattctggatgcagggcctatccctgaggccagaccccacgggtgagctaggaaaacccctggggattttattttctttgctctgggaaatatttttcctcagtggcaaggatgtgggtgttggtggctgcttcttggggggatattgattctcttctctactctccttttttttccagcatggaatgagacagaagcatcagttttctatatgtaggagtctcaaggagggaatctcccagctttccgaggttgctgcagacccctagagaactccacatgtctccagcgcctaggcctccaccccagcagcctctccttcctctgggttctgtactctaatgcctgcacttgatgctctcgggaagaactgcttcccccacgcaactaatccaataaagccaccttgcgtatagtgtgccttgggcccgctttcatattttcatacttgattctcctgcaggccgcacatcttcatttgatatggagagaaaacaaggaagtagctgggtcagttcgtaaagcacttgccacatagacatgagtttggtaaagtcaggcatggtggcaccctcttgtaacttaatctcggcacctcagcgctctcagagcagagggtccctggagctggtgggtggtcggtgagcgtcaggccccagtgagagatcttgtctcagaacacaggtatgaggagaccaaagaatgacacaaggccacacatgtagaagaaatctcgaagttaacagctgagactgtgtaagagtctccatatactggagagtaaagagtactcatgacaactggggggacctctggctttgggggagaggtttgttccaataagctgctgaggcaagttcctgaagccagaaacttttccctcccaccacaacactgtccacgagttctgacaaagtggggcagtctcccagagaatgcactgaaattaaggcaggaagagctgctagtgggacacatgggttaatgtgtaactgacaatttcctgtggaaactgctcagcagaagccaaatgaagaggcagttttcttgttgtttgtaagaacatgggaacctgggaccacttccggaccatggcgtctccc

SEQ ID NO: 3005 - DNA, 7286 bp, Rattus norvegicus
  Genbank Accession No. M64780
tgcttatctcctaccatgaacctggagggctggggagaggacctggtgctcccctagccataactggctaaactttgagatcacagctgcatctgctgctccagagcacccagcatggggggagtagctccgaagaggcctaagggcactccataagaactcccacacacacccaggaattgggctcgagctgtatgtatcatgcctcctctgccactggaacacagacccaggcaggagcctggtgcctccatgctggttcgatacttcatgatcccctgcaacatctgcttgatcctgttggccacttccacattgggctttgcggttctgcttttcctcagcaactacaaacctggaatccacttcacaccagcgcctcctacgcctcctgatgtatgcaggggaatgttatgtggctttggtgctgtgtgtgaacctagtgttgaggatccaggccgtgcctcctgtgtgtgcaagaagaatgcttgccctgctacggtggctcctgtgtgtggctcagatgcctccacctatagcaacgagtgtgagctgcagcgcgcgcagtgcaaccagcaacggcgcatccgcctgcttcgccaagggccatgtgggtcccgggacccctgtgccaacgtgacctgcagtttcggtagtacctgtgtaccttcggctgacggacagactgcctcatgtctgtgtcctacaacctgcttcggggcccctgatggcacagtgtgtggcagtgacggtgttgactaccctagtgaatgccagctgcttagtcatgcctgtgccagccaggagcacatcttcaagaagttcaatggtccttgtgatccctgccagggcagcatgtcagacctgaaccacatttgccgtgtgaacccacgtacacggcacccagaaatgcttctgcggcctgagaactgccctgcccagcacacgcctatctgtggagatgatggggtcacctatgaaaacgactgtgtcatgagccgtataggtgcaacccgtggcctgcttctccagaaagtacgctctggtcaatgccaaactcgagaccagtgcccggagacctgccagtttaactccgtatgcctgtcccgccgtggccgtccccactgttcctgcgatcgtgtcacctgtgatgggtcttacaggcctgtgtgtgcccaagatgggcacacatacaacaatgactgttggcgccaacaggctgagtgtcgacaacagcgggccattcctcccaagcaccagggcccgtgtgaccagaccccgtccccatgccatggagtgcaatgtgcatttggggcagtatgcacagtgaagaacgggaaagccgagtgcgagtgccagcgggtgtgctccggcatctacgatcctgtgtgcggcagtgacggtgtcacttacggcagtgtgtgcgagctggaatccatggcctgtacccttgggcgggaaatccaagtggcccgcagaggaccctgtgacccatgtgggcagtgccgttttggatccctgtgcgaggtggaaactggacgctgtgtgtgcccctctgagtgtgtggagtcagcccagcccgtatgcggttctgatggacacacatacgctagtgaatgtgagctgcatgtccacgcctgtacgcaccagatcagcctatacgtggcctcagctggacactgccagacctgtggagaaaaagtttgtacttttggggctgtgtgctcagctggacagtgtgtatgtccccgttgtgagcaccctccacctggccctgtgtgtggcagtgatggtgtcacctacctcagtgcctgtgagctacgcgaagctgcctgtcagcagcaggtacaaattgaggaggcccatgcagggccatgtgagccggctgagtgtggctcagggggctctggttctggggaggacgacgagtgtgaacaggagctatgccggcagcgtggtggtatctgggacgaggactcagaagatgggccatgtgtctgtgactttagctgccagagtgtccctagaagcccagtgtgtggctcggatggagtcacctatggcaccgagtgtgatctgaagaaggccaggtgcgaatcacagcaagaactgtacgttgctgctcagggagcctgccgtggccctaccttggctccactgctacctgtggccttcccacactgtgcccaaaccccctatggctgctgccaggacaatttcactgctgcccagggtgtgggcttggctggctgtcccagcacctgccattgcaacccccatggctcctacagtggcacttgtgacccagccacagggcagtgctcctgccgaccaggtgtaggaggcctcaggtgtgatcgctgtgaacctggcttctggaacttccgtggcatcgtcaccgatggacatagtggttgcactccctgcagctgcgaccctcggggtgccgtaagggatgactgtgaacagatgactggattgtgttcctgtaggcctggtgtggctggtcccaagtgtggacagtgtccagatggtcaagtcctgggccatctaggctgtgaagcagatcccatgacacctgtgacttgtgtggagatacactgcgagttcggggcctcctgcgtagagaaggctggttttgcccaatgtatctgcccaaccctcacatgtccagaggctaactctaccaaggtctgcggatcagacggtgtgacatatggcaatgaatgccagctgaaggccattgcctgccgccagcgtctggacatctccactcagagtcttggtccctgccaggagagtgttactcctggggcttccccaacatctgcatctatgactaccccaaggcatatcctgagcaagacgctgccatttccccacaacagccttcctctgtctcccggcagtactacccatgattggcccaccccattacccatatcacctcacaccacagtcagcatccccagaagcaccgcgtggcctgtgctgaccgtgccccctacagcagcagcctctgacgtaaccagtctcgcaacatcaatcttcagtgaatccggcagcgccaatgggagtggcgacgaggaactgagtggagatgaggaggccagtgggggcgggtctgggggacttgagcccccggtgggcagcattgtggtgacccatgggccacccatcgagagggcttcctgctacaactcacctttgggctgctgctcagatggcaagacaccctcactggactccgaaggctccaactgtcctgctaccaaggcattccagggcgtgctggagcttgagggggtcgagggacaggaactgttctacacacctgagatggctgaccccaagtcagagttgtttggggagaccgcaaggagcattgaaagcacgctggacgacctgttccggaattcagacgtcaagaaggacttctggagtgtccgcctacgggaactggggcctggcaagttggtccgcgccattgtggacgttcactttgaccctaccacagccttccaggcatcagatgtgggtcaggccttgctccgacagatccaggtatctaggccatgggccctggcagtgaggaggcctctgcaggaacatgtgcgattcttagactttgactggtttcccactttctttacgggagctgcaacaggaactacagctgctatggccacagccagagccaccactgtgagccgactgccggcctcttccgtcaccccacgagtctaccccagtcacaccagccggcctgttggcagaactacagcaccaccaaccactcgccggccaccaaccactgccaccaacatggaccggcctcggaccccaggccatcaacagccctcaaagtcctgtgattcccaaccttgcctccatggaggtacctgccaggaccaggattctggcaagggtttcacctgcagctgtactgcaggcaggggtggctctgtctgtgagaaagtacaacccccctccatgccagcttttaagggccactccttcttggccttccccaccctccgagcctaccacacactgcgcctagcactggaattccgggctttggagacagagggactgctactctacaatggcaatgcacgtggcaaagatttcctggctctggctctgttggatgggcgtgtgcagttcaggtttgacacaggctcagggccagcagtgctaacgagcttagtgccagtggaaccaggacggtggcaccgcctcgagttgtcacggcattggcgtcagggcacactttctgtggatggcgagactcctgttgtaggtgaaagtcccagtggcaccgatggcctcaacttggacacgaacctctatgtgggtggtatcccagaagaacaagttgccatggtgcttgatcggacctctgtgggcgttggcctgaaaggatgcattcgtatgctggatatcaacaatcagcagctggagcttagcgactggcagagggctgcggttcaaagctctggtgtgggagaatgtggagaccatccgtgcttacctaacccctgccatggtggggccctatgccaggcactggaggctggcatgttcctctgtcagtgcccgcctggccgctttggcccaacttgtgcagatgaaaagagcccctgccagccgaacccctgccatggggcagccccctgtcgtgtgctttccagcggtggggccaagtgcgagtgccccctgggacgcagtggtaccttctgtcagacagtcctggagactgctggctcccggcccttcctggctgactttaatggcttctcctacctggaactgaaaggcttgcacaccttcgagagagacctaggggagaagatggcgctggagatggtgttcttggctcgtgggcccagtggcttactcctctacaatgggcagaagacagatggcaagggggactttgtatccctggccctgcataaccggcacctagagttctgctatgaccttggcaagggggctgcagtcatcaggagcaaagagcccatagccctgggaacctgggtcagggtattcctggaacgaaatggccgcaagggtgcccttcaagtgggtgatggtccccgtgtgctaggggaatctccgaaatcccgcaaggttccgcacaccatgctcaacctcaaggagcctctctatattgggggagctcctgacttcagcaagctggccaggggggctgcagtgtcctctggcttcagtggtgtcatccagctggtgtctctaagaggccatcaactgctgactcaggagcatgtgttgcgggcagtagatgtctcaccttttgcagaccacccttgtacccaggccttgggcaacccctgccttaatgggggctcgtgtgtcccgagggaagccacttatgaatgcctgtgtcctgggggcttctctgggctgcactgcgaaaaggggctagttgagaagtcagtgggggacctagaaacactggcctttgatgggcggacctacatcgaatacctcaatgctgtgattgagagtgagaaggcactgcagagcaaccactttgaactgagcttacgcactgaggccactcaggggctggtgctgtggattggcaaggctgcagaacgtgcagattacatggccctggccatcgtggacgggcacctgcaactgagctatgacctaggttcccagccagttgtgctgcgctccactgtgaaggtcaacaccaaccgctggcttcgaatcagggctcacagggagcacagggaaggttcccttcaggtgggcaatgaagcccctgtgactggatcttccccattgggtgccacgcaactggacacagatggagccctgtggcttggaggcctgcagaagcttcctgtggggcaggctctacccaaggcctatggcacaggttttgtgggctgtctgcgggacgtggtagtgggccatcgccagttgcatctgctggaggacgctgtcaccaaaccagagctaagaccctgccccactccctgagctgccaccagagctgccaccttccctactgtaattattttctatttttgtaaacttgttgcatttttatatgatttttttgactgcacgttggccagaaggactgctggcctggcctcctttccgtccggcagctgtgctacagagacaaagtggtgctaagggaactcttaagtagaccgtagcacctagagccctgggctttgaaaggcagccttaggacacactcctctgcctaaggtaccgtgcctcagccccttgcactgtatgttcctacctgtccacttgtattggtcctttgggtctcctggcccattgctaggccctgtttgtgtgttattaatgtgttattggatgagaactgtatccctgagcaggagggtgctgttggggttgagggggcccttcattaaaccaagtaacattgggtcctttgtaggttcccacttaagctgctctcctgtgtgtgctaagggccagcctcaccccaagctagcctggacccctagtgctccctgtgacaatactgtgatataaaaaacctgataattggggcatcatcttacttcccaaaatgtgtttgcctgtccctggaggctgtaaacagaagccaggctccatctaggttgtcctggctggtcctcagttggccttccccacctactcagttaccctgaacatggtcatcctttccccaaaacatcaggccacttaggaatccctaagagggagtgcgtcactacgggatgtggttgacctccattgcttacctgcctaagcagccagctacatctgtctctcaaagatgtccagccagactcctaactatattcttcaaccattgattttgtttgatttctgatgtggaagtgcggtcattcctgttctaacgcacagcaaactttaattggtctaacgtgagggcaacccacagttggtccactgtaacgatggtcatccttgtttgagtgacagttactgccgggtgtccagccaagggcaggtactagaatggcagagatgactatagagccaaaaatgactgaaactgaagcaactgtctgctcctccatcccctatctttaatgtccagcacagtcatctcgggagaaaaaccagacaaatctgggatgggggcagtctgaccttcttcctgcttcggtgatcaaggctagagggaactgcatggtatcttgttactaactccagtatgtgtcaatgtcaaataccatgaaataaagtctgaaaaccttaaaaaaaaa

SEQ ID NO: 3006 - DNA, 1947 bp, Rattus norvegicus
  Genbank Accession No. M67465
tgccttcagggtctccaacccttggaaacaaaacgaccaccacacatctactgttctctcaactatctgcttcctgtgttgaccatgcctgggtggagctgcctggtgacaggagcaggaggatttctgggccagaggattgtccaaatgttggtgcaagagaaagagctgcaggaggtcagagtcctgtataggaccttcagtccaaaacacaaagaggaactgtccaagctgcagacaaaagccaaggtgacggtactgaggggagacattgtggatgcccagttcctgaggagagcgtgccagggcatgtccgtcatcatccacaccgctgctgcccttgatatcgcaggcttcctgcccaggcagaccatcctagatgtcaatgtgaaaggtactcagctcctgttggatgcttgtgtggaagccagcgtaccagccttcatctacagcagctcaacaggtgtggctggaccaaactcctacaaggagaccatcctgaacgaccgtgaggaagagcatcgtgaaagcacatggtcaaatccatacccatacagcaaaaggatggccgagaaggcagtgctggcagccaatgggagcatcctgaaaaatggtggcacttttcatacatgtgccttaagactcccattcatctatggggaagaaagccaaatcatttcaaccatggtaaatagagcactcaagaacaacagcataattaaaagacatgccacattctccatagccaacccagtgtatgtgggtaatgcagcctgggcacacattctggctgccaggggccttcgagaccccgagaagtcacaaagcatccaaggacagttctactacatctcagatgacacccctcaccaaagctatgatgatttaaattataccctgagcaaagaatggggcttctgccttgattccagttggagccttcctctgcccctgctctactggcttgccttcctgctggaaactgtgagcttcctgctgcgtccattttacaactataggccaccctttaaccgcttcatggtcacgatcttaaatagcgtgtttaccatttcctacaagaaagctcagagagatctgggctatgagccacttgtcagctgggaggaagccaagcaaaaaacctcggagtggatcgggacactagtggagcaacacagggagacactggacacaaagtctcaatgatgggaagagggcagggacatggccccgggtgttaccccgtcctccagccaggaactcagaaataatccaactcttacagttttattttatacactctccaactggtcttcaggtcaccagaaaccttaagagtcactggcccagtcacctgaacaaggtgcaggggacatcatgtagaaggaataaaactgcctgcctcttgtgacacctgggtgttcattcacctgccatgtggtatcacaaacagaagtaggatctcagctggcatcaaaacttcttctttcttacttaccccatattaagtaatgtttataggaagtaatgtttgtaggtggggcttgagctcccacactagagtcaggaggcaaaaccatgctgaagttctatatagcaaaccaaacctgagagtactttcctgatcactacaatagcaagagagcaagagcgagagtgagagcaagagcgagagagggagggaggaagggaggaaaggggatggagggagggaggaagggaaggagagagagagagagagagagagagagagcatcaccatttcacatagggtgtgaacagagtaggaaatcactttgtttctcatttaccaagagaccatctgaaagaatctgcctttctttgcccctgtcataccaagaaaccttattttcgcttattggacaatgttctatggtataaaaaataagagttgtctggttctgggaataaaactaaattccaagg

SEQ ID NO: 3007 - DNA, 1938 bp, Rattus norvegicus
  Genbank Accession No. M68965
ggccaggcgatcccagcacccgcgatcgcgcgctctgtgctccgagggccgtgctcgcctggtgcctactccagggctgtgtacaccgcgtcgggctcggctgagcccgcaccaggagggcgcgggagccgcagggccctggagctttgggcgactgctacgcggccttggccgaggctcttccttgctcgccgttctgtcgcgggcctggcccgtgaaccgctcacagtatggcccgatgctgcttctacacggcggggacactgtctctgctgctgctggtgaccagtgtcacgctgctagtggctcgagtctttcagaaggcagtggaccagacgatcgagaagaatatggtattacaaaatggtaccaaggtctttgattcctgggagaagccccctctacctgtgtacatccagttttatttcttcaatgtcaccaatccagaggagatcctccaaggagaaatccccctgctagaagaagtggggccgtacacctacagggagctcaggaacaaggcaaacgttcagtttggagaaaatggaacaaccatatctgccgtcaccaataaggcatatatttttgaacgaaaccagtctgttggagaccctaccgttgacttgattagaacaataaatattcctctgttgactgttgtggaaatggcccagcagcccttcctcagggagatcatcgaggccatgctgaaagcttatcagcagacgctgtttgtcactcacactgtacatgaactgctctggggctacaaagatgaggtcttgtcgctcgtccatattttcagacctgacgtctcccctaactttggcctgttctatgagagaaatggaactaatgatggggagtatgtttttctgactggagaggacaattacctgaactttacaaaaattgtggagtggaatggaaaaacgtcgctggactggtggacgacggacacgtgcaatatgatcaacgggacagacggagattcttttcacccattaataagcaaggatgagaccctgtacatcttcccatctgacttctgcaggtccgtctatataactttcagtagctttgagaacgtagaaggactgcctgcttttcggtataaggtgcctgcagaaatactagccaattcctccgaaaacgctggcttctgtatacccgagggaaactgcatggacgcgggagtgctgaacgtcagcatttgcaagaatggtgcgcccattatcatgtctttcccacacttttaccaagccgacgagaagttcgtttcggccataaaaggcatgcgtccaaacaaggaagaacatgagtcatttgtggacattaatcctttgacaggaattattttaagaggggccaagagattccaaatcaacacgtacgttaagaagctggatgactttgtggaaacgggaaacattaggactatggttttcccagtgatgtatctcaatgagagtgttctcattgacaaagagactgcaagtcaactgaagtctgtgattaacacaactttgattgtcaccaacataccctacatcatcatggcactgggcgtgttctttggcttgattttcacgtggctggcgtgtcgaggacaggggtctacggatgagggaactgcagatgaaagggcacccctcatacggacctaatgggacttacctgttgcctgagcttggtgagagaatgtgagaactgacctgacctggaccaggacagggaaaagcctgcatctcacgggctcctggcctgtcaagaagggagatgaagccgcagcactggcacgcgagaagaccctcctggacagaggggaccgagcaggtgacatggctggcaattacgctttataaaatcatgtctctgaaactgtgtcaatgtgtcttagggagtatttaataaattatatagaaacctttaaaaacc

SEQ ID NO: 3008 - DNA, 1736 bp, Rattus norvegicus
  Genbank Accession No. M69139
gggggaagccagcaacctagaggacgcccccgagtttgtgcctgaggctactccgctctgagccggctgtccctttgaactgaaagcaccgctccaccgagcccgagcccaactccagccaccatgcttctactcttgttggggatcctgttccttcacatcgcggtgctagtgttgctcttcgtctccaccatcgtcagccaatggctcgtgggcaatggacacaggactgatctctggcagaactgtaccacatccgccttgggagccgtccagcactgctactcctcatctgtgagcgaatggcttcagtctgtccaggccaccatgatcctgtctgtcatcttcagcgtcctgtccctgttcctgttcttctgccagctcttcactctcaccaaaggcggccgcttttacatcactggagtcttccaaatccttgctggtctgtgtgtgatgagtgcagcggccatctacacagtgagacacagtgagtggcatgtcaacaacgactactcctatggctttgcttacatcctggcctgggtggctttcccgctggccctccttagtggcatcatctacgtgatcctgcggaaacgcgaatgaggcgcccgacgcaccatccgtctaggctctgagcgtgcatagggtacacagggagggaggaaggaaaccagaaaaccaaaccaaccaacccaaaagagctagcccccaaacccaaacgcaagccaaaccaaacagaacacagttgagtggggattgctgtcgattgaagatgtatataatatctatggtttataaaacctatttataacactttttacatacatgtacataggattgtttgctttttatgttgaccgtcagcctcgtgttgaatcttaaacgactctacatcctaacactataaccaagctcagtattttcgttttgtttcgtttttttcatctttttgttttgctcagacataaaaaaaaaaaaaaaatccacgtggccccctttcatctgaaagcagatccctccctcccattcaacctcataggataaccaaagtgcggggacaaaccccagatggccagaggccttcacactatgggtgacccagtgaatttagcaggaataatccgctgcccgaatcaatgtgtgaagccctaagcactcacagacgaaacgccctgaccagagccctctgcgaaaccaatagctggtggctgcggaacacttgaccctgaaggcggagtactggggcacatgtttaaatgagacgtcagagacaagcaatctgtgaaatggtgctatagatttaccattccttgttattactaatcatttaaaccactcactggaaactcaattaacagttttatgacctacagcagaacagagacccgatacaaacggttcgtaactgctttcgtacatagctaggctgttgttattactacaataaataaatctcaaagccttcgtcactcccacagttttctcacggtcggagcatcaggacgagggtctagacccttgggactagcaaattccctggctttctgggtctagagtgttctgtgcctccaaggactgtctagcgatgacttgtattggccaccaactgtagatgtatatacggtgtccttctgatgctaagactccagacctttcttggttttgctggctttttctgattttataccaactgtgtggactaagatgcattaaaataaacatcagagtaactc

SEQ ID NO: 3009 - DNA, 2977 bp, Rattus norvegicus
  Genbank Accession No. M73714
gaattcggcggatggaagccagctgtcccgagaagcagtgaactgtggcgtcatcccgagcagtgccttaccggtattgtgctgcttcacctgcctcgctcggcgttctcctcaggccccgccatggagcgacaggtccaacgacttcgccagacgttccggtccggccgatcgcggccgctgcgtttccgactgcagcagctcgaggccctccggaggatggtgcaagagcgagagaaggacatcttggcagccatcgcagcagacctgagcaaaagtgaactcaatgcatacagtcatgaagtcattaccatccttggggagattgacttcatgctggggaatcttcctgaattggcctctgctcggccagcgaagaagaacctgcttaccatgatggacgaggcctatgttcagccagagcctctgggagtcgtgctgattattggagcttggaactatccttttgttctgaccctgcagccactggtgggagccattgctgcaggaaatgctgccattgttaagccctcggaactcagtgaaaacacggctaagatcttggctgaactcctccctcagtatttagaccaggacctgtacatgattgttaatggcggcgttgaagaaaccacagagcttctgaggcagcggtttgatcacattctctacacaggaaacaccgcagttggaaaaattgtcatggaggctgctgccaagcacctgacccctgtgaccctggagctcgggggcaaaagcccatgctacattgacagagactgtgacctggacgttgcttgcagacggataacctggggaaagtacatgaattgtggtcagacctgtattgctcctgactatatcctgtgtgaagcctcctcccaggatcaaatcgtacagaagattaaggatacggtgaaggacttttatggggaaaatgtaaaagcttctcctgattatgaaaggatcatcaaccttcgtcactttaagaggataaaaagtttgcttgaaggacagaaaatagcttttggtggggagactgatgaagctacacgctacatagccccaaccatactcactgatgttgaccctaactccaaggtgatgcaagaagaaatttttggaccaattctcccaatagtgtctgtgaaaaatgtggaggaagccataaatttcataaatgatcgcgaaaagcccctggcactctacatattttctcacaacaataagctcatcaaacgggtgattgatgagacatccagtggtggagtcacaggcaatgatgtcatcatgcacttcactgttaattctttgccctttggaggtgtgggtgccagtggaatgggggcttatcatggcaaatacagtttcgataccttttctcatcagcgcccctgcttgttaaaagggttaaagggagagagtgttaacaaactcaggtaccctcccaacagcgagtccaaggtcagctggtcgaaattcttcctgctgaaacagttcaacaaaggaaggctgcagctgctgcttctcgtgtgcttggttgcggttgcagctgtgatcgtcaaggatcagctgtgatgacttccttgtagcctctactgaagtacccctcggccaaatggttaacacaccaatgcttttaaaattgtacccaaaccaggaaatgaaattcacaggtgaactgcagtcaaacctaagttgttgccacaaaccactgatgaaactcagtgcttcagccaaatcccagcatttgtcagccgtgcaggtgctgagagggtggagactgggaggggcgacacctagtccatggcagcgggatgtcagggagactcgacaactgctcccgcactctttgctccaggacatagctctcccacccggtgtcaacaccctccaggctttccagctgtcctctgattgctgaggttcctgttagggacccaggtactaaacctgggcgggtggatttgtcggcctcatccattgtggctcgagaccggccttcgggagtcggctctcagtctaaacatcctttctcattcatagtgtgtcacccgaagatgcttgtttgtgacattgtgacagtctgtcatgactgtcccggtgcctttgtgatgacttaaactacactgaggagcttgccaacttgtgaatgcccttcagagggtctggcagtcacagctgttccagagcccgagggacgaagattccggagcccggagtttgaggccaacctaggcaacataatgggaccctctcattattattcctccataacaatcccctcgagaccctcgatttgaatgttatataggtcttcaggataaatctgcttattttcacagcacaacacaaaaaaaatttacttttgaaatcttagagagattcctacagatcttagcatggagctgttcctgtagtgaaaggggggttattagacatgaggcttcagaactcatggggcagggttgttggagactaccgtgagctgagggggcacactgaagcgatgggatggccagaagcgcacctgagcaagcggggcagcattctctgtcagaccctaacatggctacacggggatgtggcagagagatctgtgccgttggctgccagcgctggttaggcctgaagctccaagctgcagaggtctcattgccttcccaggatccaaattaagactgcccactcaatgagaatgtcacttgcgtatgtacaaccatgtttgctgagtaacctgttccaccgttgaggctgtctgaagtgtattgtatgaggtatcaagaacgagtcattggcccatttggcaaatagttgcttatgtagcaattgtcatggactaatcataaaatattttgcacaaaatttcaatgttgaacttgcactcactgttgttaaattataaatcacagcttctagttaggccaaaatatttacatactctactaatcttcaaaataaatgtatcccggaattc

SEQ ID NO: 3010 - DNA, 1192 bp, Rattus norvegicus
  Genbank Accession No. M74067
ggaaaggagccgttagcgtgctccgtccattgccatccaccggtcgttcccggcgacagacctccgtcaacttttgaaggggagttggttctcaggtccagcggccgcgatccctggtctcccagcctacggagttacccggcggagttcaagtccagcagccatgtccatgagcctggagatcaccggcacgtcgctggccgtgctgggctggctgtgcaccatcgtgtgctgcgcccttcccatgtggcgcgtttcggcattcatcggcagcagcatcatcacggcgcagatcacctgggaaggcctgtggatgaactgcgtgcagagcaccggccagatgcagtgcaagatgtacgactcgctgctggccctgccgcaggacctccaggccgcccgagctctcatcgtggtgtctatcctactggcagccttcgggctcctcgtggcgctcgtgggggcccagtgtaccaactgcgtacaagatgagacggccaaggccaagatcaccatcgtggcgggagtgcttttcctgttggcggctgtgctcaccttagtgccggtgtcctggtccgccaacaccatcatccgggatttttataacccgctggtacctgaggcccagaagcgagagatgggaactgggttgtacgtgggctgggctgccgccgcgctgcaattgctagggggcgccttgctgtgttgctcctgcccaccacgcgagaagtacgcacccaccaagatcctctattccgcgccgcgatccaccggccctggcaccggtaccggcaccgcctatgaccgtaagactacgtctgagaggccgggtgcgcgcacaccgcaccatcaccactaccaaccgtcgatgtaccccacccgtccagcgtgcagcctcgcctcagagaccaccccaccttccagacggttacagacgccacgcagtctgcttgctaggctggaagaggacagacagcctggcgtccccttttctccggttgccacctgattacctggcctaggaactgtccaagtcgaatggacaaagacacctcgcccttcccaagtacagggttggggtggccatcgcagctacttgccagccccgcagccagaaggctcatagtgggcagagacaggcaaactataaaaagggccgtttcgtatttttcaataaaagcctttcgtttttgca

SEQ ID NO: 3011 - DNA, 936 bp, Rattus norvegicus
  Genbank Accession No. M74494
accgtcacggtatgtctgacgctcactgccaagcgcatggcgaggaagaactgcctggtgaagaacctggaagctgtggagaccttggggtccacatccaccatctgctccgacaagactggaactctgactcagaaccggatgacagtggctcacatgtggtttgacaatcaaatccatgaagctgacaccacagagaatcagagtggggtctcctttgacaagacgtcagccacctggttcgctctgtccagaattgctggtctctgtaacagggcagtgtttcaggctaaccaagaaaacctgcctatccttaagcgtgcagtagcgggagatgcttccgagtcggcgctcttaaagtgcatcgaggtctgctgtggctccgtgatggagatgagggagaagtacaccaagatagtggagattcctttcaactccaccaacaagtaccagctctccattcacaagaacccaaacgcatcggagcctaagcacctgctagtgatgaagggcgccccagaaaggatcctggaccgatgcagttctatcctcctccacggcaaggagcagcccctggacgaagagctgaaggacgcctttcagaatgcctacctagagctggggggccttggagagcgtgtgctaggtatgcaggtgaccgccatggctcctgagcacagctgtgtcaagcacagcgatctccgtgttctcggggtgttcctcttaacgtaggggagccacgctgctgattacattgtttaaagcagaggtgtggagaaataatggttatattggcaaacagtgttgttgcttggctgacctgtggcttcacgatatcagttctatatggcaggaggtgggggtgggcaatttattgtctaacctcattgttatggccatggtctgtaagcttaattaaaatctgtttgtttctgg

SEQ ID NO: 3012 - DNA, 895 bp, Rattus norvegicus
  Genbank Accession No. M75153
atgggcacccgcgacgacgagtacgactacctctttaaagttgtccttattggagattctggtgttgggaagagtaacctcctgtctcgatttactcggaatgagtttaatctggaaagcaagagtaccattggagtagaatttgcaacaagaagcatccaggttgatgggaaaacaataaaggcacagatatgggacacagcagggcaggagcggtacagggctataacgtctgcatactatcgtggagcagtaggtgccttattggtttatgacattgctaagcatctcacatatgaaaatgtagaacgatggctgaaagaactgagagatcatgctgatagtaacattgttatcatgcttgtgggcaataagagtgatttacgtcatctcagggcagttcctacagatgaagcaagagcatttgcagagaagaatggtttgtcgttcattgagacatctgctctagattctacaaatgttgaagctgcttttcagacaattctaacagagatataccgcattgtttctcagaagcaaatgtcagacagacgtgaaaatgacatgtctccaagcaacaatgtggttcctattcatgtcccacccaccactgagaacaagccaaaggtgcagtgctgtcagaacatctaaggcgcctctctcccctagacggctgtgtatagtccatttcccaggtctgagatttaaatatatttgtaattcttgtggtcactttctgtgttttattacttccttacacttaagaatcttcccatgtcttaagtctttgatttggctttataaaatcctcaactttgtcctgaatgactcgagttctttttcatgctatggcttctctagccttagtttaataaactgaatgtttgaagtcctc

SEQ ID NO: 3013 - DNA, 1754 bp, Rattus norvegicus
  Genbank Accession No. M76591
cagtgcaagcgcgcaggcgcgaccggggggggggggcgggctgcgaggagaatctcagcgatcctcagttactgccgcatcctctgccggtcgtcatggctgcctacaagctggtgctgatccggcatggcgagagcgcctggaacctggagaaccgcttcagcggctggtacgatgccgacctgagcccagcgggccacgaggaggcgaagcgcggcgggcaggcgttgcgagatgctggctatgagtttgacatcgtcttcacctctgtgcagaagagagcaatccgcaccctctggacagtcctggatgccattgaccagatgtggttgccagtggtacggacctggcgtctcaatgagcgacactatgggggactaacaggtctcaataaagcagagactgctgctaagcatggtgaggcacaggtaaagatctggagacgatcttacgatgtcccgccacctccaatggagcctgatcatcccttctacagcaacatcagcaaggaccgcaggtacgcagaccttactgaggaccagctaccctcctgtgagagcctgaaggatactattgccagggcactgcccttctggaatgaagaaattgttccccagatcaaggaggggaaaggggtcttgattcctgcccatggcaacagctacgggggcattgtcaagcatctggagggtctgtcagaagaggccatcatggagctgaacctgccaactggtatacccatcgtctatgaactggacaagaacttgaagcccatcaagcccatgcagtctctgggagatgaagagacggtgcgtaaagccatggaagctgtggctgctcagggcaaggtgaagaagtgaaggcgaggaggcggactcctgccctgaacaccctctctccctgcttgttcctgcctcctgcaccctcccctgcacctgccacactgactacatctttaggatcttcagtttaagttgtagctgcagataggacctgtggctcccattctccttttagtattttatccccggcacccactccttcatagaatctagtcagaagaagacctctggggctgcaggctcttggtccatatccagggacggctccctgttacaggagagagttgagtagatagtaattatatcccccttagctctttgtttactaagggtctgcttaggaagaaggtcgggagggactgtatgtggtatgaccaatgaggagagaagctgtggtccagttttgtccctggaacctgtcctgcactcttcccacaattaggtaactgggggcctagtcattccagtggagagtgaaatgaacctcatgccgattaaaaagaccctactttctctctgaccctaaaggacgtcgtggccctagaaggttgggaacagtcttgtcaagtctatgtgtgttaacatttatttttacaaaaataaagtatatatacatatatcagcacaaaagcaacgaggttgctagtggcagttgagagtcctaagtggtcaccagaaaaaaagccattcctcagatcaaatgggataaactccttgtacctcttgctgtgttttggatccctttgccttgttttgtaagaggtgaagccccttgatcatgtccaaggttttgtctttcactgtctgaatcatgtttccagctgcttgaccctactgtgtgggttcagaactcgtttgggcataacaactaagtctctttccagtcagtataataaaggagtgatgtgcaat

SEQ ID NO: 3014 - DNA, 747 bp, Rattus norvegicus
  Genbank Accession No. M76704
aaactggaacttggcagaatggctgagatctgcaaaatgaaatacacggtgttggacagccctttggggaagatagagctgtccggctgtgagcgaggcctgcatgggatacgatttctcagtgggaagaccccaaacactgaccccacagaggctccagcctgtcctgaggtgctcggtgggccagagggagtgccagagcccctggtgcagtgcacagcctggctggaagcctatttccacgaacctgcagccacagaggggcttcccttgcctgctctccatcaccctgtgttccagcaagattcattcaccagacaggtgttatggaagctgctgaaggttgtgaaattcggagaaatggtttcttaccagcaattagcagccctggcaggcaaccccaaagcggctcgtgcagtaggaggagcgatgaggagcaatccagtccccatcctcatcccctgccacagggtgattcgcagtgacggtgccattggcaattactctggaggaggacagactgtgaaagagtggcttctggcccatgagggcatcccaactggacagccggcctccaaaggcttgggtctgattgggagctggctcaagccatccttcgagtcttccagcccaaagccgtctggctgaaattgagtaaccgtttgaatgacacatagatgtaatgcggtgttggaagcggatgtgtggtgggtaccactatattaaagagctgcatgtgtcctgggg

SEQ ID NO: 3015 - DNA, 912 bp, Rattus norvegicus
  Genbank Accession No. M80601
ccgctcgccttcctgctgcaagtgtacgcaccgcttccgggtcgggacgacgccttccaccgtagcctctttctcttctgctgtcgagagccgctgtgttgcgccggcctgcgagtttttcgtaatcagctaccaaggaaaaatgcattttactcatatgagcccccttctgaaacgggagcttcggatacagaatgtgtgtgcctccaacttaagtctggagctcatctctgcagggtttgtggttgcttggcccctatgacatgctctaggtgcaaacaggcacattactgcagcaaggaacatcagacattagactggcagctcggccacaagcaggcttgtacacagtcagaccatttagaccatatggttccagaccataacttgctgtttccagaatttgaaattgtaacagaaacagaagacgagattgggcctgaggtggtggaaatggaggattactctgaagttataggaagcatggagggagtacctgaggaagaactagattccatggcaaagcatgaatccaaggaagatcacatattccaaaagtttaaatccaaaatagcccttgaaccagagcagattctcaggtatggaagaggtattaaacccatctggatttctggtgaaaatattcctcaagaaaaagatattccagattgctcatgtggtgttaagagaatatttgaattccaggtcatgcctcagctgttgaaccacctaaaggcagacagactgggtacaagtgtggactggggcatcttggctgtcttcacctgtgctgagagctgcagcctgggcatcgggttcacagaagaatttgtgtggaaacaggatgtgacagagacaccatgaaaggtgttaaattcttaaaaataaatgttccttatgcctcactacctc

SEQ ID NO: 3016 - DNA, 934 bp, Rattus norvegicus
  Genbank Accession No. M81088
aattggcggcattggcactgtccccgtgggccgagtggaaactggtgttctcaaacctggtatggtggttacctttgctccagtcaatgtaacaactgaagtcaagtctgtggaaatgcaccatgaagctttgagtgaagctctccctggggacaatgtaggcttcaacgtaaagaacgtgtctgtcaaagacgttagacgtggcaatgttgctggggacagcaaaaatgacccaccaatggaagcagctggcttcactgctcaggtgattatcctgaaccatccaggccagatcagtgctggctatgccccgattctggacgattatatggcccacatagcatgcaagtttgccagacttaaagagaagatcgatcgtcgttctggtaagaagctggaagatggccccaaattcttgaagtctggtgatgctgccattgttgacatggtccctggcaagcccatgtgtgttgaaagcttctctgattaccctccacttggtcgttttgctgttcgtgacatgaggcagacagttgctgtgggtgtcatcaaagccgtggacaagaaggctgcaggagctggcaaagtcaccaagtctgcccagaaagctcagaaggctaaatgaatattatccctaacacctgccaccccagtcttaatcagtggtggaagaacggtctcagaactgtttgtctaattggccatttaagtttaatagtaaaagactggttaatgataacaatgcatcgtaaaaccttcagaaggaaagaatgttttgtggaccatttttttttgtgtgtggcagttttaagttattagttttcaaaatcagtactttttaatggaaacaacttgaccaaaaatctgtcacagaattttgagaccattaaacaagtttaatgagaaaaaaaaaaaaaaaaaaaaaaaaaaaaaa

SEQ ID NO: 3017 - DNA, 1680 bp, Rattus norvegicus
  Genbank Accession No. M81225
gcgggccgcggagggggcggggctccaccaccacctcagctgcggacggaggcgagatggcggccactgagggggtcggggaatctgcgccaggcggtgagccgggacagccagagcagccgccgcccccgcctcctccgccgccagcacagcagccgcaggaagaagagatggcggccgaggccggggaagcagcggcgtcccctatggacgacgggtttctgagcctggactcgcccacctatgtcttgtacagggacagggcagagtgggctgacatagacccagtgccccagaatgatggccccagtccagtggtccagatcatctacagtgaaaagtttagagacgtctatgattacttccgagctgttctgcagcgcgatgaaagaagcgaacgagcctttaagctcactcgagatgctattgagttaaacgcagccaactatacggtgtggcattttcggagagttctcttgaggtcgcttcagaaggatctgcaagaagaaatgaactacatcatcgcaataattgaggaacagcccaaaaactatcaagtttggcaccataggagagtattagtggagtggctgaaagatccttctcaagagctcgagttcatcgccgatatccttaatcaggatgcaaagaattaccatgcctggcagcatcgacagtgggtcattcaggagtttcgactttgggataatgagctgcagtatgtggaccagcttctcaaagaggatgtgagaaataactctgtgtggaaccaaagacacttcgtcatttctaataccactggctacagtgatcgcgctgtgttggagagagaagtccaatatactctggaaatgatcaaattagtgccacacaatgagagtgcgtggaactacttgaaagggattttgcaggaccgtggtctttccagataccctaatctattaaaccagttgcttgatttacaaccaagtcacagctccccctacctaattgcctttcttgtggatatctatgaagacatgctggaaaaccagtgtgacaacaaggaggacattcttaataaagcactagagttatgtgagattctagctaaagaaaaggacactataagaaaggaatattggagatatattggacggtccctccagagtaaacacagcagagaaagtgacataccggcgagtgtatagcagcaagagcggctggaagaagtggacaatgctttctaaggcctcttattcgggagtgtagagcggttagagcggtcatctcatgcctgtgagctaacgttgtccaggtgctgtttctaacaagaactaaggatgactcctgtgtctgacgctgttcagactagctaagagtcgatttcctaaagcaaggtcattggaggggagggtgaagaaaactttcccgtaaaggaactactgcttttgtagtcttcccaacatttaatccaatcctgtagaatcagcatctcctgaaagacatggtgcacggctgtgtgctgggcgtggctaagggcagctgtgtcatgggtttgcagtcatgggaacctcggagcgctgcccgggactgcattgatgattagggctgctggcctcacccacaggatcttgctatcactgtaaccaactaatgccaaaagaaaggttttataataaaatcacattatctacaaac

SEQ ID NO: 3018 - DNA, 4254 bp, Rattus norvegicus
  Genbank Accession No. M81855
gctcccatcttcgaggctcagctcaactcagagctacttcttccaaattctacatcttggcggacttcgcgaaggaaacccggagtgttacgtgaggtcctgatggagtttgaagagggccttaacggaagagcagacaagaacttctcaaagatgggcaaaaagagtaaaaaggagaaggagaagaaacctgctgttggcatattcgggatgtttcgctatgcagattggcttgacaagctgtgcatggctctgggaactctcgctgctatcatccacggaaccctgcttcccctcctgatgctggtgttcggatacatgacagatagttttaccccaagcagagacccgcattctgaccgagcgattactaatcaaagtgaaatcaacagtacacataccgtcagcgacacgagtctggaggaggacatggccatgtatgcctactattacacgggcattggtgccggtgtgctcatcgttgcctacatccaggtttcactttggtgcctggcagctgggagacaaatacacaagattaggcagaagtttttccatgccatcatgaatcaggagataggctggtttgacgtgaatgacgctggggagctcaacacccgtctcacagatgacgtctccaaaattaatgacggaattggtgacaaacttggaatgttctttcagtccataacgacattttcagccggttttataataggatttataagtggttggaagctaacccttgtaattttggccgtcagccctcttattgggttgtcatctgccatgtgggcaaaggtactgacttcatttactaataaggaactccaggcttatgcgaaagctggagcagttgccgaagaagtcttagcagccatcagaactgtgattgcgtttggaggacaaaagaaggaacttgaaaggtacaataaaaatttagaagaagctaaaagagttggcataaagaaagccatcacggccaacatttccataggtattgcctacctgttggtctatgcgtcttatgcactggcattctggtatgggacctccttggtcctctcaaatgaatattctattggacaagtgcttaccgtcttcttctctattttattggggactttcagtattggacatttagccccaaacatagaagcctttgcaaatgcaagaggggcagcctatgaaatcttcaagataattgataatgagccaagcatcgacagcttctcaaccaagggacacaaaccagacagtataatgggaaatttggaatttaaaaatgtttacttcaactacccatcacgaagtgaagttaagatcttgaagggcctcaacctgaaggtgaagagcgggcagacggtagccctggttggcaacagtggctgtgggaaaagcacaactgtccagctgctgcagaggctctacgaccccatagagggcgaggtcagtattgacggacaggacatcaggaccatcaatgtgaggtatctgcgggaaatcattggggtggtgagtcaggaacccgtgctgtttgccaccacgattgccgaaaacattcgctatggccgagaaaacgtcaccatggatgagatagagaaagctgtcaaggaagccaatgcctatgacttcatcatgaaactgccccacaaatttgacaccctggttggtgagagaggggcgcagctgagtgggggacagaaacagaggatcgccattgcccgggccctggtccgcaaccccaagatccttttgttggatgaggccacgtcagccttggacacagaaagcgaagccgtggttcaggccgctctggataaggctagagaaggccggaccaccattgtgatagctcaccgcttgtctacagtgcgcaatgctgacgtcattgctggttttgatggtggtgtcattgtggagcaaggaaatcatgaagagctcatgaaagagaagggcatttacttcaaacttgtcatgacacagactagaggaaatgaaattgaaccaggaaataatgcttatgaatcccaaagtgacactggtgcctctgagttgacttcagaagaatcaaaatctcctttaataaggagatcaattcgcagaagtatccacagaagacaagaccaggagagaagacttagttcgaaagaggatgtggatgaagatgtgcctatggtttccttttggcagatcctaaagctaaatattagtgaatggccctatttagttgtgggtgtactttgtgctgttataaatgggtgcatacaaccagtgtttgccatagtgttttcaaagattgtaggggttttttcaagagacgacgaccatgaaaccaaacaacggaattgtaacttgttttcccttctctttctggtcatgggaatgatttcttttgttacgtacttctttcaaggcttcacatttggcaaagctggagagatcctcaccaagcgactccgatacatggtcttcaaatccatgctgcgacaggatataagctggtttgatgaccataaaaacaccactggctcgctgactaccaggctcgctagtgacgcttctaatgttaaaggggctatgggctccaggcttgctgtagttacccagaatgtagcaaaccttggcacaggaattatcttatccttagtcttagtctatggctggcagcttacacttttacttgtagtaattataccactcattgtcttgggtggaattattgaaatgaaactgttgtctggtcaagccttgaaggacaagaaagagctagagatctctgggaagatcgctacagaagcaattgaaaacttccgcactgttgtctctttgactcgggagcagaagtttgaaactatgtatgcccagagcttgcagataccatacagaaatgctttgaagaaagcacacgtctttgggatcaccttcgccttcacccaggccatgatttatttttcctatgctgcttgtttccggttcggtgcctacttggtggcacgagaactcatgacgtttgaaaatgttatgttggtattttctgctgttgtctttggtgccatggcagcagggaataccagttcattcgctcctgactacgcgaaggccaaagtctcggcatcccacatcattgggatcattgagaaaatccccgagattgacagctacagcacggagggcttgaagcctaattggttagaaggaaatgtgaaatttaatggagtcaagttcaactatcccacccgacccaacatcccagtgcttcagggactgagcttcgaggtgaagaaggggcagacgctccgcctggtgggcagcagtggctgcgggaagagcacggtggtccagctgctcgagcgcttctacaaccccatggctggaacagtgtttctagatggcaaagaaataaagcaactcaatgtccagtgcgtccgcgcactgggcattgtgtcccaggagcccatcctgtttgactgcagcatcgccgagaacatcgcctacggagacaacagccgtgtcgtgtctcatgaggagatcgtgagggccgccagggaggccaacatccaccagttcatcgactcactgcctgagaaatacaacaccagagtgggagacaaagggactcagctgtcgggcgggcagaagcagcgcatcgccatcgcgcgcgccctcgtcagacagcctcacatcttacttctggatgaagcgacatcagctctggatacggagagtgaaaaggtcgtccaggaagcgctggacaaagccagggaaggccgcacctgcgttgtgatcgcgcaccgcctgtccaccatccagaacgcagacttgatcgtggtgattcagaacggccaggtcaaggagcacggcacccaccagcagctgctggcccagaaaggcatctatttctcgatggttcaggctggagcaaagcgctcatgagctgggagtatttgaggtgctaagtatttctaatattggtgttcaaacatggcacgtaaccaaagttaaaaggttaaaagcactgttaaaggtaatttcatcaagacgagaagccttcagagacttcataattaaatgaaccgaaattgaaaaaaaaatcattaaacagggccacattttttaattgtattatgtgattcaagagaacatatagtttttttaaaaagaaatgtgtagttttgtttcagtttttttaatttctaccctattcccttaaatgatcataaaggctgtaaaaagcactatttttttgcggcc

SEQ ID NO: 3019 - DNA, 197 bp, Rattus norvegicus
  Genbank Accession No. M82855
ctttatttcccacaggaaaacggatgtgtttgggagagagcctggcccgcatggagctgtttctattcctgacaaccattttacagaatttcaaactaaaatctctggttgacccaaaggacatcaatacaaccccaatatgttcttcactttcttcagttcctcccactttccagatgcgcttcatccctctgtaa

SEQ ID NO: 3020 - DNA, 2142 bp, Rattus norvegicus
  Genbank Accession No. M83298
ggggccgccgtcgctgtcctagccgccgccgctgccgccgccgccgctgccgtcttcaccgcgggagaaggagcacgagacaggacgcccctgagtgaacgccaccatcctgccgacagctccgcccgggctgcttcctttccgcccaggtccccgtcccctcccccctcaggtgccatccgcctccatccgcgccctcgatccccccatccccaggtgagggggctgagccccggtcgcggaggcccggacgagcccggcagggtcaccatttgcagcgcgacatggcaggagctggaggagggaatgatattcaatggtgtttttctcaggtgaaaggagcagttgatgatgacgtagcagaagcagatataatttctacagtagagtttaatcattctggagaattactagccacaggagataaaggtgggagagtcgtcatctttcaacaagagcaggagaacaaaatccagtctcatagcagaggagaatacaatgtttacagcaccttccagagccatgagccagaatttgactacttgaaaagcttagaaatagaagagaagatcaacaaaattaggtggttaccccagaaaaatgctgcccagtttttattgtctaccaatgataaaacaataaaattatggaaaatcagtgaaagagacaaaagaccagaaggctataacttgaaagaggaagatggaaggtatagagaccctactacagtcactacactacgagtgccggtgtttaggcccatggatctaatggtggaggccagtccgcggagaatatttgccaacgcccatacctaccacatcaactccatttctatcaatagtgattatgaaacctacttatcagcagatgatttgcgaattaatctctggcatctggaaattacagacaggagttttaatattgtggacattaagcctgccaatatggaggagctcacggaggtgatcacagccgcagagttccatcccaacagctgtaacacgtttgtgtacagcagcagtaaagggaccattcgcttatgtgacatgagggcatctgcactctgtgacaggcattctaaactgtttgaagaacccgaagatcccagcaacaggtcgtttttttctgaaatcatctcctcaatttctgatgtaaaattcagccacagtggtcgctatatgatgactagagactatttgtcagtcaaagtttgggacttgaatatggaaaacaggcccgtggagacataccaggtacacgaatacctcagaagtaaactttgctcactgtatgaaaacgactgcatatttgacaaatttgaatgttgttggaatgggtctgacagtgttgtcatgactggatcctacaataatttcttcagaatgttcgacaggaacacaaagcgggatataactctagaagcatcgcgagaaaacaataagcctcgtacagttttgaaaccacgcaaagtctgtgcaagtggcaagcgaaagaaagatgaaataagtgttgacagtctagacttcaacaagaaaatccttcatacagcctggcatcccaaggaaaacatcattgctgtagcgactacaaacaatctgtatatatttcaagacaaagtgaattaggctggcattctctgcagaggagccacttcctgcttagtgagatagttgaatctagcattcgtacctataagagagcggtccattgtggcgtccctttccagtgtttgacagtgtgccattcaacaacacatttgatagccacatggagaaagctgtgcggatgcatcccgggctgtttccatgtctgctagccatttagggaagggaagggcacttttaatttaatgacttcttgcaccatcttgcctggtggactggactggactgtgtcagcattgatgtactccactttttatgccttccattgtgatgacgtcaaacacagtgaacgccttcagtcatgctatggaatttgtgtatcctcattactgtatcatttgtgggagtgcaagggtaatcatttattgaactgcaagagcaagatatttgtgcggaatgatcatgggtggggccaagagaaatttaagaaagcttttaattctcgatgtgttgtcctgggtaactagggaagatg

SEQ ID NO: 3021 - DNA, 860 bp, Rattus norvegicus
  Genbank Accession No. M84716
ggctctcagagcggcaccatggcggtcgggaagaacaagcgcctgacgaaaggtggcaagaagggagccaagaagaaagtggttgatccattttctaagaaagactggtatgatgtgaaagctccagcaatgttcaatattaggaacatcgggaaaacactagttacaaggactcaaggaaccaaaattgcatcagatggcctcaagggtcgtgtgttcgaagtgagtcttgcagatctacagaacgatgaagttgcatttagaaagttcaagctaattactgaggatgttcagggcaaaaactgtctgactaacttccatggcatggatcttacccgggacaaaatgtgctccatggtcaaaaagtggcagaccatgattgaagctcatgttgacgtgaagacgaccgacgggtatttgctccgacttttctgtgttggtttcactaagaaacgtaacaaccagattagaaagacatcctatgcgcagcaccagcaggtccgccagatccgcaagaagatgatggagatcatgacccgagaagtgcagacaaatgacttgaaggaagtagttaataaactgattccagacagcattgggaaagacatagagaaggcttgccagtccatctatcctctccatgacgtttttgttaggaaagtcaaaatgctgaagaaacccaagtttgaattgggaaaactcatggagctccatggtgaaggcggtagttctggcaaaacaactggtgatgagacaggtgctaaggttgaacgagctgatggctatgaaccaccagtccaagaatccgtttaaaatccagatttttaatagcgacaaataaaaagtcctatttgtgaaca

SEQ ID NO: 3022 - DNA, 787 bp, Rattus norvegicus
  Genbank Accession No. M86389
cagtgcttctagatcctgagccctgaccagctcagccaagaccatgaccgagcgccgcgtgcccttctcgctactgcggagccccagctgggagccgttccgggactggtaccctgcccacagccgcctcttcgatcaagctttcggggtgcctcggtttcccgatgagtggtctcagtggttcagctccgctggttggcccggctatgtgcgccctctgcccgccgcgaccgccgagggccccgcagcagtgaccctggccaggcccgccttcagccgggcgctcaaccggcaactcagcagcggtgtctcagagatccgacagacggccgatcgctggcgcgtgtccctggacgtcaaccacttcgctcctgaggagctcacagttaagaccaaggaaggcgtggtggagatcactggcaagcacgaagaaaggcaggatgaacatggctacatctctcggtgcttcacccggaaatacacgctccctccaggtgtggaccccaccctggtgtcctcttccctgtcccctgagggcacactcaccgtggaggctccgctgcccaaagcagtcacacaatcagcggagatcaccattccggtcactttcgaggcccgtgcccaaattggaggcccagagtcggaacagtctggagccaagtagaagccttcagcttgctacccatccccagtagccgtcaccagccctccctctctgtcaatcgatatgctcttttgatacatgtactttctgaaaaactcaaataaaagttggaaactactgctc

SEQ ID NO: 3023 - DNA, 929 bp, Rattus norvegicus
  Genbank Accession No. M86536
cctaaaccagctccagcactccagactccagccacactccaacagagcaccatggtctcagccacccgctcgcttctctgtgcagcgctgcctgtgctggccaccagccgccaagccacaggggcgcccgtcgccaatgagctgcgctgtcagtgcctgcagacagtggcagggattcacttcaagaacatccagagtttgaaggtgatgccgccaggaccccactgcacccaaaccgaagtcatagccacactcaagaatggtcgcgaggcttgccttgaccctgaagcccccatggttcagaagattgtccaaaagatgctaaagggtgtccccaagtaatggagaaagaagatagattgcaccgatggcgtctgtctggtgaacgctggcttctgacaacactagttttacacattttacgatttctattgagggtcctatttattttatgtatttatttattccaccaagtgtgtggtttttattttacattaatatttaacgatgtggatgcgtttcatcgatggtcgttcaattccaattgtgcagtttaaagatggtaggcgttaaatatctcgttaaattaatatttattgggagaccattaggtgtcaaccactgtgctagaaggtgttgagcgggaagaagggcggagagatgagagtctgggatcgtgttttgtgttagggtgaggaatgtgtgagaggctatgttgtatgttttgaaagaatgttatttattgaaagttgtctttcatattttatggtcaacattgatgtgttgaagcttcccttggacattttatgtctagtttgtagggcacaatgccttttatattctttaaccaatgctccttctcgtctcaggacagagaagttcaaaggactgttacaaatgaaataaaaataaaagttttattaaaaaat

SEQ ID NO: 3024 - DNA, 1309 bp, Rattus norvegicus
  Genbank Accession No. M86758
gaattccgttgctgtcgctagctctctctcttttttttttacagcttaatatttgtggtgcaatttgaagtgaactgaaccgggtgatttcacttctctcacaggagcatctggacagtacaccacttgtgatggagacttctatgcctgaatactatgacgtttttggtgatttccatggatttttaatggataaacggttcaccaaatattgggaagacgttgaaacattcttggcaaggccagatgaccttctcattgttacttatcctaaatctggcagcacatggattagtgaaattgtggatatgatctataaagaaggtgatgtggaaaaatgcaaggaggatgcactttttaacagaatacctgacctggagtgcagaaatgaagatctaataaacggaataaaacaactaaaagaaaaggaatcgcctagaatagtgaaaactcacctgccagctaagctccttccagcatcattttgggaaaagaattgcaagataatctatctttgccgaaatgccaaagatgtcgtcgtttcttattactactttttcctgatcatgaaaagttatccaaatcctaaatctttttctgaatttgtggagaaatttatggaagggcaagttccgtatggttcctggtatgatcatgtaaaatcttggtgggagaagagtaagaattcacgtgttttgtttatgttctatgaggacatgaaagaggatatccgaagagaagttgtgaagctgatagagttcctggagagagacccatcagcagagctagtagacagaatcattcaacatacatcattccaggagatgaagaacaatccatgcaccaattattcaatgctgccagagaccatgatagatctaaaagtatcgcctttcatgagaaagggaattgtaggagactggaagaaccacttccctgaagccctgagggagagatttgaggagcactaccagcagcaaatgaaggactgccctgtgaaatttagagcagagctctgagacaattccttgtgtctgaaattggagtagtctccaatttatccttcagtttttcttgttttgaattcagtagaagtagaagtcttttgaagactgagggtttaaattcattctggtttttttaatctaacttttatatcaatctagtttctgaatgttttgttggcaaaataacatttttcatatatacatatatatacatatatatatatatatatatatatatatatataacacaagcattgtcctctaatagtgttcaaagatttctaataaaaaaaccggaattc

SEQ ID NO: 3025 - DNA, 2398 bp, Rattus norvegicus
  Genbank Accession No. M86870
atggcgaaggctgtgtgatgctcatagggagaagaagatgttgatgtattgattgatgaccagctcccggtataggctgaaggctcaggctgcggggtggggccggtgtggcggggcgccaccgtctcgccctgattcgtgcggggattggacggctgcggcttccttgcctctaaccaatcaccgggctgaacttcctggaggttttggtgcgctccagcgtcgcttgggaggtcggcgagtgcttcgctgtggtgggtgtctgcaggcctccctcggcaccttaccatgaagctccggaaagcttggctgttggtcctgctcttggcgctgacacagctgctggctgctgcgagcgccgaagatgcgcacgaagatgcttcagattcagaaaatcccattgaggatgacgacgaggaggaggaagatgaagaagatgaagatgacttggaagttaaggaagaaaatggtgtttgggtcctaaacgatgaaaacttcgataactttgtggctgacaaagatacagtgctcctggagttctatgcaccgtggtgtggacactgcaagcaatttgctccagaatatgagaaaattgccagtactttgaaggataatgatcctcccattgctgttgcaaagattgacgcgacctcagcatccatgttggccagcaaattcgatgtgagtggctaccccaccatcaagatcctgaagaagggacaggctgttgactatgacggctccaggacccaggaagaaattgttgccaaagtcagagaagtttcccagcctgattggacacctccacctgaagtcactcttacattgactaaagagaactttgacgatgttgtaaataatgcagacatcattttggtggagttctatgccccatggtgcggacactgcaagaaacttgcccctgagtatgagaaggctgccaaggagctcagcaagcgctctcccccaattcccttagccaaagttgatgccaccgaacagacagacctggctaagaggtttgatgtctctggctaccccactttgaaaatattccgcaaaggaaggccttttgactacaatggtccacgagagaaatatggaattgttgactacatggttgagcagtctggacctccttccaaggagattctgaccctgaagcaggtccaggagtttctgaaggatggagatgatgtagtcatccttggagtctttcagggagtcggtgacccaggctacttgcagtatcaggatgctgctaacaccctgagagaagattacaaatttcaccacactttcagcactgaaatagctaagttcctgaaagtctccctggggaaactggtgctgatgcagcctgagaagttccagtccaagtatgagcccaggatgcatgtgatggatgttcagggctccacagaggcatcagccattaaggactatgtggtgaaacatgacttgcccctagtgggccacaggaagacttctaacgatgctaagcggtacagcaagcgccccctggtggttgtatactacagcgtggacttcagctttgattacagaactgctactcagttttggcgtaacaaagtcctagaggtggccaaggacttccctgagtacacattcgccattgctgatgaagaagactatgccacagaggtgaaggacctgggactgagtgagagtggagaggacgtcaatgcagccatcctagatgagagtgggaagaagtttgccatggagccagaggagtttgattcagatgctctccgagaatttgtcatggctttcaaaaaaggaaaactaaagccagttatcaaatcacagccagttcccaagaacaacaagggaccagtcagggtggtagtggggaagacctttgatgccattgtgatggaccccaaaaaggacgtcctcattgaattctatgcaccgtggtgtgggcactgcaagcagctggagcctgtctacaccagcctaggcaagaagtacaagggccagaaggacttggtcatcgccaagatggatgctactgccaatgacatcaccaacgaccgatacaaggtggagggcttccccaccatctattttgcccccagtggggacaaaaagaacccaattaagtttgagggtggcaacagagatctggagcatttgagcaagtttatcgatgaacatgccacaaagaggagcaggaccaaggaagagctttaaggcctggctgtgtgcagaaggtggagggatcagacactgtagtggacagctttggccaccaagcaagcaagccgtcattgaatggcaggatcttgaccctttttttgttatattttattaatgccacctcatgctctgatactgatagcatgatgacttgatagtttagatcagattt

SEQ ID NO: 3026 - DNA, 1131 bp, Rattus norvegicus
  Genbank Accession No. M91234
gaattctttacttttctcgctgatcatcattaacatggagagtgcctttggtcctatccccacagcagcccagtttcctgcccctatggttaaaatgactccccaggttgggggacaaaaagagcccctaaaatagtttcaaagaatctacaactgtgaagaactttgttttgccagtcaggattaatgttttcttttccatgggctatagcccactgagacagtttggtaaagggctgttactaaagtcctgaaagccccaggtgaactggttacaattcttttgtcagctgcttagtatttagcacccaggttctaaccatctctccatccttttgttattagttgttactagaagcctagtgtcatttggaggctggttctcttgagagcaaagccaccaagctgacactgaagggaggtaggtactccttaagggaaaatctaagcccagagagacagccggtaacagctaggctgcctctctgctcgcctttctgtttcatagacaaagcttgtgcttatatttacagtggcctttttgtccaaaaaaaggcctcctggtttagctgtgtgactaaatgctatttgtcctcttcagtggacctctctcctctagattcccttcttgttttctcaccatcccacgtgagatgcttgttagtaactgttacaggtcttctttaccaccgaggaaagacagaatcctactagaggcctgaaagaatgttccagacatggctagaaggcccctcacttgtgcctgctctcttcagacgctgaaggtagggagtgccaggtctgcccccaggctccaagggtgggtctcctaggggctggaaaagccccaccaatctggctaagatcaaggaaagggtatgaagagaaagttacagaaatttgaagggttaagctaagttgctgagagttagtataagttacagagaaagtaaggttaaacaaagagaaagagaaaagaaggtaaaaaggcagaagctagggaagaaaagagacaaaaagaagaggaagctagagagctaaagagagataaaagacaagagaggaacatatactggccacagtagttagggaacctaagaagacagttacctggcaacagaagagaattcg

SEQ ID NO: 3027 - DNA, 1859 bp, Rattus norvegicus
  Genbank Accession No. M91466
ggcacgagcggtctcggcgctgtggccatgcctggcggcaccttagcggctgtcctgagcccgacacaaccccggtagaggactccccgggcccggctggcccggccatgcagctagagacgcaggacgcgctgtacgtggcgctggagctggttatcgccgcgctggcagtggcgggcaacgtgctggtgtgcgctgcggtgggagcctcgagtgctttacagacccccaccaactactttctggtgtccctggcgacggcggacgtggctgtgggactcttcgccatcccctttgccatcaccatcagcctgggcttctgcacggactttcacagctgcctcttcctcgcctgcttcgtgctggtgctcacacagagctccatctttagcctcttggcggtggctgtcgaccggtatctggccattcgcgtcccgctcaggtataaaggtttggtcactggaacacgagcaagagggatcatcgctgtcctctgggtccttgcctttggcattggactgactcctttcctgggttggaacagtaaagaccgtgccaccagcaactgcacagaacctggggatggcatcacgaataagagctgctgccctgtgaagtgtctctttgagaacgtagttcccatgagctacatggtttatttcaacttctttgggtgtgtccttcctccactgctcatcatgatggtgatctacatcaaaatcttcatggtggcctgcaagcagcttcagcacatggaactgatggagcactccaggaccacgctgcagcgggagatccacgcggccaagtcactggctatgattgtgggcatctttgctctgtgttggctccccgtgcatgccatcaactgcatcaccctcttccatccagccctggccaaggacaagcccaaatgggtgatgaatgtggccatcctcctgtcacacgccaattcagttgtcaatcccattgtctatgcctacaggaaccgggacttccgctacagtttccacaggatcatctccagatacgttctctgccagacggacaccaagggtgggagcgggcaggccgggggacagtcaactttcagtctgagcttgtgacctaggctctggcctttgggagaagaaggcttaaaataaacaatggactggacacagctggtgacctcactgtggaggacaactaccctctcaagcatgtggcccacctgccctgaacgcttgccaggagtcacacaagtctggctcacacgtacatgcaactaggaggccctgaggctaacagatacacttaggaatctattcagctgctcttacttactgtgtggatggcgggcggctagaactgattccaaaaactgttttatttttaagaatctgcctcattcgtggtagaaaaatgactgaaacttaccttactgtgaaacactgtgaactatataatgtaagtatttttcacttacagcaatgggaaaataaaagttggctctattaacatatactcattccggggacagcaactcagaaaactgaagtataattcttcagtcaagatactgtagtgttaatttagggaatggtactaccctaagtttgaaagtagaattatgtaacaaaacaatttgagttcagtatcttccttgcccacaaaacactagaggtggaaacttggagagctgggtccttcctccactgcacccctgctttagagctaggtactagagtttgcttctctctcacattacagtttattggatcccaaagtatgaaaattttactgagcaaaatcccctagctgtgtattatatccagtgaaataaaactttgaaaggtgaaaaaaaaaaaaaaaaaaaa

SEQ ID NO: 3028 - DNA, 2793 bp, Rattus norvegicus
  Genbank Accession No. M91652
acagccgagaatgggagtagggcggagtgtttgagcagcacacccatttcctctccgctcttcgtctcgttctcgtggcctgtccacccatccatcatctgccggccaccgctctgaacaccttccaccatggccacctcagcaagttcccacttgaacaaaggcatcaagcagatgtacatgaacctgccccagggcgagaagatccaactcatgtatatctgggttgatggtaccggggaagggctacgctgcaagacccgtactctggactgtgaccccaagtgtgtagaagagttacccgagtggaactttgatggttctagtacgtttcagtctgaaggctccaacagcgacatgtacctccatcctgtggccatgtttcgagaccccttccgcagagaccccaacaagctggtgttctgcgaagtattcaagtataaccggaagcccgcagagaccaacctgaggcacagctgtaagcgtataatggacatggtgagcagccagcgcccctggtttggaatggaacaggagtatactctcatgggaacagacggccaccctttcggctggccttctaatggcttccctggaccccaaggaccctattactgcggtgtgggagctgacaaggcttatggccgagatatcgtggaggctcactaccgggcctgcttgtatgctggaatcaagatcacagggacaaatgccgaggttatgcctgcccagtgggaattccagataggaccctgcgaagggatccgcatgggagatcatctctgggtagcccgttttatcttgcatcgggtatgcgaagactttggggtgatagcaacctttgaccccaagcccattccagggaactggaatggggcaggctgccacaccaactttagcaccaaggccatgcgggaggagaatggtctgaggtgcattgaggaggccattgataaactgagcaagaggcaccagtaccacatccgtgcctacgaccccaaggggggcctggacaacgcccgccgtctgactggattccacgaaacctccaacatcaacgacttttccgctggcgttgccaaccgcagcgccagtatccgcattccccggattgtcggccaggagaagaagggttactttgaagaccgtcggccttctgccaattgcgacccctatgcggtgacggaagccatcgtccgcacgtgtctcctcaacgaaactggcgacgagcccttccaatacaagaactaagcggactcgacttccagtgatcttgagcccttcctagttcaccccactcccaactgttccctctcccactggtccccactgtaactcaaaaggatggaataccaaggtctttttattccttgcgcccagttaatttttgcctttattggtcagaatagaggggtcaggttcttaatctctacacacccaaccccttctttcctagctagctttccagtgggggaacgggagggggtggggaagggtaacccaccgcttcatctcagcgggaatgcatgtcctgtaggcatagctgtcacaaatcgggtgtacttgtggtgagggaggactggttttttttttccttcaggataattgaaagggcaggcccaacagcttagattaacattttctctgtcagtagagagctgttatttcttccggtgaaaccagctttctattgaagtctggtgaggagttggaggttggtctcttggcttccttagcttagggaaggggagttcaccctcccttcatgaaacacagttcacctgacaaatggccctactgtaaaggaagaaaaaagtttcttggtcctccatttataactcaaagcagagtagtatttttatatttaaatgttaaaaacaaaaaagttatatatatgggtgtgtggatatatatgtcttttctaattgagaaaaccatcctattccctgggtgccaagtttgagtgaggagctcggtgtagaagtgaggcactcttgaggtaggggtggggatgcagtactgggaaagttggttatcttgggggttcagcttcattactacttagggtttccctgcccactctgcaggagcagatgttggacaggtagccagtgggatgccactgcttgccgccactgtccctgggcttagtttaaggggacgtgtatacctaatccacacacgagttagaagtatgagttggctggtcaacttgaacattgttacaggcgggtgggtgttagtggggggttattttttggtgggactagcatgtcactaaagcgggccttttgatatattaaattttttaaagcaaaacaagtttagattttaatcaagttcgtagggtttctaactttacagaattgcctgtttgtttcaatgactccttccacttggctcttaggggaactgaggacaggcctggagttaatacacttgtcattctgtgtcctagtgtcctcttcctccggcagactgtccccttccttctgaaaaagccgatagagtcttgttttatttttcttttataataaacacaccccacctccatcccagcttgttgccttgcagttttctggatgtttgtgtcggcagcaggcagctgtggtttttttctcttgccacgatgactctaattaccatgtatagtatgttcagttagataactcactgtaaacagactgtaactgagagcagagcttgtaaatcaacctaacgtttataagatttcctctgacttgtttctttgtggttccaaaaaaaaaaaaaaaaaaaaaaacctcaaaaact

SEQ ID NO: 3029 - DNA, 307 bp, Rattus norvegicus
  Genbank Accession No. M93257
aagtcagcaaactgtaaatgttccagacggccaaaataacagcagaggctcagagacagtactgtactactgtccccagcagctcacaccacatctcatctgaagaatgagtacaagctttccaggtatggtggtgacgcctgtcatccccagtatccaggaggcagaggcatcggagttcagcgccagcctggtctacataagtgagttccaagacagccagggctacgtagaaatactttttaaagaaagttataacctcttttatattataaaagaaattaaagatctacatatttggatacaa

SEQ ID NO: 3030 - DNA, 2059 bp, Rattus norvegicus
  Genbank Accession No. M93401
ggcaggagaagtgatctgttatctcacctggcacatgaagcccattcctggaactatgcaaagggcagagtctggtgagccatggcggcggcagtggcggcagcagcagcagtgcggtcccggatcctgcaggtttcttctaaagtaaactccacatggtatccagcatcttctttctcttcatcatcagtgccaactgtaaagctcttcattgatgggaaattcgttgaatccaaaagtgacaaatggattgacatccacaacccagccaccaatgaggttgttggtcgggttcctcagtccaccaaagctgaaatggaggcagccgtagccgcctgcaaacgcgctttccctgcgtgggcagacacatctattttaagccggcagcaggtcctgcttcgttatcagcaactcattaaagaaaacctgaaagaaatcgccaggttaatcacattggaacaagggaagactctggctgatgctgaaggagatgtgttccgaggccttcaggtggttgagcatgcctgcagtgtgacgtccctcatgctgggagagaccatgccatctattaccaaagacatggacctttattcctaccgcctgcctctgggagtgtgtgcaggcatcgcaccatttaattttcctgccatgatccccctttggatgtttcccatggctatggtctgtggaaatactttcctaatgaaaccatcagagcgagtacctggagcaaccatgcttcttgctaagttgcttcaggattctggtgccccggacggaacactgaacatcatccatggacaacatgaagctgtaaattttatttgcgatcatccagacatcaaggcaatcagctttgtgggatccaaccaggcgggagagtacatcttcgaaagagggtcaagaaatggcaagagggttcaagccaatatgggagccaagaaccatggggtagtcatgccagatgccaataaggaaaataccctcaaccagctggttggggcagcatttggagctgctgggcagcgctgcatggctctttcaacagccgtccttgtgggagaagctaagaagtggctgccagaactggtagagcgtgccaagaatctccgcgtcaatgcaggagatcagcctggagctgatcttggtcccctgatcaccccccaggccaaagagagagtctgcaatctgattgatagtggagcaaaagagggggcttccatccttctggatgggcggaaaattaaagttaagggctacgaaaacggtaactttgttggaccaaccatcatctccaatgttaagccaagtatgacttgttacaaagaggagatttttggtccagttcttgtggtcttagagacagaaaccctggatgaagccatcaagattgttaatgacaacccatatggaaacgggactgctatctttaccaccaacggagccatagctcggaaatacgctcacatggtggatgtgggacaggtgggcgtgaatgtccccattccagtgcctttgccaatgttttccttcaccggctctcgatcttccttcaggggagacaccaatttctatggcaaacagggcatccagttttacactcagttaaagactatcacatctcagtggaaggaagaagatgctactctttcctcacctgcagtggtcatgcctaccatggggcgttagaacgttcaagactccatccagcctgagtaacttcccactgtccttggcaatcttcgtctgccatctttgctcaaaacagatccatgaggatggagtatattgcaatgaaattctttctcagaactcgcaatcccttcaaagttatagggagtacaggataacaccaacgccaggccttcacttgttctccatacttctctacggtttttgaggttaactgttgttaagcgtgaagtgtttgcctagaataagagcttagaactgtcttctaacaattcttttctgatgacttggagggacaacgtaggggcccggtccttggcaatcttcgtctgccatctttgctcaaaaacagtccatgaggatggag

SEQ ID NO: 3031 - DNA, 1977 bp, Rattus norvegicus
  Genbank Accession No. M94548
gtcctcctctgggacagggaaggatgtcacagctgagcctctcctggctgggactggggcctgaggtggccttcccatggcagaccctgctactgtttggagcctcctggatcctggcccaaattctgacccagatctacgctgcctataggaactttcgtcgcctccgtggcttccctcagccccccaaacggaactggcttatgggtcatgtgggcatggtcactcctacagagcagggcttgaaggaattgactcggttggtgggtacctacccccaaggctttttgatgtggattgggccaatggtccccgttattactctgtgccactctgacatcgtccgatctatcctcaatgcctcagctgccgttgcgctcaaggatgtgatattctacaccatcctcaagccttggctgggggatgggctcctggtgagtgctggtgacaagtggagccgccaccgccgcatgctgacacctgccttccacttcaacatcctgaaaccctatgtgaagattttcaacgacagcaccaacatcatgcacgccaagtggaaacggttgatttcagaaggcagttcccgtctggacatgtttgagcacgtcagcctcatgactctggacagtctgcagaaatgtgtcttcagctttgacagcaactgccaggagaagtccagtgaatatattgctgccatcctggagctcagtgccctagtggccaaaaggcaccagcagcctttgctgttcatggacctgctgtacaatctcacccctgatgggatgcgcttccataaggcctgcaacctggtgcatgaattcactgatgccgtcatccgggagcggcgccgcaccctcccagatcagggtttggatgagtttctcaagtctaaggccaagtccaagactttggatttcattgatgtgctgctcctgaccaaggatgaagatggaaaggagctgtcggatgaggacatcagagcagaggccgacaccttcatgtttgagggccatgacaccacagccagtgggctctcctggattctatacaacctggcgaacgacccagagtaccaggagcgctgccggcaggaagttcaggagcttctgagggaccgagatcctgaggagattgaatgggacgacctggcccagctgcccttcctgaccatgtgcatcaaggagagtctgcggctgcaccccccagtcacggtcatctcccgatgctgcacccaggacattctgctcccagatggcaggaccattcccaaaggtatcatctgccttatcagtatctttggaattcatcacaacccgtctgtgtggccggaccctgaggtctacaaccccttccgctttgaccctgaaaacatcaaagacagctcacctctggcatttattcccttctcggcggggcccaggaactgcataggtcagactttcgccatgagcgagatgaaggtggcgctggcactaacactgctgcgcttccgactcctaccggacgacaaggaaccgcgcaggcagccagagctgatcctgcgtgccgagggcggactgtggctgcgggtggagccgctgacggcgggcgcgcagtgacctcacagttggtctggagcacccccaccatcctacctctgaggatcccagaatgaacagaactgtcacccataccagaatcttacggagggccagcagggggcgctgtgaatccagtgagtgggtgagagaggccagttagtgtctgagccaaagacctttgacttcgtctaactgatcgccagcctttatcataaggtgcattcttctccaaccaacctggactattctctggacaataggaagccaaagaaacgtctgagcaagagaccagaatgaaacgcaaatttgagctcttattctcgcagcaaatcccttattcagctccatttccattattttgacctacattcaaatcatctaataaatacattctctc

SEQ ID NO: 3032 - DNA, 1662 bp, Rattus norvegicus
  Genbank Accession No. M95591
ggccccgctcctcgccctgcctaccgccggcatctaaacacaggtgggagtgggagatcccgacaggtgagccccgcgccccgcagccacaaggatggagttcgtgaagtgtctaggccacccggaggagttctacaacctgctgcgattccgcatgggaggccggcggaatttcatacccaagatggaccggaactcgctcagcaacagcttgaagacttgctataagtatcttgatcagaccagtcgcagcttcgccgcggttatccaggcgctggatggggacatacgtcatgcggtgtgtgtgttttacctgatcctccgagccatggacacagtggaggatgacatggccatcagtgtggagaagaagatcccactgctgcgaaactttcacactttcctctatgagccggagtggcggttcaccgagagcaaggagaagcaccgagtagtgctggaggacttccccacgatctccctggagtttagaaatttggctgagaaatatcaaacagtgatcgctgacatctgtcacaggatgggatgtgggatggcagaatttctaaacaaggatgtaacctccaaacaggactgggacaagtactgtcactatgttgctggactggtgggaatcggcctttctcgcctattctctgcctcagagtttgaagatcccatagttggtgaagacacagagtgtgccaattctatgggtctgtttctgcagaaaacaaatatcattcgtgattatctggaagaccaacaagaaggaagacagttttggcctcaagaggtatggggcaaatatgttaagaagctggaagactttgttaagccagagaacgtagatgtggccgtgaagtgcttgaatgaactcataaccaacgccctacaacacatccctgacgtcatcacctacctgtcaaggctccggaaccaaagtgtgtttaacttctgtgccattccacaggtaatggccattgctacgctggctgcctgttacaataaccatcaggtattcaagggagtagtgaagattcggaaggggcaagcagttaccctcatgatggatgccaccaacatgccagctgtcaaagctatcatataccagtacatagaagagatttatcaccgggtccccaactcagacccgtcagctagcaaggccaagcagctcatctccaacatcaggacgcagagccttcccaattgccagctcatctcccgaagccactactcccccatttacctgtccttcatcatgctcttggctgccctgagctggcagtacttgagcactctgtcccaggtcacagaagactatgtccagagagaacactgactttgtttagctggaagcggaagtccacgtgaagtgggtttttcttcttcccccagctggattttgacttcccttggtttttccttctactctaatctttcggagaactgagtgtgggacctttaggaactctgaagaggaaaggacgccttgccctcagcagcctggtgcttcctggatgtggtccctgcctcttgtagccactggcatcatgttgaccgaagcactggaaaggccacatgtgatcctagtgaacctggctagaatgctgattgaatctatttaatttgaaacagcctttgaatacctatcacagt

SEQ ID NO: 3033 - DNA, 2563 bp, Rattus norvegicus
  Genbank Accession No. M96548
cggaacagtctaagggtgttcactttggggactcagtgagtccccctctgttatggagtacagtgtctcttgaatcttacttctggaaatccacggacaagaagactggtgacctatcgattttgtgatgcccacccctggctcctggttccctctctagaggcagaagagccaggcgcagctaatgggacgctttcggagatgctgcgtctgacaggtgcgaagcaacatgtgcaactcctttcttcttcctcccctcagatcctcctccatcttcacccatctttagaggaagagcctacagaaagaagatggctcctgagcaaagagaaggggcctctcaggtgtcagtgacatttgaagatgtggctgtgctctttactcgggacgagtggaagaagctggatctgtctcagagaagcctgtaccgtgaggtgatgctggagaattacagcaacctggcctccatggcaggattcctgtttaccaaaccaaaggtgatctccctgttgcagcaaggagaggatccctggcaggtggagaaagagggccccagatacttctctctcggattgaagtgcagtcatagaaccactaagtcaactcaaacacaagactcttcatttcaggaactgattgtaagaaaatctaaaagaacctttgccttcgaacctttgaacatgaagtcagaaaatcttttcatacatgaaggcaaattagaggaaaagtgggataagaatactttgactgtagaaagaagccataaaaacaatgaatttagcccaaagtcccatagagaaaaacggtcctcagaatgtaaaaagcagatatcttatttatctaacccaccaggaatcacaccggataaacgctataaatgtagcatgtgtgagaaaaccttcattaacacctcatctcttcgcaaacatgagaaaaaccatagtggagagaaattatttaaatgtaaagaatgttcaaaagccttcagccaaagttcagcccttattcaacatcaaataactcacactggagagaagccttacgtatgtaaagaatgtgggaaggccttcactctcagtacgtccctgtataaacatctcagaacccacactgtggagaaatcctacagatgtaaggaatgtggtaaatcctttggccaaaggtcaggtctttttatacaccagaagatccatgcccgagaaaaccctcatagatataacccaggaaggaaggcatccgcttccctctctggatgccagagagctcattccaggaagaagacctacttgtgtaatgaatgtggcaacaccttcaagtctagctcctccctccgttaccatcagagaatccacaccggagagaaacctttcagatgtagcgaatgcggcagagccttcagtcagagcgcatcacttattcagcacgaaagaatccacacgggagaaaagccctacaggtgtggcgagtgtgggaaaggcttcacttctatctcaagactcaatagacaccggataattcatacaggagagaaattgtataattgcaatgagtgtggcaaagccttaagttcccactcaactcttattattcacgaacgaatccacactggagagaaaccgtgtaaatgtaaagtttgtgggaaagccttcagacagagttcagctctgatccaacatcagagaatgcacactggggaaagaccctataaatgtaatgagtgcgggaaaacattcaggtgtaactcatccctaagtaaccaccagcgaatccacactggagagaaaccttatcaatgtatagaatgtgggatgtcgtttggacaaagttctgctcttattcagcaccgaaggattcacacgggagagaaaccgtttaaatgtaacacatgcggaaagacctttaggcagagctcctcacgtatagcacatcagcgaattcatactggggagaaaccctacgaatgtaacacgtgtgggaaacttttcaactataggtcatcccttaccaatcattataaaatccatgtggatgaggacccttaaaaagtaaatttgcatgtaaaaaagccttaaaccaaagctcttcagagaatgggcttgagagctgtaataaacatactatggcgtccctgtagtcatttagttactgtcaactaaattccatggataaatcctgtgtaacaggtaggagtgaaatattcatgcctgtccaacactttaaaaaaattgcttgaaatccggtggttatgtgtagtcctggctaccggggaccctgaggattgcttgactccacaagtttgaagagcaaatgttatggagctttccatctcagaagattagtgacctgaaatgaagaattcacagctgaaggccttgacttcaggtatttggaaaatggtgcttttctctctgcaacagtgtgtgctagatacaattgtaatcataggcatctaagtgaacagaggagtgggatggacttagcaaaacacaaaactctactgttgtgatacttttatactattttaataatatccaaaagggatcaacacaaatcaaaaaaaaaa

SEQ ID NO: 3034 - DNA, 1308 bp, Rattus norvegicus
  Genbank Accession No. M96578
gtagtaacacatcgtgtctttaatgtcatcatcatacttcttatctgtttccaagcaacaaccattatgatacaaaatgatgagcagagtccacaaattgaaaccgctgtcttctggatgaactccctttttaggaggctgttcactctggaatgcatactgaagctcaccgccttccgctgccactatttcaccagcgcatggaatgttcatgactttatggtggtcgttttctccattacaggactgctgctgcctttgtcaataggacaatactttgtgcctccttcactggtgcagctgcttcttctctctcgcatcatccatgtcctgcgtcctgggaaaggaccaaaggtgttccatgatctgatgcttcccttgatgctgtcactcccagcactgctcaacataggtcttctcatcttcctggtcatgttcatctacgccatctttggaatgtacaacttcgcctacgtgaagaaagaagccggaattaatgatgtgtccaagtttgagacctttggaagcagtatgctttgtctctttcaagttacaacattttctggttgggacgggatgctggatgcaattttcaacagtcagtggtctgactgcgatcctgataaaattaacccagggactcaggtcaggggagactgtgggagcccttctgttgggattttttattttgtcagttacatcctcatatcatggttgatcattgttaatatgtacgttgttttgatcatggagttcttaagtattccttctaagagaaaaaacaggaccttgagcgaagatgactttaggagattcttcaaggtatggaacaggtttgaccctgacaggacccagtacatagactctactaagctttctgattttgcagctgctctcgatcctcctcttttcatggcaaaaccaaacaaggtccagcttgtagccatggatctccccatggctgcaggagacagaatccattgccttcatattttgcttgcctttacgaaaagagtgatgggaaaggatgagcgggtggagaagatcctttcagagatagaatctgggtttatgttagcgaaccctttcaaaattacgtatgagccgattacaacgactttgaaacgcaaacaagaggcagtctcagccactatcatccagcgggcatacaaaagttaccgcttaaggcaaagtgacaaaaagatacaagatatcccggaaatagatgatggcagggaggatcctaactctaaaggtgtccactctggtcaaatcgaggaaaaggcatctattcagacccagatctaa

SEQ ID NO: 3035 - DNA, 3083 bp, Rattus norvegicus
  Genbank Accession No. M96853
gcaaaactccaatgaagtcagagccccctactcgccgccgcggccaggccccccaacatggactgtctctgtatagtgacaaccaagaaataccgctaccaagatgaagacacgccccctctggaacacagcccggcccacctccccaaccaggccaattctccccctgtgattgtcaacacggacaccctagaagccccaggatatgagttgcaggtgaatggaacagagggggagatggagtatgaggagatcacattggaaaggggtaactcaggtctgggcttcagcatcgcaggtggcactgacaacccgcacatcggtgacgacccgtccatttttatcaccaagatcattcctggtggggctgcagcccaggatggccgcctcagggtcaatgacagcatcctgtttgtaaatgaagtggatgttcgggaggtgacccattcagctgcggtggaggccctcaaagaggcaggttccatcgttcgcctctatgtcatgcgccggaaacccccagccgaaaaggtcatggagatcaaactcatcaaagggcctaaaggacttggcttcagcattgcggggggcgttgggaaccagcacatccctggagataacagcatctatgtaacgaagatcatcgaaggaggtgctgcccacaaggatggcaggttgcagattggagacaagatcctggcggtcaacagtgtggggctggaggacgtcatgcacgaggatgccgtggcagccctgaagaacacatatgacgttgtgtacctaaaggtggccaagcccagcaatgcctacctgagtgacagctatgctcccccagacatcacaacctcgtattctcagcacctggacaatgagatcagtcatagcagctacttgggcactgactaccccacagccatgacccccacttcccctcggcgctactcccctgtggccaaggacctgctgggggaggaagacattccccgggaaccaaggcggatcgtgatccatcggggctccaccggcctgggcttcaacatcgtgggcggcgaggatggtgaaggcatcttcatctccttcatccttgctgggggtccagccgacctcagtggggagctacggaagggggaccagatcctgtcggtcaatggtgttgacctccgcaatgccagtcacgaacaggctgccattgccctgaagaatgcgggtcagacggtcacgatcatcgctcagtataaaccagaagagtatagtcgattcgaggccaagatccatgatcttcgggaacagctcatgaatagtagcctaggctcagggactgcatccttgcgaagcaaccccaagaggggcttctacattagggccctgtttgattacgacaagaccaaggactgcggtttcttgagccaggccctgagcttccgcttcggggatgtgcttcatgtcattgacgctggtgacgaagagtggtggcaagcacggcgggtccactccgacagtgagaccgacgacattggcttcattcccagcaaacggcgggtcgagcgacgagagtggtcaaggttaaaggccaaggactggggctccagctctggatcacagggtcgagaagactcggttctgagctatgagacggtgacccagatggaagtgcactatgctcgtcccatcatcatccttggacccaccaaagaccgtgccaacgatgatcttctctccgagttccccgacaagtttggatcctgtgtccctcatacgacacgtcctaagcgggaatatgagatagacggccgggattaccactttgtctcctcccgggagaaaatggagaaggacatccaggcacacaagttcattgaggctggccagtacaacagccacctctatgggaccagcgtccagtctgtgcgagaggtagcagagcaggggaagcactgcatcctcgatgtctcggccaatgccgtgcggcggctgcaggcggcccacctgcaccccatcgccatcttcatccgtccccgctccctggagaatgtgctagagatcaataagcggatcacagaggagcaagcccggaaagccttcgacagagccacgaagctggagcaggagttcacagagtgcttctcagccatcgtagagggcgacagctttgaagagatctatcacaaagtgaaacgtgtcattgaagacctctcaggcccctacatctgggtcccagcccgagagagactctgattcctgccctggcttggcctggactcaccctgcctccaccacatgggcccttggtgtggactgaatagcccaagtcctttgtaccccagcctcccttcccacccttcttatttatttcctttctaactggatcgagcccactggaggggggacactcctctgcatgtatccctgcaacccagatcagggcccctggaccccaagaacctggggtctgggggaggggagctgggctcctggttccgagcccttgctccttaggacccctacccccgcccgcccccatgcacacatagacccactgggggcctctgccctccccattttctcccacacacattccagaagtcagggcccctctcaaggagtacccgctgtagggatgcagggccacaggcttccgcgctctcctgaggcaggggctggggtcacccctgccccatcataactccccatgccatttgagttctcatttattttctccatttttttcttctcaaaggtggtttttggggggagacgcatgggggctctcctgagggtcccctgtctttcacacacctcccaccttttttctttgctggtttgcatgagtggaaggtctaactgtgggcttttttttttcctgggattttattttattttatttcattttatttttttgggaaaaggggagggatgggtctagggagtggggaatatgggaggggggtgggggggcaaggggtcaggggttgggtgtccgggagccaggggaggacaggaaatgctgccgccttctgcaatttatttattttttcttttgagagagtgaaaggaagagacagacacttgaaaaaaaaaaaaaaaaa

SEQ ID NO: 3036 - DNA, 1442 bp, Rattus norvegicus
  Genbank Accession No. NM_012495
gtcccccccaccccagctgaataggctgcgttctcttggaacgcgccgcagaacgaggttctgtgaccctagccgcgttccctccttagttcctttcgcctacccacccgcgtacccgacagacccaccccgtcctgtgccaggaaagcgctgccaccggcaccatgccccacccatacccagcactgaccccggagcagaagaaggagctggctgacatcgctcaccgaattgtagctccgggcaagggcatcctggctgcagacgagtccactggaagcattgccaagcgcctgcagtccattggcaccgagaacaccgaggagaacaggcgcttctaccgccaactgctgctgactgccgatgaccgtgtgaatccctgcattggaggggtgatccttttccacgagacactgtaccagaaggcagatgatggccgtcccttcccccaagttatcaagtccaagggtggtgttgtgggcattaaggtagataagggtgtagtgcccctggctggaaccaatggcgagaccactactcaagggctggacgggctgtctgagcgctgtgcccagtataagaaggatggagccgactttgccaagtggcgctgtgtgctaaagattggggagcatactccctcgtccctcgccatcatggaaaatgccaatgttctggcccgttacgctagcatctgccagcagaatggcattgtacccattgtggagcctgaaattctccctgatggggaccatgacttgaagcgctgccagtatgtaactgagaaggtactggcagctgtctacaaggctctgagtgaccaccatgtctatctggaaggcacactgctgaagcccaacatggtcacccctggccatgcttgcacccagaaattttccaatgaggaaattgccatggcaaccgtcacagcacttcgtcgaacagtgccccctgccgtccctggggtcactttcctgtctggagggcagagtgaggaagaggcatccatcaacctcaatgctatcaacaagtgtcccctgctgaagccatgggccttgactttctcctatggccgagccctgcaggcctctgctctaaaggcttggggtgggaagaaggagaacctgaaggcagcccaggaggagtacatcaagcgagccctggccaacagcctcgcttgtcaaggaaagtacactccaagtggccagtctggagccgcagccagtgaatctctcttcatctctaaccatgcctactaaccagagctgatctaaggctgctccatcgacactccaggcccctgcctacccacttgctattgaagaggggccttcaggctctttcccatcactcttgctgccctcgtgtgtgcagtgttgtctgtgaatgctaaatctgccatcccttccagcccactgccaataaacagctatttaaggggg

SEQ ID NO: 3037 - DNA, 1882 bp, Rattus norvegicus
  Genbank Accession No. NM_012516
gggcccttgtctacgttctgcagagcctccggtccaactttgttccaaatgagcctcactgctgctctttgggttgctgtattcggaaaatgtggcccaccacctgatttaccctacgccctgccagcaagtgagatgaaccagacagactttgaaagtcacactaccctgagatacaattgtcgccctggctatagtagagcgagctcaagccagagtctctactgtaaacctctggggaaatggcagattaatatcgcctgcgtcaaaaagtcatgcaggaatccaggagacttacaaaatggaaaggtggaagttaagacagatttcttgtttggatcacagatagaattcagctgctcagagggatatatcttaattggctcatccactagttattgtgagatccaaggcaaaggagtttcctggagtgatcctctcccagaatgtgtaattgccaagtgtgggatgcctccagacatcagcaatgggaagcacaatggtagagaggaagaattcttcacatatcgttcctcagtcacctataagtgtgatcctgacttcacactccttggcaatgcctccattacctgcactgtggtgaacaaaacagtaggtgtttggagcccaagccctcctacctgtgaaagaatcatctgtccttggccaaaagttttgcatggaacaattaattctggattcaagcatacctataaatacaaagactctgtgagatttgtctgccagaaagggtttgtcctcagaggcagcggtgtaatccattgtgaggctgatggcagctggagtcccgtaccagtgtgtgagctcaatagttgcactgatattccagacattcctaatgctgccctgataaccagtcccaggccaagaaaggaagatgtatatccagtgggtactgtgctccgttacatctgtcgtcctggctatgaacctgctacgagacagcccatgactgtgatttgtcagaaagatctcagctggagcatgcttagggggtgtaaggagatatgctgtccagtaccagacccaaagagtgttagagtcattcaacatgaaaaggcacatcctgacaacgactgtacttacttctttggtgacgaagtgtcatacacatgtcaaaatgatataatgcttacagctacttgcaagtcagatggcacctggcatccccggacaccatcatgtcatcagagttgtgattttccgcctgccattgctcacggacgttatacaaaatcttcttcatactacgtcagaactcaggttacatatgaatgtgaagaaggatacagactggttggagaggcaaccatctcctgctggtattcacaatggacaccagcagctccacagtgtaaagctctatgtcggaaaccagagataggaaatggagtactgtctactaataaagatcaatatgtcgaaactgaaaatgtcaccatccaatgtgactcgggctttgtcatgctaggttcccaaagcatcacttgttcggagaatggaacctggtacccaaaggtgtccagatgtgagcaggaggtccctaaagactgtgagcacgtgtttgcaggcaagaagctcatgcaatgtctgccaaattcaaatgacgtgaaaatggccctggaggtctacaagctgactctggagattaaacaattacagctccagatagacaaggcaaagcacgttgaccgggagttatgagcgggtgttctctcaaggaggaagaagtacctcatgggctttctgacttcagtgccaagcagaacgtctgcatttttagcaacctttgtaactttggcaccaatgttcatggtaataaatatctgcttagaataattcattaaagcataatgtaagc

SEQ ID NO: 3038 - DNA, 691 bp, Rattus norvegicus
  Genbank Accession No. NM_012518
aaaagagtgtggagccgagacgcgcggcagagctcgagctgctgcagctgctgccgccgccagagtaacctcgatccccgagctccggatacgtgccccgccatggctgaccagctgaccgaagaacagattgcagagttcaaggaagccttctccctctttgacaaggatggagatggcaccattaccaccaaggagctggggactgtgatgagatcgctggggcaaaaccccactgaggcggaactgcaggacatgatcaatgaggtggatgctgatggcaatgggaccattgacttcccagagttcctgaccatgatggccagaaagatgaaggatacagacagcgaggaggagatacgagaggccttccgtgtctttgacaaggatgggaatggctacatcagtgctgctgagctgcgtcacgtcatgacgaacctgggggagaagctgactgatgaggaagtggatgagatgatccgagaggcggacattgatggagacggccaggtcaattatgaagagtttgtacagatgatgactgcgaagtgaaggcccgggcagctggccatgcccgttctcctgatctcttcttgcgctctcctctcttcaacactcccctgcgtacccggttctagcaaacgccaattgattgactgagaatctgataaagcaacaaaagatttgtccc

SEQ ID NO: 3039 - DNA, 1725 bp, Rattus norvegicus
  Genbank Accession No. NM_012554
agtgctgctccggtaccgagtcgcgctcacgtttgtccttaagactcccttcggtgtctccaggaccctctttccttcctccgcagcgatcctactgccagaacttcaccatgtccattctcaagatccatgccagagagatctttgactcccgcgggaatcccaccgttgaggtggatctctacaccgcaaaaggtctcttccgtgctgcggtgcccagcggtgcgtccactggcatctacgaggccctagaactccgagacaatgataagacccgcttcatggggaagggtgtctcaaaggctgttgagcacatcaataaaactattgcacctgctctggttagcaagaaactgaatgttgtggagcaggagaagattgaccagctgatgatcgagatggacggcacagagaataaatctaagtttggtgcaaatgccatcctgggagtgtccctggctgtctgcaaggctggtgccgtggggaagggggtgcccctttaccgtcacattgccgacttggccggcaaccctgaagtcactctgccggtcccagctttcaatgtgatcaacggcggttctcatgctggcaacaagttggccatgcaagagttcatgatcctgcctgtgggggcatcctctttccgggaagccatgcgcattggagcagaggtttaccacaacctgaagaacgtcatcaaagagaagtacgggaaagacgccaccaatgtgggtgatgagggtggattcgcacctaacatcctggagaacaaagaagcactggagctgctcaagtctgccattgcaaaggccggctacactgaccaggttgtcatcggcatggatgtggctgcctccgagttctacagggctggcaagtatgacctggacttcaagtctccagatgatgccagccggtacatcacacccgaccagctggccgacctgtacaagtccttcatcaaggactacccagtggtgtccattgaagatccctttgaccaggacgactgggatgcttggcagaagttcacagctactgcaggcatccaggtggtgggggatgacctcacagtgaccaaccctaagcggatcgccaaggctgcaggcgaaaagtcctgcaactgcctcctgctcaaagtgaaccagattggctctgtgaccgagtctctgcaggcgtgtaagctggcccagtccaatggctggggtgtcatggtgtcccatcgatctgaggagactgaggacactttcattgccgacctggtggtggggctctgcactgggcagatcaagactggtgccccctgccgatctgagcgcctggccaagtacaatcagatccttagaatcgaggaggaactgggcagcaaagccaagtttgccggcaggtccttcaggaaccccctggccaagtaaggcatggaccggagatccctggagctaccagatcctctgtctccgtcatccaggcggctcaaggctggcccagtgcttgcccctcccatgtcactgcttccttagatgtccaccccgaccacctggagccctgctggagcccccagctttgtaatcatgtgatcagtctgaatcattgtttctgtcacctgactttccagctagtgtctggagccctctgaactccagcgtaatctctagagtgcccacaccatcaagactccccccagtggtttacttgcaaaaataaaagctgcagaagctcaaaaaa

SEQ ID NO: 3040 - DNA, 2874 bp, Rattus norvegicus
  Genbank Accession No. NM_012570
gtccaggcctgcaagctctgatcttctgtgctcccgccgctctcgcctcagcccgccgccatgtaccgccgtctgggcgaagtgctgctactgtcccgcgccgggcccgctgccctgggctctgcggctgcagactcagccgcactgctgggctgggctcgcggacaaccctctgctgtcccgcaacccgggctcacgccggtcgccaggcgccactacagcgaagcggccaccgaccgcgaagacgaccccaacttcttcaagatggtggagggcttcttcgaccgcggcgccagcatcgtggaggacaagctggtggaagacctgaagacccgggagaacgaggagcagaagcggaaccgagtgcgcggcatcctgcggatcatcaagccttgcaaccatgtgttgagcctctccttccccatccggcgcgacgacggctcctgggaggtcatcgaaggctaccgggcccagcacagccagcaccgcacgccctgcaagggaggtatccggtacagcactgacgtgagtgtggatgaggtgaaggcgctggcgtccctaatgacctacaagtgtgcagtggttgatgtgccatttggaggtgctaaagcaggcgttaagatcaatcccaagaactatacagataatgaattagaaaagattacacgaagattcaccatggagctggcaaagaagggttttattggtcctggcattgatgtgcctgccccagacatgagcacgggcgagcgggagatgtcctggatcgctgacacctatgccagcaccatagggcactatgatatcaatgcacacgcctgtgtcactggtaaacccatcagccaaggaggcatccacggacgcatctccgctactggccggggtgtttttcatgggattgagaacttcatcaatgaagcttcctacatgagcatcttagggatgaccccggggcttggcgataagacgtttgttgttcagggatttggtaatgtgggcctgcactctatgagatatttacatcgttttggtgctaagtgtgttggtgttggagaatctgatgggagtatatggaatccagatggtattgacccaaaagaactggaagatttcaagttgcaacatggatcaattctgggcttccccaaagccaaggtctatgaaggaagcatcttggaggctgactgcgacattttaattcctgcagccagcgagaagcagttgaccaaatccaatgcacccagagtcaaagccaagatcattgctgaaggagccaatggcccaaccactccagaggccgataagattttcctagaaagaaacatcatggttattccagatctctacctgaatgctggaggagtgacagtatcttactttgagtggctaaagaatctaaatcacgtcagctatggccgattgaccttcaaatatgaaagggactcgaactaccacttgctcatgtccgttcaagagagtttagagagaaagtttggaaagcacggcgggactatccctgtggtccccacagcagagttccaggacagaatatcgggtgcatctgagaaagacatcgtgcactctggcttggcctacacaatggagcgatctgccaggcaaattatgcgcacagccatgaagtataacctgggattggacctgagaacagctgcctacgtcaatgccattgagaaagtcttcaaggtgtacaatgaggctggcgtgaccttcacatagacaggtcacagctgacttctttaccaccctcttcacctataatttctgcagacctgtcacaagtttacatgtaaccacagaaatctgttcttgtgactcattagttaatggacactgttctcaacaagtcagttggaatcagccccttaagagaaagattaagttagcggatcatgtaccagctgatggtgtaaaggtaggaatcacgtgtatcctgccagttaggtgtttcgcttttaagtaaagtttctgctcctggccatgctgccttgctctggactcttcccaacagggttagtgctgttgccagggaaggcagtcaagagtcagtcacttcctgacaagtctgggtacttgagcacataagaagtaggcgtgtggcatttgcaaaggtggcatggtcttcgagtgagttattgctgctttacatcagcaaaataactcagtctctaagtcgcaaacaaataaaagctatttctcatgtattttattctttcagaataaaccagttcatgctgctgtaataaaattgccttcaaccacttaagcctaacctttactcaagcagtgaacgcctaaaatataggaaatggaagaagctagtttttataacataaaacagtataatttagcttatcggccctgcagcatagtccagcagaaataaagtagcacctgggggcaggcgtacctgcaagtgacacgggagggacacttgggaacttgttatgcagtccagagagtgaagtaaccactttaccaatttggagatctattatgttgagtaattgaaccatacttcaaatagagtgtcccagaagaaaagactggctccctgtttggaggctggcagacttcagactcagcctgtgtgtcccttctccaaggctttgccgtctacacagcacctcgctatccacaggctggagactgcctggggttgacttctgtttggggagttactggccagggcttttgaacaggagtgttccacagaagtaccagacattatttatataagaatgagcgcttctttttaacagtaccctttcagaaatttctaactactttgtaactgcatgattaacttggtgataaaagcagttattaaaagtctaccttttccaaaaaaaaaaa

SEQ ID NO: 3041 - DNA, 1937 bp, Rattus norvegicus
  Genbank Accession No. NM_012571
ccgacgtcccctcagattccatcgcgatggcccctccatcattctttgcccaggttccacaggccccgccggttctggtctttaagctcattgcggacttccgggatgatcccgatccccgcaaggttaacctcggcgtgggagcgtaccgcacagatgactctcagccctgggttttgccagtagtgacgaaggtcgaacagaagattgctaacgaccacagtctcaaccacgagtacttgcccatcctgggcctggcggagttccggagctgtgcttctcagctagtacttggggacaacagcccagctctcagggagaatggggttgggggtgtgcagtctttgggagcgaccggtgcacttcgaattggagctgacttcttagcgcgatggtacaatggcacagacaacaagaacacgcccgtctacgtatcatcgccgacctgggagaaccataatggcgtgttttctgccgctggttttaaagacattcggtcctatcgctactgggatgcagagaagagaggacttgatctccagggtttcctgaatgatctggagaatgctcctgagttctccatctttgtcctccacgcctgtgcacacaacccaacggggaccgacccaactgaagaggagtggaagcagatcgccgccgtcatgaagcgccgttttctgttccccttctttgactcagcctatcagggctttgcatctggagacctagagaaagatgcctgggctattcgctattttgtgtctgaaggcttcgagctcttctgtccccagtccttctccaagaacttcgggctctacaatgagagagtggggaatctgaccgtggtcggaaaagagcatgacagcgtcctgcgggtcctttcccagatggagaagattgtacgaatcacctggtccaatccccctgcccagggagctcggatcgtggccaccaccctctccaaccctgagctctttaaggagtggaaaggaaacgtgaagacaatggctgaccggattctgaccatgagatccgaactcagggcgcgactagaagctctcaagactcccgggacttggtctcacatcactgagcagattggaatgttcagctttactgggttgaaccccaagcaggtcgagtatttggtcaacgagaagcacatctatctgatgccgagcggtcggatcaacatgtgcggcttgaccaccaagaacctagattatgtggctacctccatcaatgaagctgtcaccaaattccagtgaagaaacaccgagtagttcataccccaaagcagttcctgtcacagctttcctgcctgcgcaaacctagccgtacatgttgtttattagagatgaccaccatggggaggcagccgctgtttagctggccccacaagagaagacatttcttgaaatgaacctgggtcgggtggggggatgactggggttagggccttttggaaaccagagcagattaaagttatttaagaataaaaaaaccctttgatatgagatgtaatcatcttgccttcctctgtagtattctgcaggagtgttgcccacgaagccgtgggcttctgcacgttgcttgagtctgtacagagtcctgtccccaaaatcaagttgtctgaggagccggctgtgactgtggatgttggcattaaaactcaccatttccatcgtctctgtctctcggccccctgatctttccgcatggttgtgaccctggtcttggaacattagttttttaaggccactgtggccagtatttatatcatgacacacaagtggatttacatatttaactgagatgaaagttccgctaaacggtatttgctcttgtgatacgtggcacattgtgacattttcttagtctcttctgtcgtgttctgtttcatttaaaaaaataaaaatgctgatcaagacaaacgg

SEQ ID NO: 3042 - DNA, 870 bp, Rattus norvegicus
  Genbank Accession No. NM_012580
atggagcgcccacagctcgacagcatgtcccaggatttgtccgaggccttgaaggaggccaccaaggaggtgcacatccgtgcagagaattctgagttcatgaggaactttcagaagggtcaggtgtccagggaaggctttaagctggtgatggcctccttgtaccatatctatacggccctggaagaggagatagagcgaaacaagcagaacccagtctatgccccgctctacttccctgaggagctgcaccgaagggctgccctagagcaggacatggccttctggtatgggccccactggcaggaggccatcccttacacaccagccacacagcactacgtaaagcgtctccacgaggtgggaggtactcatcctgagctgctggtggcccacgcatatacccgctacctgggtgacctctcagggggtcaggtcctgaagaagattgcgcagaaggccatggccttgccaagctctggggaaggcctggcttttttcaccttcccgagcatcgacaaccccaccaagttcaaacagctctatcgtgctcgcatgaacactctggagatgacccccgaggtcaagcacagggtgacagaagaggctaagaccgccttcctgctcaacattgagctgtttgaggagctgcaggcactgctgacagaggaacacaaagaccagagtccctcacagacagagtttcttcgccagaggcctgctagcctggttcaagatactacctctgcagagacgccccgaggaaaatcccagatcagcactagttcatcccagacaccgctcctgcgatgggtcctcacactcagtttcctgttggcgaccgtggcagtgggaatttatgccatgtaa

SEQ ID NO: 3043 - DNA, 2168 bp, Rattus norvegicus
  Genbank Accession No. NM_012603
actcgctgtagtaattccagcgagagacagagggagtgagcgggcgggttggaagagcccagtgtgcagagccccactccgggcttcctaggaaggcagctctggagtgagaagggctttgcctccaggcttgctgcctcctcgacccaatcctcccgctgacccaacatcagcggtcgcaaccctcgccgcctctgggaaactttgcccattgcaacgggcagacacttctcactggaacttacaatctgcgagccaggacaggactccccaggcgcaggggagggaatttttgtctatttggggacagtgttctctgcctctgcccgcgatcggctcccctgaaaagagctcctcgcgttatttgaagcctgaatttcctttgggaggtggaaaacccgacagtcacgacgatgcccctcaacgtgagcttcgctaacaggaactatgacctcgactacgactcggtgcagccctatttcatctgcgacgaggaagagaatttctatcaccagcaacagcagagcgagctgcagccgcccgcacccagtgaggatatctggaagaaattcgagctgctgcccaccccgcccctgtcccccagccgccgctccgggctctgctctccgtcctatgtcgcggtcgctacgtccttctccccaagggaggacgatgacggtggcggtggcaacttctccaccgccgatcagctggagatgatgaccgagctacttggaggagacatggtgaatcagagcttcatctgcgatcctgacgatgagaccttcatcaagaacatcatcatccaggactgtatgtggagcggcttctcggccgctgccaaactggtctccgagaagctggcctcttaccaggctgcgcgcaaagacagcaccagcctgagccccgcccgcgggcacagcgtctgctccacctccagcctgtacctgcaggacctcaccgccgcagcgtccgagtgcatcgacccctcagtggtcttcccctacccgctcaacgacagcagctcgcccaaatcctgtacctcgtccgattccacggccttctcttcttcctcggactcgctgctgtcctccgagtcctccccacgggccacccctgagcccctagtgctgcatgaagagacaccgcccaccaccagcagcgactctgaagaagaacaagatgatgaggaagaaattgatgtggtgtctgtggaaaagaggcaaccccctgccaagaggtccgagtcagggtcatccccatcaagaggccacagcaaacctccacacagcccactggtcctcaagaggtgccatgtctctactcaccagcacaattatgcagcacccccctccacaaggaaggactatccagctgccaagagggccaagttggacagtggcagggtcctgaaacagatcagcaacaaccgcaaatgctccagccccaggtcctcagacaccgaggaaaacgacaagaggcggacacacaacgtcttggaacgtcagaggagaaacgagctgaagcgtagcttttttgccctgcgcgaccagatccctgagttggaaaacaacgaaaaggcccccaaggtagttatcctcaaaaaagccaccgcctacatcctgtccgttcaagcagatgagcacaaactcatctcagaaaaggacttactgaggaaacggcgagaacagttgaaacacaaactcgaacagcttcgaaactctggtgcataaactgaccggaagtgaggaggagctggaatctcgagtgtaaggagaacggttccttctgacagaacttggacttcaaaaaatgcatgctcaaagcctaacctcacaaccttggctggggctttgggacttcagccataatgttaactgcctcaaagttaaggcataaaagaacttttttttatgcttcccatcttctttctttttcctttaacagatttgtatttaattgttttttttaaaaaaatcttccggtgtacatagggcctttaaatgtaaataactttaataaaacgtttataacagttatacaagattttaagacatgtatgataaaccataattttttttatttaaagaccttttcatttttaaagttgatttttttctattgtttttagaaaaaataaaataattggaaaaaatataattgagcca

SEQ ID NO: 3044 - DNA, 4068 bp, Rattus norvegicus
  Genbank Accession No. NM_012613
actcctggggcaagcgcgagcgcacactcccctttccttgctggcgctccctctcccctcgctctctctctctagaccgtcctctccttccctcgctctccaccgactcccttcgggtgctgtgcttgctcccacctgctctgaagcgctctccgctctcggacgctcccaatttagcgctcctgctcgacggccgaaccgtcgcagcctccgcaggcagcgtgccctcggggttgcggcttcaacccaccccagcttcctccctcgctacgactcgggcgccctggacgttcgaccctcgccgctgagcccgaggatggcgagcagaccatggtgacagcgctgcccggtcgctgcactcgctgaggccatgccgggctcccgacgcgtccgtccgcgcctaagggcgctgctgctgctgccgccgcttctgctactccggggcggccacgcgagcgacctgaccgtggctgtggtgctgccgctgaccaacacctcgtacccgtggtcctgggcgcgtgtagggccggccgtggaactggctctcgcgcgggtgaaggctcggccggacttgctgccgggttggacggtccgcatggtgctgggcagcagtgagaacgcggcgggcgtctgctcggacaccgccgcaccgctggccgcggtggacctcaagtgggagcacagccccgcggtgttcctgggccccggctgcgtctactccgctgccccggtggggcgcttcaccgcgcactggcgggtgccgctgctgaccgccggcgccccggctctgggcatcggggtcaaggatgagtatgcgctaaccacccgcacaggacccagccatgtcaagctgggcgatttcgtgacggcgctgcatcgacggctgggctgggagcaccaggcgctggtgctctatgcagatcggctgggcgacgaccggccttgcttcttcatagtggaggggctgtacatgcgggtgcgtgaacgcctcaacatcacagtgaatcaccaggagttcgtcgagggcgacccggaccactaccccaagctactgcgggccgtgcggcgaaagggcagagttatctacatctgcagttctccggatgccttcaggaatctgatgcttctggccctgaacgctggcctgactggggaggactatgttttcttccacctggatgtgtttgggcaaagccttaagagtgctcagggccttgttccccagaaaccctgggaaagaggagatgggcaggacaggagtgcccgccaggcctttcaggctgccaaaattattacttacaaagagcctgataatcctgagtacttggaattcctgaagcagctgaaactcttggctgacaagaagttcaacttcaccgtggaggatggcctgaagaatatcatcccagcctccttccacgacgggctcctgctctatgtccaggcagtgacagagactctggcacaggggggaactgtcacagatggagagaacatcactcagcggatgtggaaccgaagcttccaaggtgtgacaggatacctgaaaattgatagaaacggagatcgggacaccgatttctctctctgggatatggatccagagacgggtgccttcagggttgtcctgaactataatggtacttcccaggagctaatggctgtgtcagaacacaaattatactggcctctgggatatccacctcctgacgtccctaaatgtggctttgacaatgaggacccagcctgcaaccaagaccacttttccacactggaggttctggctttggtgggcagcctctctctgattagctttctgattgtgtctttcttcatatacaggaagatgcagctggaaaaggagctggtctcagagttgtggcgggtgcgctgggaggacttgcagcccagcagcctggagaggcatcttcggagcgctggcagccggctgaccctgagtgggcgaggctccaattatggctccctgctaaccaccgagggccagttccaagtctttgccaagacagcatactataagggcaaccttgtggctgtgaaacgtgtgaaccggaaacgcattgagttgacacgaaaagtcctgtttgaacttaaacatatgcgggatgtgcagaatgagcacttgacaagatttgtgggtgcttgtaccgacccccccaacatctgtatcctcacagagtactgtccccgtggaagcctacaggacattctagagaatgagagtatcaccctggactggatgtttcggtactcgctcaccaatgacattgtcaagggaatgctctttctacacaatggggccatttgttcccatgggaacctcaagtcatccaactgtgtggtagacgggcgcttcgtgttaaagatcacagactacggtcttgagagcttcagagacccggagccagagcaaggacacaccctctttgccaaaaaattgtggacggcacctgagctcctgcgaatggcttcgccacctgcccgtggctcccaagctggggatgtgtacagctttggtatcatcctgcaggagattgccctaagaagtggggtcttctatgtggaaggtttggacctcagcccaaaagagatcattgagcgtgtgactcggggtgagcagcccccattccgaccctccatggatctgcagagccacctggaggaactggggcagctgatgcagcggtgctgggcagaggacccacaggagcggccaccctttcagcagattcgcctggcgctgcgcaagttcaacaaggagaacagcagcaacatcctggacaacctgctgtcacgcatggagcagtatgctaacaacctggaggaactggtagaggagagaacacaagcttatctggaggagaagcgcaaagctgaggccttgctttaccagattctgcctcactccgtggctgagcagctgaagagaggcgagacagtccaggctgaggcctttgatagtgttaccatctacttcagtgatattgtgggctttacagctctttcagcagaaagcacacccatgcaggtggtgactctgctcaatgatctgtacacctgttttgatgctgtcatagacaactttgatgtgtacaaggtggagaccattggtgatgcttacatggtggtgtcagggctcccagtgcggaatggacaactccacgcccgagaggtggcccgaatggcacttgcactactggatgctgtgcgctccttccgcatccgccataggccccaggaacagctgcgcttgcgcattggcatccacacaggtcctgtgtgtgctggtgtggtagggctaaagatgccccgatactgcctctttggagacacagtcaacacagcttcaagaatggagtctaatggagaagccctcaagatccacttgtcttcagagaccaaggctgtgctggaagagttcgatggtttcgagctggagctccgaggggatgtggaaatgaagggcaaaggcaaggttcggacctattggctcctgggggagcggggatgtagcactcgaggctgacctactgccctgctgttccttgtcacccctcctccctgtgccagaggtgacagaggtgtccagcttccacctctcccacagcagcccagccactgtggaaggattagggacctgaccagcacagtcaccagatgtgacctctgagagaggatggagatggtggggactgcaggggacacctaagtttgtaggactgactgaaacacacagtccctcccatggcacccttgtggcacacatgcccagtcccacccttactctgctgcctagattgggacagcgattccttctctgccctcaacttagctccactgtgacttatagggagggaattgccacctgaaggaaacagaaagaggttagagtttgcaggaggcgggcagtcctgtgtcacaaatactcccctcacttccagcccaccacctgccccacagactttggacacagctcactgaggagaagagaagctgccggttaccttgcttctcctgtgaaccaaaccattaaagtctttattcctgtga

SEQ ID NO: 3045 - DNA, 900 bp, Rattus norvegicus
  Genbank Accession No. NM_012678
cgcgagcccagtggagcgagtgagctatggccggcctcaactcactggaggcggtgaagcgcaagatccaggccctgcagcagcaggcggacgacgcagaggaccgtgcgcagggcctgcagcgcgagctggatggcgagcgcgaacggcgcgagaaagctgaaggagatgcggccgctctcaaccgtcgcatccagctggtggaggaagagctggaccgggctcaggagcgactggccacagccctgcagaagctggaggaggcagagaaggctgctgacgagagtgagagaggcatgaaggtgatagagaaccgagccatgaaagacgaggagaagatggagatccaggagatgcagctcaaagaagccaagcacatcgctgaggaggctgaccggaagtatgaggaggttgctcgtaagttggtcatcctggagggtgagctggagagagcagaggagcgggcggaggtgtctgaactaaagagtagcgacctggaagaggagctcaagaacgtaactaacaatctgaaatcactggaggctgcttctgaaaagtactctgaaaaggaggataaatatgaagaagaaatcaagcttctgtctgacaaactgaaagaggctgagacccgagctgagtttgcggaaaggacagtttctaaactggagaagacaatcgatgacctggaagaaaaacttgcccaggccaaagaagagaacgtgggcttgcatcagacactggaccagacactaaacgaacttaactgtatataaaccaaaccagaagagtcctgtcttgataccaactccactccagagagtgcaccctgtcttcctctcttataagaagttccgcttactaccatgtctccaccttgctggaaaggccaagcagaaaaat

SEQ ID NO: 3046 - DNA, 1000 bp, Rattus norvegicus
  Genbank Accession No. NM_012695
ctggaatcctaacaggacctacacagagctatttataatgccagactatacttggtttgaaggaataccttttcctgcctttgggattccaaaagaaactttgcaaaatgtttgtaataagtttgtggtgaaagaagaagatttgatcttattgacttatcccaagtcaggaacaaactggctgattgaaattgtctgcttgattcagaccaagggagatcccaagtggatccaatctgtgaccatctgggatcgctcaccctggatagagactgatttaggatatgatatgttaatcaaaaagaaaggaccacgactcataacctcccatcttcccatgcatcttttctccaagtctctcttcagttccaaggccaaggtgatctatctcatcagaaatcccagagatgttcttgtttctggttattatttctggggtaagacaactcttgcgaagaagccagactcactgggaacgtatgttgaatggttcctcaaaggatatgttccgtatggatcatggtttgagcacatccgtgcctggctgtctatgcgagaattagacaacttcttgttactgtactatgaagacatgaaaaaggatacaatgggaaccataaagaagatatgtgacttcctagggaaaaaattagagccagatgagctggatttggtcctcaagtacagttccttccaagtcatgaaagaaaacaacatgtccaattataatctcatggagaaggaactgattcttcctggttttactttcatgagaaacggcactactggggactggaagaatcacttcactgtagcccaagctgaagcctttgataaagtgtttcaggagaaaatggccggtttccctccagggatgttcccatgggattaaaatttcaaaagttttaaatattttatgaacattgatttttatgtttctgttgttctatgtctgaataagtgaatgtggtcattgaataaattctattctggcattgtg

SEQ ID NO: 3047 - DNA, 3144 bp, Rattus norvegicus
  Genbank Accession No. NM_012732
ccgtgactgaagaagccattgccaagggtatcgcaggattgttgctgtcacaggtgctgtagactgaggttgaaggactaccccggagacggctgcagtcgttcggttcctgtctcttccgtgtaggatttgatttctcctaaacttggtttaagacttttaaagaaggccctaatttatcgaggcctgtttgtgaagtaaaattcggctggctactctcaacggaagaaagatgcaactgctaggccgggtgatctgtttcgtcgttgggatcctgctttctgggggcccaacggggaccatatcagctgtggaccctgaagcaaacatgaatgtgactgagataatcatgcactggggatatccagagcactcagtacagacaggagatggctacattctgggtgttcaccgaatcccgcatgggcggaagaaccagtttgataaaggtcccaaaccagttgtgtatcttcagtggcgacatggcttcctggcagattctagtaactgggtcacaaacattgacaacaacagcctgggcttcatcctggcagatgctggctttgatgtgtggatgggaaacagcagaggaaacacctggtctcggaagcacaagactctgtcagtttctcaggatgaatactgggccttcagttttgatgagatggcaaaatatgacctccctgcttcaattaactacattttgaataaaactggccaagaacagctgtataatgtgggccactctcaaggctgcaccataggttttatagcattttcacagatgcctgaactggcaaagaaggttaaaatgttttttgccctggctcctgtgttgtctctcaattttgcttcgggcccgatggtcaaattgggacggttgccggatctgcttcttgaggacttgtttgggcagaagcaatttcttcctcagagtgcaatggtgaaatggctaagcactcacatttgcacgcacgtcatcatgaaggagctttgcgccaacatcttctttctgatatgtggcttcaatgagaagaatttaaacatgtctagagtggatgtgtatacaacacactgtcctgcgggaacctctgtgcaaaacatggtacactggacccaggttgttaaataccataagcttcaagcttttgactggggaagcagtgacaagaattattttcattacaatcagagttatccacccttgtacagcataaaagacatgcaactacccactgctttatggagcgggggcaaggactggctggcagacaccagtgacatcaatatcttactgactgaaatccccacgttagtgtaccacaagaacattcccgagtgggaccatctggattttatctggggtttggatgccccctggaggctgtataatgaagtagtcagtctaatgaagaaataccagtgagtgccaagacttgagatgcttccccttcactaggggaaaaaaggacagatgtttgcttaattcctgcaaaatactgtgttttcctggtctagatcatttgtattttttatgtgcaagaaaacgatgatgttgaagacatacatgggtctggtcagtaagaagcacgctggctgtcttctgcttcattctgactgacaagccagagtcacaaccagtgatgcctttgaagtttttagaaagtatgggtgttacgtgaaagaagccattgcaacctcttgtttactttttacggtcgttttcggtgtctgcatgctgtgcatatacatgcctatgtgtgtgccctgtgctggccagagcctccttgtgtggaggtaatggctcacatcagggtatcttccctcagacactggtctctcgacgaaccagtcagtagcttgctattccagttagactggctgaccagggagcctccagaatctgtccgtctctaccttccctcaccaggtctacggagggtgatgtcccagccagcattttacactggttctagggacaggaactcaggttctcatgcttgatagcaagccctttcttcaccaaaccattgcctcaaaccctctgtgatcgaaaagctgctcaattacctttatgttcccacccaatgcaagtgaacgagcacaagacatttcaagctgttgtttgtgagctaaaaatcaatctgccagtgacttgaacatgctagggagaaactcctggccctgagcttgacaaacctgcagtccaggttctccagagattgagacagggaggctgctgttacatttagggttcatttggagagtgagactttgtctctacaaaaccaaagacaaaggagaagaagaaaaaaaaaaccctaaagtactcagttctcatctgttagcctcagagggcttagagagttcctgtgtttacctatccgaacaacattttcatgtctttatgcagtagctacctagtgaaatccagtgttatcccagcttctccaggcgtaaacattctctcttcaatctcatcagacctcagtagcaagcatttagtgaatatttagatttttcaggccaagccaagacaaaaatgaatagaataaaagaaaaaagagcccagactcttgaaagcggtttgcactgatttaaaaataaaaaaaaagaatcttgaagaatgacatgataaactgtgttggttccgcatgtgtagtcggatcccttttctgtggagaacgttctgtggagggacaaaccactaatttgccccaagtgaatgtggctgtagtgacagcgacagtgcctctgatcctgagaagcagggctggctgccggtgacaagcatcccagttcctttccccagagatgaagaggatgttttcagacagagctcggctcagggaatttcgcttggagaatcagtggtttatgtgcacaatgttttagtgagcctgctctgcgcctgatatggggaagccctcgactgttcaccgggctcgtgggcgacggctgccgtcagctggacagtggataagttttctgagtagtcaccacagattcagggatatcgctttgtgtcgactcctaaggaaggcaggacgatatgacttggtaacattgtaaaggttcacatttaaacttttcaataaatctcagcctcacaggcctgaacatcaaaaaaaaaaaaaaaaaaaa

SEQ ID NO: 3048 - DNA, 889 bp, Rattus norvegicus
  Genbank Accession No. NM_012738
agactgttggagagctccgggggaggtcgccacatccttcaggatgaaagctgcagtgttggctgtggccctggtcttcctgacaggttgccaagcttgggagttctggcagcaagatgagccccagtcccaatgggacagggtgaaggatttcgccactgtgtatgtggatgcagtcaaggacagcggcagagactatgtgtcccagtttgaatcctccactttgggcaaacagctgaacctgaatctcctggacaactgggacactctgggttcaactgttggtcgcctacaggaacagctaggcccagtgactcaggagttctgggctaacctggagaaagaaacagattggctgagaaacgagatgaacaaggacctggagaatgtgaaacagaagatgcagccccacctggatgaattccaggagaagtggaacgaggaggtcgaggcctaccgccagaagctggagcctctgggcaccgagcttcacaaaaacgcgaaggagatgcaaaggcatctaaaggttgtggccgaggagtttcgagaccgcatgcgtgtgaatgcagacgcgctgcgcgcaaagtttgggctctacagcgatcagatgcgcgagaacctggcccagcgcctgaccgagatcaagaaccaccctaccctgatcgagtatcataccaaggccagcgaccacctgaagacacttggtgagaaagccaaacccgcgctggatgacctgggccagggcctgatgccggtgctggaagcctggaaggccaaaatcatgagtatgatcgatgaggccaaaaagaagctgaacgcttagtgaggcgcccgtcaccactccccacccctgaattggctttcttacaataaacgtttccaaagtggg

SEQ ID NO: 3049 - DNA, 1843 bp, Rattus norvegicus
  Genbank Accession No. NM_012766
tctcactcacacgcgacgcgtcgcttctcctaggactcgctagcccgcactcctgctctcacccgtgagccatagcaggatggagctgctgtgttgcgagggcacccggctcgcgccccgggccgggcccgacccgcggctactgggggaccagcgtgtcctgcagagtttgctccgcttggaggagcgctacgtgccgcgaggctcctacttccagtgcgtgcaaaaggagatcaagccgcacatgcggaagatgctggcgtactggatgctggaggtgtgtgaggagcagcgctgcgaggaggatgtcttccctctggctatgaactacctggatcgctacctgtcctgcgtccccacccgaaaggcgcaactgcagcttctaggtaccgtctgcctgttgctggcctccaagctgcgcgaaaccacacccctgactattgagaagctctgcatctatacggaccaagctatggctccctggcagttgcgggaatgggaggtgctggtcctggggaagctcaagtgggacctggctgctgtgattgcgcacgacttcctggccttgattctgcaccgcctctctctgcccagtgaccggcaggcactggtcaaaaagcatgctcagacctttttggccctctgtgccacagattacacctttgcgatgtaccctccatccatgatcgccacgggcagcatcggggctgcagtgctaggcctgggtgcctgctctatgtctgcagatgagctcacagagctgctggcgggaatcacaggcactgaagtggactgcctgcgtgcctgccaggagcagcagatcgaagctgccctcagggagagcctcagggaagctgctcagacagcccccagccccgtgcccaaagcccccggggggtctagcagccaggggcccagtcagaccagcactcccacagatgtcacagccatccacctgtagtttgggacaggccccctcaggtggccaccaagcagaggaggggcccctgccaccccctccctccctctaggaacaattcatgccatatctgaagcccgagggggctctttttcccctcacaaagcccaaggggccaggtcctgcctatccccacagtgtgcactaaggggctgcttggtcatgagggtgtctacatggccagtcagttcctcttccttcccactcaaccagcttggctgtcctgggccatgatggtcagagagatacaaacaggtagaacccacacaccagcatttcttttgagtccctcctctgtctggggcgccgatcctttcagttgccaaaacgccccagtaccttccaaaggtgttgttgcccctcgcagggtcactgcatttggatctgggtccttcagaaatcccgatagacgcctatgaggagccaacctagatggctgctgtgtaatccctactccagctgctcttagcgggaaccagcctaggccttggctagaagagcaagcgcccgtaaactgttgctttgcttcctgctatgcttctgtggttgagggtcttgagggtgctgatggtcattttaatttattgctttgaatacaccgtaagagggtacagtgaggcctgtaccccacaagtggtggtaaccctggcggttgctctttccctcccctctgctaccgctttgtggcccaggagctgctacagcctgggagggggtcctgccttcctctccgtagccctccagctcatcttcagcggggagggtttaatagggatggatgccgtggaggtgactggactatccggagagagggcgagccccatggacacaggtgtttcctcaggccacaaggtttggggcgcc

SEQ ID NO: 3050 - DNA, 1443 bp, Rattus norvegicus
  Genbank Accession No. NM_012783
tgaaagtctccagtttctcagagctggttgtgagcaacaccagaaactgctgtaccacaccctggtagaagtgcgtcagtattcgcaactgggaacacatttttggtatggagtcctggaattctcggatcctcttgttctcttcctcttcctctgccgcagtcactccccactggccctcagtttcacgctgtttcttcttccttggacgaggcgacatggcggcggcgctgctgctggcgctggccttcacgttcctgagtggccaaggcgcctgcgcggcggcgggcaccatcgtaacctctgtccaggaagttgactccaagacacagcttacctgctttttgaacagcagtggcattgacatcgttggccaccgctggatgagaggtggcaaggtactgcaggaagacacgctgcccgatctacagatgaagtacacggtggatgcagatgaccgctctggagaatattcctgcatcttccttcctgagcctgtgggcagaggcaacatcaatgtggaggggccacccaggatcaaggtgggaaagaaatcggaacacgccagtgagggagagtttgtgaagctgatctgcaagtctgaggcgtcccaccctcctgtggatgagtgggtctggtttaagacctctgacactggggaccagactatctccaacggcactgaggccaatagcaagtacgtcattatatccacgcctgagctgtcagagctgatcatcagcgacctggacatgaacgtggaccctggcacctacgtgtgcaatgccaccaactcccagggcagtgctcgggagaccatctcactgcgtgtgcgcagccgcctggcagccctctggcccttcctgggcattgtggccgaggtcctggtgttggtcaccatcatcttcatctacgagaagaggcggaagccggaccagaccctggacgaggatgatcctggcgccgccccactgaagggcagcgggtctcacctgaatgacaaggacaagaatgtgcgccagaggaacgccacctgagcggcggggcaggcggggaggggaggtgccagggcacttgaccccagcccagcgtctgcctccactcctgtgtcccatcctgtcccgacctgagcctgcccaacccaacttcttatcccagcccaagtgaagacagagccttaccttacagaaaacccatctgggagaagcaggccacttgcagtacccctgtttctagtttaaactgaatgaggtttctatgcagacaatccattccttagggctacgtttttattttccttcccttctgaagtatgtcactacagccctgtggagtgggggagtggggtcatgagggaaaggccagggcacacatgctctgactttaccctgttggagggggctgggcctgctgggaccccacaaataaagacctacaccacca

SEQ ID NO: 3051 - DNA, 2840 bp, Rattus norvegicus
  Genbank Accession No. NM_012791
agagtctcaagttttcagagtggctttgctcttactgtgctttcattcgcagctgttatagttttgccgctggactcttccctcccttcccccaccccatcaggatgatatgagacttgaaagaagacgatgcatacaggaggagagacttcagcatgcaaaccttcatctgtccggctcgcaccgtcattctcattccatgctgctggccttcagatggctgcacagatgccccattcacatcagtacagtgaccgtcgccagccaaacataagtgaccagcaggtttctgccttatcatattctgaccagattcagcaacctctaactaaccaggtgatgcctgacattgtcatgttacagaggcggatgccccaaaccttccgtgatccagcaactgctcctctgagaaaactctctgtggacttgatcaaaacatacaagcatattaatgaggtttactatgcaaaaaagaagcgaagacaccaacagggccagggggacgattctagtcataagaaggagcggaaggtttacaacgatggttacgatgacgataactatgattacattgtaaaaaacggagaaaagtggatggaccgttatgaaatcgactccttaataggcaaaggttcatttggacaggttgtgaaagcatatgacagagtggaacaagaatgggtcgccattaaaatcatcaagaacaagaaggcgtttctgaatcaagcgcagatagaagtgcggctgcttgagctcatgaacaaacatgacactgagatgaagtactacatagtgcatttgaaacgccactttatgtttcggaaccatctctgtctagtgtttgaaatgctgtcctataatctctatgatttgttgaggaacaccaacttccgaggggtctctttgaacctgacacgaaagtttgcacaacagatgtgcacagcattgcttttccttgcgactccagaacttagtatcattcactgtgacttaaagccggagaacatccttctgtgtaaccccaaacgaagtgcaatcaagattgttgactttggcagctcttgtcagttggggcagaggatataccagtatattcagagtcgcttctatcggtctccagaggtgctactgggaatgccttatgaccttgctatcgacatgtggtcccttggatgtatcttggttgaaatgcacactggagagcctctgttcagtggtgccaatgaggtggatcagatgaataaaatagtggaagtcttgggcatcccacctgctcatattcttgaccaagcaccgaaagcaagaaagttctttgagaagttgcctgatggcacttggagcttaaagaagaccaaagatggaaaacgggagtacaaaccaccaggaacccgtaaacttcataatattcttggagtggaaacaggaggacctggcgggcggcgtgctggggagtcaggtcacactgtagctgactacttgaagttcaaagacctcattttaaggatgcttgattatgaccccaaaactcggattcaaccttattatgccctgcagcacagttttttcaagaaaacagctgatgaaggtacaaacacaagcaacagtgtgtccaccagccctgccatggagcagtcccagtcttcaggcaccacctccagcacctcctccagctcaggtggatcctcgggaacgagcaacagtgggagagccaggtcggatccgacgcaccagcatcggcacagtggcgggcacttcgctgctgctgtccaggccatggactgtgagacacatagtccccaggtgcgccagcagtttccggctcctctgggctggtcaggcactgaagctcctacacaagtcactgttgaaactcatcctgttcaagaaacaacctttcatgtagcccctcagcagaatgcattgcatcatcaccatggaaacagttcccatcatcaccaccaccaccatcaccaccaccaccaccatggacagcaagccttgggtaaccggaccaggccaagggtctacaattctccaacaaatagctcctctacccaggattctatggaggttggccacagtcaccactccatgacatccctgtcttcctcaacaacttcttcctcgacatcttcctcctctactggtaatcaaggcaatcaggcctatcagaaccgcccagtggctgctaacaccttggactttggacagaatggagctatggacgttaatttgaccgtctactccaatccccgccaagagactggcatagctggacatccaacataccaattttctgctaatacaggtcctgcacattacatgactgaaggacatctgacgatgaggcaaggggctgatagagaagagtctcccatgacaggagtttgtgtgcaacagagtcctgtagctagctcgtgactacattgaaacttgagtttgtttcttgtgtgtttttatagaagtggtgtttttttcccaaaaacaaaagtgcaaagctgcttgaatcagaaggagattaacacactgaaccgctacgagagggcaaagctgacttttttttttaacttgaaaagattgcaaagggacaatgaagtttttaagagccatgtccacccatcttcatggagcgctcagagtgtcctctttctgcctcccccatttaacttccatctcccggtcacagtgggttttgtctttctatccaacaaaagttaatgttcagctgttggtcttggtcatttgccaactaattttaaaataaaaaggcactgcacataatttgcataaagggccccatagggtgttttggttttttcatttttattttttcccctttt

SEQ ID NO: 3052 - DNA, 924 bp, Rattus norvegicus
  Genbank Accession No. NM_012793
cctggtggttccgcagccgtactctcctggcctggtgtgcacagcctcaccatgagttcttctgcagccagcccgcttttcgcgcctggcgaggactgcggccccgcgtggcgcgcggcccccgcggcctatgatacgtctgacacgcacctgcagatcctgggcaagccagtaatggagcgttgggagaccccctacatgcattcgctggcggctgctgctgcctccagagggggccgggtcctggaagtgggctttgggatggccattgcagcctccagggtgcagcaggcccccataaaggaacactggattattgaatgcaacgatggggtcttccagcgtctacaaaactgggccctgaagcagccacataaggttgttcccttgaaaggcctgtgggaggaggaggcacctacactgcctgatggtcactttgatgggattctatacgacacatatccactgtctgaagagacctggcacactcaccagttcaactttattaagactcatgctttccgtttgctgaagcctgggggtatcctcacttactgcaacctcacgtcctggggggaactcatgaagtccaagtacacagacatcactgccatgtttgaggagactcaggtgcctgcactgctggaagctggcttccagagagaaaacatctgtacagaggtgatggcgctggtgcccccagccgactgccgctactatgccttccctcagatgatcacacccctggtcaccaagcactgagcggctggcccagggctacaaggagaatatgtcctcctcagtgcctttgtagctggagtgtggctccagcctctccactatccctgcagtgtgacatcctaacctctgcctggtacggccatctccccagagctcaggagtaaaataaatgctaccaagact

SEQ ID NO: 3053 - DNA, 1124 bp, Rattus norvegicus
  Genbank Accession No. NM_012797
cggcacgagctaacaccctgttctcagactcctccgcgcctctccgcctgtcctcaggatcatgaaggtcgccagtagcagtgccgcggccaccgcaggccccagctgttcgctgaaggcaggcaggacggcgggcgaagtggtgcttggtctgtcggagcaaagcgttgccatctcgcgctgcgctgggacgcgcctgcccgccttgctggacgaacagcaggtgaacgttctgctctacgacatgaacggctgctactcacgcctcaaggagctggtgcctaccctgcctcagaaccgcaaagtgagcaaggtggagatactgcagcatgttatcgactacatcagggacctgcagctggagctgaactctgagtctgaagtcgcgaccgccggaggccgggggctgcccgtccgggccccgctcagcaccctgaacggcgagatcagtgccttggcggccgaggtgaggtccgagtcagagtattacattattctcctgtgggaaactaaggccacgggaggggggtgtcccccttacttctcaggagcatagttatttaggggcgaccaataggaaaaagctcgcgctttcatcgtgcctcctggagtagagaagtgggaatgcctctcccctccagttctttccagtgggtctcatgccttatctcgctctggtgttcacaggcggcatgtgttccagccgacgaccgcatcttgtgtcgctgaggcggcgcactgaggaaccagatggactccagcccttcaggaggcaagaggaaaaaaagtgctctcggttccccagagcaacccggggaaagacactaccgcggccacgggactcttgacggatctgtccagggggtagagggttgatcaacggagtctcgccctctccacctttcagcctccagagactttgaggagggggttattcaaccccgtgtgtttctgtttttttgaaaaagcagacattttttttaaatggtcacatttcgtgcttctcagatttctgagaaaatgttttgtattgtatattacaatgatcactggctgagaatattgttttacaatagttcttatgggggtgggttttttgttgttattaaacaaacactttagat

SEQ ID NO: 3054 - DNA, 3324 bp, Rattus norvegicus
  Genbank Accession No. NM_012804
gaattccagtgcggctcgctcgccctgccggtgccatggcggccttcagcaagtacttgacggcgcggaactcctcgctggcgggggccgcgttcctgctgttctgcctgctccacaagcggcgtcgcgccctcggcctgcacggtaagaaaagtggaaaaccgccattacagaataatgagaaagaaggaaagaaagagcgagctgtggtggacaaagtgtttttatcaaggctctcacagatcctaaaaattatggtccctagaacattttgtaaagagacagggtacttgatacttattgctgttatgctggtatctcgaacatactgtgatgtttggatgattcaaaatggcacactgattgaaagtggcatcattggtcgtagcagtaaagatttcaagagatacttattcaacttcatcgctgccatgcctcttatctctctggttaataacttcttgaagtatgggttaaatgagctcaaactgtgcttccgtgtgcggctcactagatacctctatgaggagtatctccaagccttcacctactataaaatgggcaacctggataacagaatagcaaacccagaccagctgcttacacaagatgtagaaaagttttgtaacagtgtagttgatctttattcgaatcttagtaagccatttttagacatagttttgtatattttcaagttaacaagtgcaattggagctcagggcccggcaagcatgatggcctacttgcttgtttctgggctattcctaactcgactcagaagacccatcggtaaaatgacgattatggagcagaagtatgaaggagaatatagattcgttaattcacggcttatcactaatagtgaagaaattgccttttacaatgggaataaacgagaaaagcagacaatccactctgtcttccgaaaactggtggaacacctacataatttcattttcttccggttttctatgggtttcattgatagcatcattgccaaatatattgccactgtagttgggtacctggttgtcagtcgcccgttcctagacctggcgcatccgcgacaccttcacagcacccactcagagctgctggaggattactaccaaagtggaagaatgcttttgagaatgtctcaagctttggggcggatagttttggctgggcgtgaaatgactagattggctggttttacggctcggattacggaattaatgcaagtactaaaggatttaaatcatggcaaatatgaacgtacaatggtgtcacaacaggataagggtattgaaggagcacaagctagtcccttgatacctggtgctggagaaatcatcaatgcagacaacattataaagtttgatcatgttcctttagcaacaccaaatggagatatcttgatccaagaccttagttttgaagttcgatctggggccaacgttctcatttgtggtccaaatggctgtggaaagagctccctcttccgtgttcttggtgaattatggcctctctttggaggacatcttactaaacctgagagaggaaagttattttatgttcctcagcgaccctatatgaccctgggaacactgagagaccaagtaatatatccagatggaaaggaggatcagaagaagaaggggatatctgaccaagtgctgaaggggtacttggacaatgtacagttgggccatatccttgagcgggaaggaggctgggacagtgttcaggactggatggatgtactcagcggaggagaaaaacaaagaatggcgatggcaagattgttttatcataaaccccagtttgccattctggatgagtgcacaagtgcagttagtgtggatgtggaagactacatttacagccactgtcggaaggttggcatcaccctcttcactgtctcacacaggaaatccctttggaaacaccacgagtactacctgcacatggatggcagaggcaattatgaattcaaaaagatcacagaagacacagttgagttcggatcatagagaccatctggagaacttcacacttcacaagagaatgaatgaacagaatgcatttgtaaacaacgtgcattgtaaaataaagttaagcttgttttttttaaaaaaacaaagctacaaattgactagatataggataattgaaacatgttaaaacatttaatattgtataggatattgctaattgtgtatatgttggtttaattattaattatgtactaagaatgtccttattcttgtggttaaaaaacctgcctgaattaaattgggcttaaatcagtgtaacctgattcatgggatgtaaaccatttgaagtcagctaatttgacttttatagctctgtctttttctttaatgaagaaccctatttaaaactgggtcattagctgtttattctaacaaagtagtcttgagttcctttttgggtttttttttttttttttttttttttttttttgtgccccatggtagtgggaaccaaaccaatcacaatgttttattggaacatattccatcatcacaggatagcatttattaaacagtggcggatttctctagctgctacatttattctcattcctcatacataccttgaggtgcatttgattccaggagagccatttgggttttctttagctaaataataaatgtacccgtctcagtcttttggactgagtcgttctgaaggctctcgtgtggacagcagtgtgtgcagtctcttacagtccgtgcctgctccacatggtaccagtcttaccagtgcttgagagctcagacacaccctgctgcatgaagttggaggtctcgggagggttttagattttgtgacgggaaccggaaaggctcgtcagagtgtggctgtgtcatggtgagcaccacgtggctgtagaggcccgacatgaggtaatgcactgagcacacaacgccactgctgctgtctgtggctgtgggttcttaaaagtgctggactttgtcatgctcgtgggccaatgacatttcctaggagcggcctctgactcctgtgcagctgcgtctgtgtcagctctggctccctggaaccacgagtgactttgcacaaaggagggctgagagcggacttgatcagtaagtcgtcgtgaatcagtttgcttgagtgggctcggaatgggccttatcacgatggttttgtttcttcgtaactcataatcactggctaccaggataaccctgatgtattgattccgtgaatacatcacattcaatcttaccatgtctccttagcaaacgtgtgtacttattttctgttcagattaaaaaaaaaaaaaaggaattc

SEQ ID NO: 3055 - DNA, 1057 bp, Rattus norvegicus
  Genbank Accession No. NM_012864
cggcaacagacgattgttctcagagccactttgatggcagctatgaggctcaccctgttccgcattgtgtgtctgctgccaggctgcctggccctgccactgtcccaggaagccggagaagtgaccgcacttcagtgggaacaggcgcagaattatcttaggaaattttaccttcacgactctaaaacaaagaaggccaccagtgcagtggacaaactgagggaaatgcagaagttcttcggtttgccggagactggaaagctgtccccccgtgtcatggagataatgcagaagcccaggtgtggagtgccagatgttgcagaattctcactaatgccaaacagtcctaagtggcattccagaactgtcacctacagaatcgtgtcctatactacagacttgcctcggttcttagtagatcaaatcgtgaaaagagctctcagaatgtggagtatgcaaatcccactgaacttcaagagggttagttgggggactgcagacatcataattggcttcgcaaggggagatcacggagacaacttcccatttgatgggccaggaaacactctaggccatgcctttgcaccggggccaggcctcggcggagatgctcactttgacaaggatgagtactggacggatggtgaggactcaggagtgaacttcctgtttgttgccactcatgaacttggccactctctgggtctgggtcactcttctgttcccagttctgtgatgtaccctacctatcaaggagatcattcagaagacttcagtcttacaaaggacgacattgcaggcatccagaagttatatggaaagaggaacaagctgtgatagatgcagacagtttctggaatgagcaaacgcccttcctgagccacacttactcctttcttccttgtactgtggatgggttttgcacatccctctgagggtcattttgatggaatgagtctgacaaatctcaggtaacacgacagacaccagcaataaatgtcatgtgacatcagcaataaatgtcatgtgtgcaaataaaaaaaaaaaaaaaaaaccg

SEQ ID NO: 3056 - DNA, 704 bp, Rattus norvegicus
  Genbank Accession No. NM_012886
accatgactccctggcttgggcttgtcgtgctcctgagctgctggagccttgggcactggggaacggaagcgtgcacatgctcgcccagccatccccaggatgccttctgcaactccgacatcgtgatccgggccaaagtggtgggaaagaagctggtgaaggaagggccctttggcactctggtctacactattaagcaaatgaagatgtaccgaggattcagtaagatgccccatgtgcagtacattcacacggaagcctctgaaagtctctgtggccttaagctagaagtcaacaaataccagtacctgctgacagggcgcgtgtatgaaggcaagatgtacacagggctgtgcaactttgtggagaggtgggaccacctcacactgtcccagcgcaagggcctcaattaccgctaccacctgggttgcaattgcaagatcaagtcctgctactacttgccttgctttgtgacctccaagaaagaatgtctctggaccgacatgctctccaatttcgggtaccctggctatcagtccaaacactacgcctgcatccggcagaagggtggctactgcagctggtaccgaggatgggcccccccagacaagagcatcagcaatgccacagacccctgaacccagacctgtcccacctcacctccttcccatcccgctgagcgtcccggacactaatcttgcca

SEQ ID NO: 3057 - DNA, 2117 bp, Rattus norvegicus
  Genbank Accession No. NM_012891
aattccgcggcggctttggagatgcagtcggcccggatgaccccgagtgtggggcgacaactgctgcggctgggggcccgaagctcgcggtctgctgcgcttcagggacaaccccggcctacctctgcccagcgactttatgccagtgaggccactcaggcagttctggaaaagccagagaccctctcctctgatgcttccaccagagaaaaacctgccagggcggaatctaagtcttttgctgtgggaatgttcaaaggccagcttaccaccgaccaggtgttcccatacccatctgtgctcaatgaaggacagacacaatttctcaaagagctggtgggaccagtggcccggttctttgaagaagtgaatgaccctgccaagaatgactccttggagaaggtggaggaggacactttgcagggactcaaagaactgggggcatttggtctgcaagtacccagcgagctgggtggtttgggcctctctaatacccagtacgctcgcttggcagagattgtgggcatgcatgaccttggtgttagcgttaccctgggagcccatcagagcatcggtttcaaaggcatcttgctctatggcacaaaggcccagaaggaaaaatacctccccagagtggcatccgggcaggctttggcggctttctgcctgactgagccctcgagcgggtccgatgtggcctctatccgaagctcagctgtacctagcccctgtggaaagtattatactctcaacggaagcaagatctggatcagtaatgggggtctggcagacattttcactgtctttgccaaaacgccaattaaagatgcagccacgggggccgtgaaagagaagatcacagctttcgtagtggaacggagctttggaggggttacccatgggctccccgaaaagaagatgggcatcaaggcatctaacacatcagaggtgtactttgatggagtcaaggtgccagcagagaatgtgctaggagaagtgggagatggcttcaaggttgctgtcaacatcctcaacaacggaagatttgggatggctgcaaccctagcaggcaccatgaaagccatcattgccaaggcggttgatcatgctactaaccgtacccagtttggggacaaaattcacaactttggggtgatccaggaaaagctggctcggatggctattctgcagtatgtgactgagtccatggcttacatgctgagtgccaacatggaccagggattcaaagacttccagatagaagctgccatcagcaaaatctttggctcggaggcggcctggaaagtgacagatgagtgcatccagataatggggggcatgggcttcatgaaggaaccaggggtagagcgtgtgctccgagatattcgaatcttccggatctttgaagggacaaatgacattcttcgactgtttgtggctctacaaggctgcatggacaaaggaaaggaactcacgggacttggtaatgccctaaagaatcctcttggaaatgttggcctcctcataggagaagcaagcaaacagctgaggcggcggacagggattggcagtggtctgagtctctcgggaattgtccacccagagttgagtcgcagtggtgaactggcagtgcaggctctggaacaatttgccactgtagtggaggcgaagctgatgaagcacaagaaagggattgtcaatgaacagttcctgctgcagcgactggcagatggagccattgacctctacgccatggtggtggttctctccagagcctcaagatccctgagtgagggctacccgacagcacagcatgagaaaatgctctgtgatagttggtgcattgaggctgcaacacggattcgagaaaacatggccagccttcagtccaaccctcagcagcaggagctctttcgtaacttcagaagtatctccaaggccatggtggagaatggtggcctggtcaccagtaacccccttagagtctgaagactcctaatcaggccctagcacagtcgtgtgccttcttctatgccaaacacaggcccccttcatgggggcactggagtacttactgccttaaggacaataaattttctaccaaaaaaaaaaaaaaa

SEQ ID NO: 3058 - DNA, 1162 bp, Rattus norvegicus
  Genbank Accession No. NM_012901
gaattccggactgcagagccatgcagggtctcggggccctgttcttgttgctgactgcctgcctcactttgaaggctgacaatgtgccaacactgccagatatccaggttcaggagaacttcaatgaggcccggatctatggaaaatggttcaacctggcggtgggctccacctgcccgtggctgaggcggattaagaacaagatgagcgtgagcacactggtgctgcaggagggggcgacagaagccgagatcagcgtgaccagtactcaatggcggaaaggtgtctgcgaggagatctccggggtgtatcagaagacagacattgacggaaagttcctttaccacaaatccaaatggaatgcaaccttggaatcttatgtggtccacaccaactatgacgaatatgccattttccttaccaagaagttcagccaccgccacggacccaccatcactgccaagctctatggccgggaaccacagctgagggacagccttctgcaggagttcagggaggtggccctgagtgtgggcatccctgagaactccattgtttttatggccgacagaggagaatgtgtccctggggatcgggaggtagagtccacttcatttgcaagagcccggcgggcagtgctgccccaagagaatgaagggtcagggagtgagccactcataactgggaccctcaagaaagaagactcctgccagctgaactactcagaaggtccctgcctggggatgcagcagaagtattactacaatggcgcctccatggcctgcgagaccttccagtatggcggctgcctaggcaatggtaacaacttcgcctccgagaaggaatgcctgcagacgtgccggaccatagcggcctgcaatctccccatagtccaaggcccctgccgagcctttgcagaactctgggcatttgatgcagcgcaagggaagtgcatccaattcatctatgggggctgcaaaggcaacggcaacaagttctactctgagaaggagtgcaaggagtactgtggagtccctggtgatgggtacgaggagctaacacgcagttgaaggagccggtctgcaagccagagggtagccacggtccgtcactgagcagtccagcttagatgatctggacccaataaaacaaggcggaattc

SEQ ID NO: 3059 - DNA, 1818 bp, Rattus norvegicus
  Genbank Accession No. NM_012913
ctcctaacggagagttgttcccggccgtgcggtcctccgtcgccgtcgctgggctgcgccgccgctgtcgccaggacgcgccgccgagcccctcgtcgcctctagccccgcggcctccgttcacctcaacttccactcgcccatcatgacgaagactgagaagaaatccttccaccagagcctggccgagtggaagctgttcatctacaacccgaccagcggagagtttctggggcgcacctccaagagctggggtctcatcttgctcttctacctagttttttatgggttcttggctgcactcttcacattcaccatgtgggtcatgctccagactctgaatgacgaggttccgaagtaccgagaccagattcctagtccaggacttatggttttccccaaaccaccgactgccttggattatacatacagcatgtctgacccacatacttataaaaagtttgttgaagacctgaagaatttcctaaagccatattctgtggaagaacagaagaatctcacagattgccctggtggagcactttttcatcaggagggtccagactatagtgcgtgtcagttcccagtttccttgcttcaagaatgtagtggtgtgaatgattctaattttggctactccaaaggacaaccttgtgttcttgtgaagatgaacagaataatcgagttagtcccagatggagctccatatattacatgtataacaaaggaagaaaacatagcaaatatagtaacttatcctgatgatggacttatagacttaaagtattttccatattatgggaaaaaacggcacgttggatatcgacagcccctagttgccgtccaggtcatatttggggccgatgctaccaagaaagaagtaacaattgagtgccaaattgatggaaccaggaacctaaaaaacaagaatgaacgtgacaagttcttgggacgagtttcatttaaagtcatagcacatgcctaggagtaggctgtctgcacagagtaaatgttgtgttgtctccattctgtatcagctggacctgccattctaggatatgaggccacctgggaggaggaagtggtatgggacacacttgggtgacatcataacatgcttccagatcatagtgttcagtgtcctctgaagtaactgcctgctgcctctgctgcccttgaacccatgtacggtcgccagacagggaccagtgagctcccaatcccaaacatgcagagtgggggtctcgtcgtcttctgtgtgtaattgccaaatgtctaaagcttcatgtgctgtgctgtgtaaatattttatggatttaacactggtaactgtcatattttgatgccaagaaagttttagggaaaaaatggtaccttgccaacatcaagtgactttagctgaagaaatgtgtgagaagttctgtatgtgatgaaggagaaagggaaataaagtggatctgaaagtactgaccctggttctgcgtacgtgtgagtgagtgcctgtcgtatgctctagtggtttttacatgctgaactagactatagctgactgtactgagaggacagactttctgttgtaatacatatttaaaatactatcggggtgactgagtgtggaatcaagcttccacactcaggtgtcgtagacacatggaagaaacagtgttttaattaggtgaatgagtaccgatgtttttgctttgttttgttttttgaatgaaatgaaattcccaagacataaattgtatagtttttcaaaatgtcttaagtgcttttatttagtagactatggaccctaataaaaaaaatgtgaaatac

SEQ ID NO: 3060 - DNA, 3169 bp, Rattus norvegicus
  Genbank Accession No. NM_012923
ccgcacgctgaaccggaggaactgcgcctagtcggggcgctgagggaccctccaccgggacgccggcccctccccgggcctctgctcacttgcccccctgcgagcccgtccccctagtcggcctctcggatcggggacgtggggcgagctgagagcaggcccggggtgggtggtcactgtggagaagacgtggctgtcaagatgatagaagtactgacaactgactctcagaaactgctacaccagctgaacaccctgttggaacaggagtccagatgtcagccaaaggtctgtggcctgaaactgattgagtctgcacatgataatggcctcaggatgactgcaagactccgggactttgaagtcaaagatctactgagtctaactcagttctttggcttcgacacagaaacattttcccttgctgtgaatttactggacagattcttgtctaaaatgaaggtacaggcgaagcatctcggctgtgtcggactgagctgcttttatttggctgtgaaatcgattgaagaggaaaggaacgtcccgctggcaactgatttgatccggataagtcagtataggttcacagtttcagacctgatgagaatggaaaagattgtgttggagaaagtgtgctggaaagtcaaagctactactgccttccaatttctgcagctctattactccctcattcgggagaccttgccatttgaaaggagaaacgatctgaattttgaaagactagaagcccaactgaaggcgtgccactgcaggatcatattttctaaggcaaagccttctgtgctggcgctggcaatcatcgctttggagatccaagcactgaagtatgtggagttaacagaaggagtagaatgtattcagaaacattccaagataagtggccgagatctgaccttctggcaagagcttgtttccaagtgtttaactgaatattcatcaaacaagtgttccaagccgaacggtcagaagttaaaatggatcgtgtctgggcgcactgcacgacaactgaagcacagttattacaggataacccacctcccaacaattcccgaaaccatgggttagttggcaaatctggttgttatcctctgtgtacagaacatttcccagtgagatcgtttttgtgctataacttaaggattgaaatactaccttcaatataaagaatacaggatgaaaacagtaaaggaaacgtgagtttgttggtctagacagagaatactgggaggcattcactgtgtaccgcagtctgaagagaaatgagtatcaaacctctagacacatgctcatactgctgtcaaaggactagcgtagaaaagagagtcctccaaaccggaagtttaaatgtagttactaaaatagcacttcttataacttacatatccccccactgtggcttatttaaagttacagaagtccaagcagaacgacaaaagatgtgacccatatatgaacacattttaatctgttcattgattaggagagtgaatatgaacttgcatgatgcccatgttaggtttctggaaactgccggggtatcttaattctctagtattctccctctgtggcagttgggctaatacaaagtaactatacgcatgagaatataaaatcagtctctgatacatacacatttttaccatcaaaatttcttaatcatagcaaagacttacctttttatgattaggaattttttttttaatgtatggcagcacatgcctttaatcccaacactagggaggcagaggcaggtggatctctttgagttcgaagccaggctggtctttacagtgagttccaggacagctggagagctacagaatggagagacgctgtctcaaaaacactcaaaacaaacaaacaaaccataccagtttgtaggcagacttctgttgggttgggtttgtactgtttgcctatgcagtgggattacagcagcagcaacaaaaactgtccctgaagtctttctctgccactgtgacctgagtttcctatggtacgcgatttactctaggaaacctcagcccctcaccacgttagctgttggcaaatggcctcacagttgcggaaagtcccaattctaggcttgggaaagcaatgcttagatttgaattggcccatgaagcattcaaatcaaggctaaagacataaatgtgaaataaaactgtgaaccttcattttaacattgatctcacttcccagatttaatcaatatatacttaggtggtattaaaaatggtaaactgcctaatttaaatctcaaaatttaaactatgaggtttacatcaaagccaacatttcacaaatgtactttttaaggtattaaaagaggtatttaagcagtaaatggtttcttggcacccataaccaagtaatagttaagttagaggtgggacttttttattgctatgagaattacatttaaacttttgggtgttttataaaaagcagatttcacaagttttgaaaattgtgacctttactgaaatttgttacctttaatatttcttctagaggataggtatttataaaagaaaaattcgtcagaattgctgcctcaatctagtcccatttgagaaaatttgtttctactgtctcaataactggatgaaatatcactctgaaaacttgcctattgcactaaagctagtttaggcttgataaaacactccaggaggtttttaccacagactgtttctattaaaactgctgcttctcatgtacaattttgttttaaaaggaaccgagtacatctgcaaaacctaagtcttaagggacgtcaggaggtaccttcagaattataggatcaccatggtagtggggattctccatgctggccttgaatgtttgatcttcactgctgaaatgtgggtagctcctcagcgccctgtagagcctgagtctacctagaatagctgtaaccattttgacaagtaatggataagaaaattatccattgagaagctaaaaacaaaacaaaacaaaaccaaagaacgggtgtattttattcttaacctttgtaaaccatcactgagaacacttcagttcttcctaacagctgttatgcttcgatttgaaaaaaatactgagtggataaccaactaccatcatgctttgggtacacctttcaataaaattactgaaatgc

SEQ ID NO: 3061 - DNA, 2296 bp, Rattus norvegicus
  Genbank Accession No. NM_012930
cctgcttgctcaggaactccctcagccgccgcgttctctagccgccgttgctgcccgggacgatgatgccgcgcctgctgtttcgtgcctggccccgctgcccctcgcttgtcctgggagcccctagtaggcccttaagtgctgtctcggggccggacgattatctgcagcacagcatcgtgcccaccatgcactaccaggacagcctgcccaggctgcctatccctaaacttgaagacaccatgaagagatacctcaatgcacagaagcctctcttggatgacagccagttcaggagaacagaagcgttgtgtaagaattttgagactggcgttgggaaggagctgcatgcccacctgcttgctcaggataagcagaataagcacaccagctacatctcaggcccctggttcgatatgtatttaactgctcgagactctatcgttttaaactttaatccatttatggcattcaatccggacccaaagtctgagtataatgaccagcttaccagggcaaccaacttgactgtttctgcagtccggtttctgaagacacttcaggctggccttttagaaccagaagtgttccacttgaacccttccaaaagtgacacagacgccttcaaaagactcattcgctttgttcctccctctctgtcctggtatggagcctacctggtcaacgcatatcccctggatatgtcccagtatttccggcttttcaattcaactcgtatacccagacccaatcgtgatgaactctttactgacaccaaggctagacacctcctggtcctaagaaaaggacatttctatgtctttgatgtcctcgatcaagatgggaacattgtgaatcccttagagattcaggcacatctaaagtacattctctcagacagcagccctgtgcccgagtttcctgtggcatatctgaccagtgagaaccgagatgtctgggcagagctcagacagaagttgatttttgatggcaatgaggaaaccctgaagaaagtggactctgctgtcttctgcctctgcctagatgacttcccgatgaaggatcttattcacttgtcacacaccatgctgcacggcgatggcacaaaccgctggtttgataagtcctttaacctcattgtagccgaggacggcactgctgcagtccacttcgagcactcgtggggggatggggtggcagtgcttaggtttttcaatgaagtgttcagagacagcactcagacccctgccatcactccccagagccagcctgccgccaccaactcctctgcgtctgtggagacgctcagcttcaacctcagcggtgctctcaaggctggcatcactgctgccaaggagaagttcgacaccacggtgaaaaccctcagcattgactccattcagttccagagaggtggcaaggagttcctgaagaagaagcagctgagccccgatgcggtggcccagctggccttccagatggccttcctgagacagtatggccagacggtggctacctatgagtcctgcagcactgcagccttcaagcacggccgcacagagactatccgcccagcctccatctttactaagagatgctccgaggcgtttgtcagggacccctccaagcacagtgtgggcgagcttcagcacatgatggctgagtgttccaaataccatggccagctgaccaaagaagcagcgatgggccagggctttgaccgacacttgtatgctctgcgctatctggcaacggccagaggactcaacctacctgagctctatctggatcctgcataccagcagatgaaccacaacatcctgtccaccagcactctgaacagcccagcagtgagccttgggggctttgcccctgtggtccctgatggctttggcattgcatatgctgttcacgatgactggataggctgcaatgtctcctcctactcaggacgcaatgcccgagagtttctccactgtgtccagaagtgcttggaagacattttcgatgctctagaaggcaaagccatcaaaacttagcttcctagtcgctgaaaagcctccattcttcctcatgaacatggatgttcatgtagctggaaggtgccatcttgtgcccaacaaaactaatcccaaggtgcttccacagccagtgctgcaggctgagctggaagagcccaactgaaggtagtgagaggtcgcagctgtaaagccctctttgttcaggagatagggtttggaaaactaactcagctgtatttattgtttaaatagaaataaaacctggtgttgcttag

SEQ ID NO: 3062 - DNA, 2260 bp, Rattus norvegicus
  Genbank Accession No. NM_012941
cggaggccggggccgcctcccgacgcccacctactagcttctccagctccatctttcccgagaagcggcagggacctcggcctccagcttaccgggcggatcgaagcagcggtcgggatggtactgctgggcttgctgcagtcaggcggctcggtgctcgggcaggcgatggagcaggtgacaggaggcaacctgctttccacgctgctcatcgcctgcgccttcacgcttagccttgtctacctgttccgcctcgcagtgggccacatggtccagctgcccgctggagcgaaaagtccgccatatatttactctccaattccgttccttggccacgcgatagcatttgggaaaagtccaattgagttcctggaaaatgcatatgagaagtacggacctgtgtttagctttaccatggtgggcaagactttcacttaccttttggggagtgacgcagccgccctgctcttcaacagtaagaacgaagacctgaatgcggaagaggtctacggtcggctgacaacgcccgtgtttgggaagggagttgcatacgacgtgccaaatgcagttttcctggaacagaagaaaatactaaaaagcggccttaacatagcccacttcaagcagtatgtttctatcattgaaaaagaagcgaaggagtactttaaaagttggggagaaagcggagaaagaaatgtgtttgaagcgctgtctgagctcataattttaacagctagccattgcttacatggaaaggaaattagaagtcagctcaacgagaaggtggctcagctgtacgcagacctggatggaggctttagccatgccgcctggctgttgccaggctggctgcccctgccgagtttcaggcgcagggacagagcccatcgagagatcaagaatattttctacaaggccatccagaaacgtaggctgtcaaaagaaccagccgaggacattcttcaaactttactggattctacatacaaggatgggcgtcctctgacggacgacgagatcgcagggatgctcatcggactgctgctggccggacagcacacatcctccaccaccagtgcctggatgggcttctttctggccagagataaaccacttcaagacaaatgctacttagaacagaaaacggtgtgcggggaggatctgcctcccttaacttatgagcagttgaaggatctgaatttacttgatagatgcataaaagaaacactaagactgaggcctcctataatgaccatgatgagaatggccaagacccctcagactgtggctgggtacaccattcctccaggacatcaggtgtgtgtttctccaactgtcaatcaaagactgaaagactcctgggtagaacgcttggacttcaatcctgaccgctacctacaggacaacccagcgtcgggagagaagtttgcctatgtgccgtttggagccgggcgccatcgttgtattggagaaaattttgcctatgttcaaattaagacaatttggtccactatgcttcgtttatatgaatttgacctcatcaatggatattttcccagtgtgaattatacaacaatgattcataccccagaaaacccagtaatccgttacaaacgaagatcaaaatgaagaaaggaacaaggagccagtgtggagacgggactgcaagctgcagcttggcagagaatgaagctttgacacagctttcatactgtactgttttttaagtgtgtggttctgaaagccagtttgattttaatgttttattaactcggtgatttttgtcagacctaatggcatttgaaacagttataatagttctgataggatttcagggaagccaagtttatgttagaaatcgtttaggggagcctcggtattcagagatgatacagaatatagcatccaggtaactaacttcagaagcacacgttgccgtagggagattccggcttggaactagtttgggaagttttaagcctggtcagatgctacagaggcaatgggtcattggtgtggttgggccacttctgtgcgtaaagatgtgagagggtgaaggataagttttctgcgaagctctagatggtgtgagtgccctttgtagtgttaactgagagcaccactccagcgagatggcagcaatcttggaccttatcttgataaccttatttcctaaaaataataaatactaaagagtacttatgttattggttccagaaaaatccaaaatcaaatccttgtggaatttttaattttaatt

SEQ ID NO: 3063 - DNA, 2602 bp, Rattus norvegicus
  Genbank Accession No. NM_012967
ctgctgcctgcactttgccctggtcctccaatggcttcaacccgtgccaggcccatgctgcctctgctcctggtcctggtcgccgttgtgatccccgggcctgtcggtgctcaggtatccatccatcccacagaagccttcctgcctcggggtggatccgtgcaggtgaactgctcttcctcttgcgaagacgagaacctcggcctggggttggagactaactggatgaaagacgaactatcgagtggacacaactggaagctcttcaagctgagcgacattggggaagacagcagaccactgtgctttgagaactgtggcaccacgcagtcctcggcttctgccaccatcactgtgtattcgttcccagagcgagtggagctggatcctctgcccgcctggcagcaggtgggcaagaacctcatcctgcgctgcctggtggaaggcggagcaccgcggacacagctctcagtagtgctgctccgtgggaatgagacactgagccgccaggcagtggatggggaccccaaggagatcacattcacggtgctggccagcagaggcgaccacggagccaatttctcatgcttcacagaactggacctcaggccacaagggctgtcactgttcaagaatgtctccgaggtcaggcagctccggactttcgatcttccgactagggtcctgaagctcgacacccctgacctcctggaggtgggcacccagcagaagttcttgtgttccctggaaggcctgtttcctgcctctgaagctcagatatacctggagatgggaggccagatgctgaccctggagagcacaaacagcagagattttgtgtcagccactgcctcagtggaggtgactgagaagttggacagaaccctgcagctgcgctgtgttttggagctggcggaccagaccctggagatggagaagaccttgagaatctacaacttttcagctcccatcctgaccctgagccagccggaggtctcagaaggggaccaagtaactgtgaagtgtgaagcccacggtggggcacaggtggtgcttctgaacagtacttcccccaggccacccacctcacagggtacttcccccaggccacccacctcacagatccaattcacactgaatgccagcccggaggatcacaaacgacgcttcttttgctctgcggccttggaggtggatgggaagtccctgtttaaaaaccagaccttggaactccatgtgctatatggtcctcacctggacaagaaggactgcttggggaactggacctggcaagaggggtctcagcagactcttacatgccagccccaggggaatccagcccctaatctgacctgcagccggaaagcagatggtgtcccgctgcctatcgggatggtgaagtctgtcaaacgggagatgaatggtacctacaagtgccgtgcctttagctcccgtgggagtatcaccagggacgtgcacctgacagtgctgtaccatgatcagaatacctgggtcataattgttggtgtgttggtactgatcattgcgggcttcgtgatcgtggcgtccatttacacctattaccgccagaggaagatcaggatatacaagttacagaaggctcaggaggaggccctaaaactcaaggtacaagccccgcctccctgagcccactggacaggacacctgcctgggccccgctgctcttgaacagatcaatggacagcatttacccctcacccacctcctctggctgtcacaggacaggacagtggcctggggatgcatacttgtagcctcaggcctaagaggactcggaggggcaagactgtgaactcgtgacctggacacacctacagcctggtgggcctgcagccaagaaaggctgacttccttctctattacccctgctgaggggccccctaccttaggaaggtgtgatatccggtagacacaagcaagagaagaaaaggaacaccatgcttcctctgacatgggaaagctgggacactgtccccaactcttgttgatgtatttattaattcagagttctgacagttatttattgagtaccctgtacagacactagaggagtgagcaggttaacatgtaagttattgcctagaccctggtgaaggggcacaacagagtctggggaaagatcatacgggtttgggcttctccacaggtcagggtgctttcctcaaaagagctgatttctttcacgagtcatataaatactatgtggacgagcagtggccctctgctcgtagacctctctgggacccctgcctcctcccacagcctggagtctcccagcaccagcatgggtgaccacctccccacctacatacattcctacctttgttcccaatgtcaaccaccatgcctaaatatggacgctcacctttagcagctcaacaatggagtctcatgcccgtgaaattatggtcaatccctgcatgcctccacccggctccacctcaaagagaatgcctgggagaaaatgttccaaccacttagaagggtcctgcaagctgttgtgggagggtaggcacccctcccagcgcagaagcctttcctttgaatcaataaagtttta

SEQ ID NO: 3064 - DNA, 872 bp, Rattus norvegicus
  Genbank Accession No. NM_012976
ggaagagagcgttggttctcccaagacagaagagatgtcttccttcagcacccagactccatacccgaacctagctgtacctttcttcaccagcatcccaaatgggctttacccatccaagtccatcgtcatatcaggcgtggtcttgtcagatgctaagaggttccagatcaaccttcgctgtgggggtgacattgctttccacctgaacccccgttttgatgagaatgctgtggtccgaaacactcagatcaacaactcctgggggcccgaagagcgaagcctgcctgggagtatgcccttcagtcgtggccagagattctcagtgtggatcttatgtgaaggtcactgcttcaaggtggccgtggacggtcagcatatttgtgaatacagccaccgcctgatgaacttgccggatatcaacactctagaggtggctggtgatatccagctaacacacgtggagacctaggaaggtctctggcctagggatgaaggctgaggaaccctacctgagtcttgtcacctcttccctgtctcagccctgcctccccaaatcctgtcatcaaagagagcctcattggcaggagttccaggaaggtgacattcccaattcacaccctccacaaagggggagtcctgggctgtgggacacatggctgtgagcccacagtgtcagccattgctcccaagctagtcatcttctgagggaagtgacctccctgggtttgcccctttctctgaccctttcccttcacccctccaggagggccaccttgatgtcatcccactggcctccaactgacccagaatgtccacattaacttttccccaatctttcccaatgcccataaaataaagaatatcaacgc

SEQ ID NO: 3065 - DNA, 553 bp, Rattus norvegicus
  Genbank Accession No. NM_012985
tgaattcgtgggttacccctagccccgcctgagaggtgggagccaagtgctttcttgggtgacacaggagcagcttctacgttcgattgagcgggcctgggaaaggttcccagaaggccgcgcgctggagtctctgagcgcagtcatggcgggcttggtgaagaagactactggcctggtgggattggccgtttgcgacactccacacgagaggctaacaatattgtatacaaagattcttgatcttctgaagcactttcctaaacatgcagcctacagaaagtacacagaacagatcaccagtgagaagctggagttggtcaaattggaaccagatgttaaaaaattagaaaacttgcttcagggtggtgaagtagaagaggtgattcttcaggctgaaaaagaactaagtctggcaagaaaaatgttgcagtggaagccctgggagccactggtggaggagccccctgctaaccagtggaagtggccaatataatccccgtgtctgatgatggatgtggatctaatgtgcaattaaatgttctgtgatgcc

SEQ ID NO: 3066 - DNA, 1232 bp, Rattus norvegicus
  Genbank Accession No. NM_012992
gttttccgtccggcttctctcacactcaagtgcgcgcctccacctcatggaagactcgatggacatggacatgagccctcttaggcctcagaactaccttttcggttgtgaactaaaggctgacaaagattatcactttaaagtggataatgatgaaaatgagcaccagttatcattaagaacggtcagtttaggagcaggggcaaaagatgagttgcacatcgtagaggcagaagcaatgaactatgaaggcagcccaattaaagtaacactggcaactttgaaaatgtctgtacaaccaacagtttcccttgggggcttcgaaattacaccacctgtggtcttgaggttgaagtgtggttctgggcctgtgcacataagtggacagcacctagtagctgtagaggaagatgcagagtcagaagatgaagatgaggaagatgtaaaactcttaggcatgtctggaaagagatctgctcccggaggtggtaacaaagtcccacagaaaaaagtaaaacttgatgaagatgatgatgaggatgatgaagatgatgaggatgatgaagatgatgatgatgatgattttgatgaagaggaaactgaagaaaaggttccagtgaagaaatctgtacgagataccccagccaaaaatgcacaaaaatcaaaccaaaatgggaaagatttaaaaccatcaacaccaaggtcaaagggtcaagagtccttcaaaaaacaggaaaaaactcccaaaacacccaaaggacctagctctgtagaagacattaaggcaaaaatgcaagcaagtatagaaaaaggtggttctcttcccaaagtggaagccaagttcattaattatgtgaagaattgtttccggatgactgaccaggaggctattcaagatctctggcagtggaggaagtctctttaagaaaatggtttaaacagtttgaaataattctgtcttcatttctgtaatagttgctatctggctgtcctttttataatgcaaagtgagaactttccctactgtgtttgataaatgttgtccaggttcaattgccaagaatgtgttgtctaaaatgcctgtttagttttcaaggatggaactccgccctttacttggttttaagtatgtatggaatgttatgataggacatagtagtagtggtggtcagatgtggaaatggtagggagacaaatatacatgtgaaataaactcagtattttaataaagt

SEQ ID NO: 3067 - DNA, 2460 bp, Rattus norvegicus
  Genbank Accession No. NM_012998
ccccggcgccaacctagctgccccgcccgctgccgacgtccgacatgctgagccgtgctttgctgtgcctggccctggcctgggcggctagggtgggcgccgacgctctggaggaggaggacaacgtcctggtgctgaagaagagcaacttcgcagagccggcggcgcacaactacctgctggtggagttctatgccccatggtgtggccactgcaaagcactggccccagagtatgccaaagctgctgcaaaactgaaggcagaaggctctgagatccgactagcaaaggtggacgccacagaagagtctgacctggcccagcagtatggtgtccgtggctaccccacaatcaagttcttcaagaatggagacacagcctccccaaaggaatatacagctggcagggaagctgacgacattgtgaactggctgaagaaacgcacaggcccagcagccacaaccctgtctgacactgcagctgcagagtccttggtggactcaagcgaagtgacggtcatcggcttcttcaaggacgcagggtcagactccgccaagcagttcttgctggcagcagaggctgttgatgacataccttttggaatcacttccaatagcgatgtgttttccaagtaccagctggacaaggatggggtggtcctctttaagaagtttgatgaaggccgcaacaattttgaaggtgagatcaccaaggagaagctattagacttcatcaagcacaaccagctgcctttggtcatcgagttcactgaacagacagctccaaagattttcggaggtgaaatcaagacacatattctgctgttcctgcccaagagtgtgtctgactacgatggcaaattgagcaactttaagaaagcggccgagggctttaagggcaagatcctgttcatcttcatcgatagtgaccacactgacaaccagcgcatacttgagttctttggcctgaagaaggaggaatgtccagctgtgcggcttattaccctggaggaagagatgaccaagtacaaaccggagtcagacgagctgacagctgagaagatcacacaattttgccaccacttcctggagggcaagatcaagccccacctgatgagccaggaactgcctgaagactgggacaagcagccagtgaaagtgctagttgggaaaaactttgaggaggttgcttttgatgagaaaaagaacgtgtttgttgaattctatgctccctggtgtggtcactgcaagcagctagccccgatttgggataaactgggagagacatacaaagaccatgagaatatcgtcatcgctaagatggactcaacagccaatgaggtggaagctgtgaaggtgcacagctttcccacactcaagttcttcccagcaagtgcagacagaacggtcattgattacaacggtgagcggacactagatggttttaagaaattcttggagagcggtggccaggatggagcgggggacaatgacgacctcgacctagaagaagctttagagccagatatggaagaagacgacgatcagaaagccgtgaaggatgaactgtagtgcagaagccagatctgggcgcctgaacccaaaacctcggtgggccatgtcccagcagcccacatctccggagcctgagcctcaccccaggagggagcgccatcagaacccagggaatctttctgaagccacactcatctgacacacgtacacttaaacctgtctcttctttttttgcttttcaattttggaaagggatctctgtccaggccagcccatcttgaagggctacgttttgttttaattggtggtgtacttttttgtacgtggattttgtcccaagtgcttgctaccatatttggggatttcacactggtaatgtctttcctgttagagaggtttatgctatcacttcagatttcgtctgtgagatgtttcatcttcctgacatgtctccatgtcgaggtacttgttccaccacgcagacctccctgagaccccttcctgccctgcgcaggaggcgatggttctgggtcgtatgctctctctctctccaccttgtactagtgttgccatgacagcatggcttttgtagtttgcatttaacctggggatttctgcatcctgtcagagggtgggtccccacgtgtggaaaagagacagtggtggcttgctgccaggctcaggccaggcctggacagctctcactcttcttaagccagaactaccgaccagccggccggctgtgggcacattactctggctgctggatcctcttccagcatggcatgtggcctgtgtgaggcagaaccgggacccttgattcccagactgggagtcagctaaggacactggggctgaatgaaatgcccattctcaaggtctatttctaaaccataatgttggaattgaacacattggctaaataaagttgaaattttactaccat

SEQ ID NO: 3068 - DNA, 2175 bp, Rattus norvegicus
  Genbank Accession No. NM_013013
attgcagcctgcggagtgaagcgcgccatgtatgctctcgctctcctcgccagccttctggtcaccgctctgaccagccctgtccaggacccgaagatatgctctgggggctcagcagtagtgtgcagagatgtgaagacggcggtggactgtagggctgtgaagcactgccagcagatggtctggagcaagcccacagcaaaatcccttccttgtgacatatgcaaaacggttgtcaccgaagctgggaacttgctgaaagataatgctactgaggaggagatcctccattacctggagaagacctgtgcgtggattcatgactccagcctgtcagcctcttgcaaggaggtggttgactcttacctgcctgtcatcctggacatgattaagggggagatgagcaaccccggggaagtgtgctctgcgctcaacctctgccagtcccttcaggagtacttggccgagcaaaaccagagacagctggagtccaacaagatcccggaggtggacctggcccgcgtggttgcccccttcatgtccaacatccctctcctgctgtaccctcaggatcggcctcgcagccagccgcagcccaaggctaacgaggacgtctgccaggactgtatgaagttggtgactgacatccagactgctgtgaggaccaactccagctttgtccagggcttggtggaccacgtcaaggaggattgtgaccgcctcgggccaggcgtgtctgacatatgcaagaactatgttgaccagtattctgaggtcgccgtccagatgatgatgcacatgcaacccaaggaaatctgtgtgatggttggcttctgtgatgaggtcaagagagtgccaatgaggactctggtccccgccactgaggccatcaagaatatcctccctgccctggagctgacggacccctatgagcaggatgtgatccaggcccaaaatgtgattttctgccaagtttgtcagcttgtgatgcgcaagttgtctgaactgattatcaacaatgccactgaggaacttctaattaaaggtttgagtaaagcctgctccctgctccctgctcctgcttcaaccaagtgccaggaagtgctggtaacatttggcccctccctgttggacgtcctcatgcatgaggtgaacccgaactttctgtgcggtgtgatcagcctctgttctgccaacccgaatttggtggggacccttgaacaacctgcagcagccattgtatctgcactgcccaaagagcctgcaccgccaaaacagcctgaagagcccaagcagtctgcattgcgcgcccatgtgcctcctcagaagaacggggggttctgtgaggtgtgcaagaagctggtcatctatttggaacataacctggagaaaaacagcaccaaggaggagatcctggctgcacttgagaagggctgcagcttcctgccagacccttaccagaagcagtgtgatgaatttgtggctgagtatgagcccttactgctggaaatccttgtggaggtgatggatccttcctttgtgtgctcgaaaattggagtctgcccttctgcctataagctgctgctgggaaccgagaagtgtgtctggggcccaggctactggtgtcagaacagtgagactgctgcccgatgcaatgctgtcgatcattgcaaacgccatgtgtggaactagctttccagcttgcagaagtcgcctacttgtgggtctagggtaatgaacacatagatctatttgacttaataagtaggagcccccttttgtcttcccccatctcctgtcccttactatagcatttctgtcacgtaagaggcgctgacagcacttccgtgtcccatttctgctccaaggatgaggacacttgggcttcagctccccggctgcccttttcacccacctgctggaggggggtggtgagccagagggcaggagcatgtgctcagccctctcggtgtgtagggatcatggccatctcctagcgtcagggaactgcgcaacttcctgtgctaccaaggagtttaatttggatgcttagaagcacagagtgatcaggcctttagagtgtgggatggccattgccacagcacagagacttgagaagcacctgctgcaggtggcttgctgtgacgttgccgtccctggtcagccttcattctg

SEQ ID NO: 3069 - DNA, 2410 bp, Rattus norvegicus
  Genbank Accession No. NM_013026
gcgggctagaggagacagagcctggcgctgaggaaggaatctggcagtcgagagctgactccagccgacggaacctgcagcccttgctccggacagcagcgcgccgggcaggagtccgggatagcgaagcgcagagcaatcagcagagcctgcccggagctccgtgcaaccggcaactccgacccacatagcccgccgagctcccgccgccggtccgggcagcatgagacgtgcggcgctctggctttggctctgcgcgctggcgctgcgcctgcagcctgccctcccgcaaattgtcaccgcaaatgtgcctcctgaagaccaagatggctctggggacgactcagacaacttctctggctcaggcacaggtgctttgccagatatgactttgtcacggcagacaccttccacttggaaggatgtgtggctcctgacagctacacccacagctccagaacccaccagcagggataccgaggccaccctcacctctatcctgccggctggagagaagcctgaggagggagagcccgtggcccacgtggaagcagagcctgacttcactgctcgggacaaggagaaggaggccaccaccaggcctagggagaccacacagctcccagtcacccaacaggcctcaacagcagccagagccaccacggcccaggcatctgtcacgtctcatccccacggggatgtgcaacctggcctccacgagaccttggctcccacagcacccggccaacctgaccatcagcctccaagtgtggaggatggaggcacttctgtcatcaaagaggttgtggaggatgaaactaccaatcagcttcctgcaggagagggctctggagaacaagacttcacctttgaaacatctggggagaacacagctgtggctggcgtcgagcctgaccttcggaatcagtccccagtggatgaaggagccacaggtgcttctcagggccttttggacaggaaggaagtgctgggaggtgtcattgctggaggcctggtgggcctcatctttgctgtgtgcctggtggctttcatgctataccggatgaagaagaaggacgaaggcagttactccttggaggagcccaaacaagccaatggcggtgcctaccagaaacccaccaagcaggaagagttctacgcctgatggggaaatagttctccccccacaacccctgccactcactaggctcccatttgcctcttctgtgaaaaacttcaagccctggcctccctaccgctgtgccgtctcctctgcacccagacccttctgcccgagcggtctcagggtgtgctgggaattccttctcctctgacttctgctagaagcttgggtgcagagggtttcttgcattttgtctttctaccacagccacgcctgttgtccactcttctgacttggcttctccaaatgggaggagactcagctctggacagaaagggaacccaactgctttggacctagatggcctattgtgactggaggatcctgaggacaggagaggggcttcaacagacacgccatagcacttacccatagagaccattagggttggctgtgctgtggtagggaaggagtccagggctccttggaattcacttctcattgtggggaggtctactttagacaacttggttttgcacatgtttcctctaatttttctgttttagagccccagcagaccttacttctggggtaaggcaagtcagttgactggtgtccccacctcgcttccctaatctacattcgggagaccgcatcggggttaaataagacttttcattttcgtttttgtttttaacctagaagaaccaaatccggacaccaaaacgtaggcttagtttgtgtgttgtctctgagtttgtcgctcatgcgtgcaacagggtatggactatctgtttggtgccccatttttggtggcccataagtaggctggctagcccaggatgccatggagtagccacctcttgaccagtcatgcctgtgtgcatagactcagggccatggcctttgtgacattggaagagcctgtgtgagaacttcctcctagattagtctagggatggaggggaggagactgtacagtttgggaggaggggtgacaagggtgtccaagactctcccacctttggtactaactctggtcaccctttctcctggaagttgacaagacacatcttgagtatggctggcactggctcctccatcaagaaccaagttcaccttcagctcctgtggccctgttcccaggctggagtcagaaatgtttcccaaagagtgagagtcttttgcttttggcaaaacgctacttaatccaatgggttctgtacagtagattttgcagatgtaataaactttaatataaaggagtcctatgaaaaaaaaaaaaaa

SEQ ID NO: 3070 - DNA, 1666 bp, Rattus norvegicus
  Genbank Accession No. NM_013043
cggcagccgagtcggattgagctgctgcagacgccaggccactccagccagcactgccgttttcacgccccggctgcagacagctaggaggctttatctagtttgaaccaggctgctggagctcgctccttccctctctttttttccacgaggctgtttttttatttggctgcaattgcatgaaatcccaatggtgtagaccagtggcgatggatctaggagtttaccaactgagacatttttcaatttctttcttgtcgtctttgctgggaactgaaaacgcttccgtgagacttgacaatagctctggtgcaagtgtggtagctatcgacaacaaaatagagcaagctatggatctggtgaaaagccatttgatgtatgcagttagagaggaagtggaggttctgaaggagcagatcaaagaactaatagagaaaaactcccaactggagcaggagaacaatctgttgaagacactggccagtccggagcagctcgcccagtttcaggcccagctgcagactggctcccctccggctaccacgcagccacaggggaccacacagccccctgcacagccagcgtcccagggctcaggatcaaccgcatagcctgctatgccccaacagaactggctgctgctgtctgaactgaacagaccgaagagatgtgctagtgagaagccgcctccagtcacccatttcattgctgtctgcgaaagagacgtgagactcacacatgctgttctcgctttctccccagtattaagcactcatatgcttttggcttgaagaaatatactagttgagtgaattaaaggttaaacagagagtgagcatggatgtaccctgtgcaacgtggcagatgtctgaggaatggtttgattgacgctgaggaggagctctgtgccttttcaaccctccccagccgcccactctactcccaagctctggggctcgcctgcatggggctcagaaggtgggctgctcctggattttgtgttctcctctccttcccttcaaagaatttgagaggccagaaacgagactgcaaagggggggatgcagtccttttacaaaaccgacaactgtcaccaaagcttataaaacaggacagtactgtccctcttttctgaaacatcagaagacacaaaactgttagtgacacaacggtgacaggtagctgggacctaggctatcttattatgaaggttgttttgcttgttgtatatttgtgtatgtagtgtaacgaatttgtacaatagaggaccgtaactactgttaggttgtacagattgaagtttagatgttccattggctgtctgaaaaggtgtggattgtccttcctagagagatctacttaaaaactgcttcgtgacaaaaaccacacctgaagaaattttaagaatttggcacagttagtcactttgtgtcacccggaatctagctgctgagtcttgcaaagtaaaccccctgttgactgatgtcagttgagctagtgaatgaatagatggagaaacgtcagtcagttgctgaggaagtggatttcccagtaggggtttctgcagctcacctgtatagtcctgcgcatgttccccacacagaacccactgtatttacctgttctacttgtcacctttcaataaagcatatcaaatgttgatacc

SEQ ID NO: 3071 - DNA, 1689 bp, Rattus norvegicus
  Genbank Accession No. NM_013052
tgcagccagctagcgagaaggcgcgagcggcggcgcagccagcagcctcccgccagccggcgagccagtgcgcgtgcgcggcggcggcctcggcggcgaccgggaagcggacgggcgggcgaggcgagcgaggcaggcggtgcgggcgtgcgaggcgaggccgatcgcgagcgacatgggggaccgagagcagctgctgcagcgggcgcgactggcggagcaggcggagcgctacgacgacatggcctccgccatgaaggcggtgacagagctgaatgaacctctatctaatgaagatagaaatctcctctctgtggcctacaagaatgtagttggtgccaggcgatcttcttggagggttattagtagcattgagcagaaaaccatggcagatgggaatgagaagaagctggagaaagtcaaagcctatcgggagaagattgagaaggagctggagacagtttgcaatgatgtcttggctctgctcgacaagttccttatcaagaactgcaatgattttcagtacgagagcaaggtgttctacctgaaaatgaagggcgattactaccgctacctggcagaggtggcttctggggagaagaaaaacagtgtggttgaagcttctgaggcagcgtataaggaagccttcgaaatcagcaaagagcacatgcagccaacacaccccatccggcttggcctggccctcaatttttctgtgttctactatgagatccagaatgcaccagagcaggcctgcctcttagccaaacaagccttcgatgatgctatagctgagctggacacattaaacgaggattcctataaggactccactctcatcatgcagttgctgcgagacaacctcaccctctggacgagcgaccagcaggatgaagaagccggagaaggcaactgaagacccatcaggtccctggcccttcctttacccaccacccccattatcactgattcttccttgccacaatcactatatctagtgctaaacctatctgtattggcagcacagctattcagatctgccctcctgtcccttggaagcagtttcagataaaccttcatgggcatttgctggactgatggttgctttgagccacagagcgctccctttttgaattgtgcagagaagtgtgttctgaacgaggcattttattatgtctgttgatctgtagcaaatccatgtgatggtaattgagtgtagaaaggagaattagccaacacaggctatggctgctatttaaaacaagctgatagtgtgttgttaagcagtacatctcgtgcatgcaaaaatgaatttgaccctctcaccccttctttcagctaatggaaactgacacacgacaacttgttccttcaccatcagctttataaactgtttctcgtgagctttcaggcccctgctgtgcctctttaaattatgatgtgcgcacaccttcttttcaatgcaatgcatcagaggtttttgatatgtgtaacttttttttttggttgtgattaagaatcatggatttattttttgtaactctttggctattgttcttgtgtaccctgacagcatcatgtgtgtcaacctgtgtcaatcatgatgggtggttatgaaatgccagattgctaaaataaatgttttggacttaaaaagagtaaataaatgctgctttggggatattaaaa

SEQ ID NO: 3072 - DNA, 3754 bp, Rattus norvegicus
  Genbank Accession No. NM_013055
ttggaaggagcgggagttcaagtcgagtgggaacggggcttagagtagtgggtggggggccaaaagctggggctgacacccgtgcacctgagctccactcgagcatcgccggtgacagctctccaggtccagtggagggcaacggggggaggaggggaggaggaggaggaggcgggagcagcatccggagccgagctgcagcagcgccgccttttgtgctgcggccgcggagcccccgagggccttggatcccctggaactggagttataggggttgtgagcatcatgtggatgctgggaatggaaccccagtcatctcgaagaacacccaggctggcctgaaactcactgtgaagccagagatgaccttggacttctgagcctctcacctccattcctgagtgctgggactgctgggcccgctactcagcacacctggctccagaggccatggcctgcctccatgaaacccgaacaccctccccttcctttggaggctttgtgtctactctaagtgaggcctccatgcgaaagctggatccagacacttcagactgcacccctgagaaggacctgacacctacccaatgtgtacttcgagatgttgtgcctctcggtgggcagggtggaggagggcccagcccctccccaggtggagagcctcctccagagccttttgccaatagtgtcctgcagctacatgagcaggatacaggtgggccagggggagccaccgggtcacctgagagtcgagcatctagggttcgagctgatgaggtacgtctgcagtgccagagtggcagtggcttccttgaaggtctttttggctgcctgcgccctgtctggacaatgattggcaaagcctactccacagagcacaagcaacagcaggaagacctttgggaagtcccctttgaggaaatcctggacctgcagtgggtaggctcaggggctcagggtgccgttttcctgggacgctttcatggggaggaggtagctgtgaagaaggttcgagacctcaaggagaccgacatcaagcatcttcgaaaactgaagcaccccaacatcatcactttcaagggtgtttgcacacaggccccgtgctactgcatcctcatggagttctgtgcccaaggacagctgtatgaggtgctcagggcgggccgccccgttaccccctccttgctggttgactggtccatgggcatcgctggaggcatgaattacctacacctgcacaaaatcatccacagagacctgaagtcacccaacatgctaatcacatacgacgatgtggtgaagatctcagactttggcacttccaaggagctgagtgacaagagcaccaagatgtcctttgcagggacagtagcctggatggctcctgaagtgatcagaaatgaacctgtgtctgagaaggttgacatctggtcctttggggtggtgctttgggaattactgactggagagattccctacaaagatgtagactcctcagccatcatctggggtgtgggaagcaacagtcttcacctgcctgtaccctctagctgcccagacggctttaaaattctgcttcgccagtgctggaacagaaaacctcggaaccgcccatcattccgacagatcttgctgcacctggacatcgcctcggctgatgtgctctctacaccccaggagacttactttaaatcccaggcagagtggcgggaagaagtaaaactgcactttgaaaagattaagtcagaagggacctgtctgcaccgcctagaagaggaactggtgatgcggagaagggaggagctcagacatgccctggacatcagggagcactatgagcgcaagttggagagagctaacaacttgtacatggaactgaatgccctcatgttgcaactagaactcaaagagagggaattgctcaggcgagagcaagctttagaaaggaggtgtcctggtctactgaagtcacacacgtcccgaagcctcctacatggaaacacgatggagaagctcatcaagaaaaggaatgtgccacagaaactgtcaccccatagcaaaaggccagatattctcaagacagagtctttgctacctaaactagatgcagccctaagtggggtggggcttcctggttgtcctaaggcccccccttcacctgggaggagtcgtcgtggcaagacccgtcaccgaaaggccagcgccaagggcagctgtggagacctgcctgggcttcgtgcagctttgccaccccatgagcctggaggactaggaagcccaggaggcctaggagtgggccctacagcttgggatgcctccccccctgctctccgtggactccaccatgaccttctacttcggaagatgtcttcatcatccccagacctgttatcagcagcactgggagcccgaggccgaggggcaacagggggagctcgggatcctggctcaccacctccaccccagggtgatactcctccaagtgagggatcagctcctggttccaccagcccagattcacctgggggagctaaaggggaaccacctccaccagtagggcctggagaaggtgtggggctgctgggaactggaagggaagggactacaggccggggaggaagccgggctgggtaccagcacttgacccccgctgcgctgctgtacagggctgctgtgactcgtagtcagaaacgtggtatctcatctgaagaggaagaaggagaggtcgacagtgaagtagagctacccccaagtcaaaggtggcctcagggcccgaacatgcgtcagtcactatctacgttcagctcagagaacccatcagatgtggaggaaggtacagctagtgagccttccccaagtggcacaccggaagttggcagcaccaacactgatgagcgaccagatgaacggtctgatgacatgtgctcacagggttcagaaatcccactggacctacctacttcagaggtggtccctgaacgtgaaaccagctccttgcccatgcaacaccaggatgaccagggccccaatcctgaggactcagactgtgacagcactgaattggacaactccaacagcattgatgccttgccgcccccagcctcccttcctccatgaaagacactcttattccttgtacatagagaaatatttatataaataatatatatgcgccacataatcaacagatagacggggctttcttagccgtaagtcaggcttcagagtgaacgacgcccctgaccaattaagttctagggacactggcagctgtggaaatgactccaagtactaccctagagctgtaaggaaaggacaccggtcccttcttgcttcaccccattccttatgttgaacaagcaagtaggcatagaaaagccaggcttgtctctacactgtctgtccctaaacatggggggcaggaagaggattcacttaaaactgcacttttattttccgtttactgtttacacattttgcacttgggaggagggaaactaaggctgggtcctaggtcctccctctgaggtttctcaggtggcaatgtaactcatttctttgttcctgtttctctgccaaagccctggctttgggcccagaggcaagttagaagattaatagcatgtgatggctcaggctgaagaactgggtgctggttaagtccccgctgttatctggtgcctggtaggggtggggactgtcatattgtaacccctgtgaacaaccctgaaatataaccactccatgcaggccc

SEQ ID NO: 3073 - DNA, 2706 bp, Rattus norvegicus
  Genbank Accession No. NM_013065
cgcccttgttcccgctgcggggaggagagtctggtgcctacaagatggcggacggggagctgaacgtggacagcctcatcacccgcctgctggaggtacgaggatgtcgtccgggaaaaattgtgcagatgactgaagcagaagtccgaggactgtgtatcaagtctcgtgaaatctttcttagccagcctattcttttggaattggaagcgccactgaagatttgtggagatattcatggacagtatacagacttactgagattatttgaatatggaggttttccaccagaagccaactatcttttcttaggagattatgtggacagaggaaagcagtctttggaaaccatctgtttgctattggcttacaaaatcaaatacccagagaacttctttcttctacgaggaaaccatgagtgtgctagcatcaaccgcatttatggattctatgatgagtgcaaacgaagatttaatattaaattgtggaagacattcactgattgttttaattgtctgcctatagctgctattgttgatgagaaaatcttctgctgtcatggaggactgtcaccagacctacagtctatggaacagattcggagaattatgagacccactgacgtacctgatacaggtttgctttgtgatttactgtggtccgacccagataaggatgtacaaggctggggagaaaatgatcgtggtgtttcttttacttttggagctgatgtagtcagtaaatttctgaatcgtcatgatttggacttgatttgtcgagcccatcaggtggtagaagatggatatgaattttttgctaaacgacaattggtaactttattttctgccccaaattactgcggcgagtttgacaatgctggtggtatgatgagtgtggatgaaactttgatgtgttcattccagatattgaaaccatctgaaaagaaagctaagtaccagtatggtgggctgaattctggacgtcctgtcactccgcctcgaacagctaatccaccgaagaaaaggtgaagacaggaattccggaaagagaaaccatcagatttgttaaggacatacttcataatatataagtgtgcactgtaaaaccatccagccattcgacaccctttatgatgtcacacctttaacttaaggagacgggtaaaggatcttaaatttttttctaatagaaagatgtgctacactgtattgtaataagtatactctgttataatattcaacaaagttaaatccaaattcaaaagtatccattaaagttctatcttctcatatcacagtttttaaagttgaaagcatcccagttaaactagctgcgttagttacccagatgagagcatgaagatccatctgtgtaatgtggctttagtgttgcttggttgtttctttattttgggcttgttttgttttgtttgtttttgctagaataatggcatctacttttcctatttttccctaaccattttaaaaagtgaaaatgggaagagctttaaagacattcaccaactattcttttccttcacttatctacttaaggaactgttggatcttactaagaaaacttacgcctcataataaaaaggaactttagaggccgataggttttaaaaatatacaaactatttgatccaatgattttaatcaaacagtttgactgggcaaactttgcagctgataatgactatttcgctttttacaaattgccactgatttggatttgtgcactctaacctttaatttattgatgctctattgtgcagtagcatttcatttaagataaggctcatatagtactatccaaaattagttggtaatgtgattatgtggtaccttggctttaggttttaattcgcacgaaacaccttttggcatgcttaactttctggtattatcctcacctgcattggttttgttttttggggtttttgttgttgtttgtttgtttgtttttagatccacagaacatgagaatcctttttgacaagccttggaaagctggctcttctttccctctctatgtgaaggatgtatttaaatgaacactggtcagtgggacattgtcagctctgagtattgggtgcttcactgtctaataattgccatgtgaatgttgtttttgactgtaaggctatgtcactaaagatttttactctgcgttttcataatcaaaggtcatgatgtgtatagacatgctttgtagtgaagtatagtagcaataatttctgcacatgatcaagagtttattgcagcatttctttccctgttctctcttttttaagggttagcattaacaaatgtcaaggaatagcaaagtcaacaaagactttaggaggtggaattaagaacacacagatttgtgatctttggatgtgacacttattggatgttattctaaagtcttattgaacattgtcaaatttgtaagcttcatggggatggacataatgtttatataatgcccttcttatgtgttaccatagatgtgaaaccttatattgtctttgaaaatgttaaattgagaactctgttaacattttatggattggcacattatattactgcaagaaacatttgattttcagcacagtgcaaaagttctttaaaatgcatatgtctttttttctaattcaattttgtttaaagcacattttaaatgtagttttctcatttagtaaaaagttgtctaatt

SEQ ID NO: 3074 - DNA, 2214 bp, Rattus norvegicus
  Genbank Accession No. NM_013067
tcgcggtcatggaggcgccgatcgtcttgctgctgctgctatggctcgccttggccccgacgcctggcagcgcctcttcggaggctccgccgctggtcaacgaggacgtgaagcgcacggtggacctgagcagccacctagccaaggtgacggctgaggtggtcctggcgcacccgggcggcggctctacagcacgagccagctctttcgttctggccctggagcccgaactggagtcgcgacttgcacacctaggcgtgcaggtaaagggagaagatgaggaagacaacaacctagaagtacgagaaaccaaaatgaaggggaaaagtgggaggtttttcaccgtcaagctcccagttgctcttgatcctgggtccaagatctcaatcgttgtggaaactgtctacacccatgtgcttcatccatacccgactcagataactcagtcagagaaacagtttgtggtgtttgagggcaaccattacttctactctccctatccaacaaagacccagaccatgcgagtgagacttgcttcccgaaatgtggagagccataccaagctggggaacccctcaaggtctgaggacatcctggactatgggccttttaaagacatccctgcctacagtcaggatactttcaaagtacattatgagaacaatagccctttcctgaccatcaccagtatgacccgggtcattgaggtttctcactggggcaatattgctgtggaagagaacgtggacttgaagcatacaggtgcggtgctgaagggacctttctcccgctacgattaccagaggcagcctgacagtgggatctcctccattcgttcttttaagaccatccttcctgctgctgcccaggatgtgtattaccgggatgaaatcggtaatgtttccaccagccacctccttattttggatgactccgtggaaatggaaatccggcctcgatttggtctctttggagggtggaagacacactacatcgttggttacaacctcccaagctatgagtacctctataatctgggtgaccagtatgcactgaagatgcggtttgtagaccacgtgtttgatgagcaagtgatagattctctgacagtgaagatcatccttcctgagggagccaagaacatccaggtagacagtccctacgatattagccgggccccagatgagctgcattacacctacctagacacattcggccgcccggtgattgttgcttacaagaagaatctagttgaacagcacattcaggacattgtggtgcactacacattcaacaaggtgctcatgctgcaggagcctctgctggttgtggccgccttctacatcctgttcttcaccgtcatcatctacgtccgtctagacttttccatcaccaaggacccagcagcagaagccaggatgaaagtggcctgtatcacagagcaggtcttaaccctggtcaacaagaggttaggcctctaccgtcactttgatgagactgtcaatagatacaagcagtcccgggacatctctaccctcaatagtggcaagaagagcctagagacagagcacaaagctgtgaccagtgagattgctgtgctgcagtctaggctgaagacggagggctctgacctgtgtgacagggtgagcgaaatgcagaagctggacgcgcaggtcaaggagctggtactgaagtctgcggtggaggcagagaggctggtggctggcaagctcaagaaggacacatacatcgagaatgaaaagctcagctcaggaaaacgccaggagctggtcaccaagatcgaccacatcctagacgctctgtagctcttgtctccagagcaggcctgggtggcctacacttctggatggaataggtagagggaggaagttgtgattagcctaagacctcaagaaaaaagctgaggcccatccatggctgtgtaagaagcttgtcccttatttctgaatggttctcttttttacaaaaacaaaaacctaaacaaaaatcctgcccaaaaaacaaacttggttgtgttttgagcaaaagcattttgagtagttgattgctgttttgttttgatacctgggtattttttctgtctgtaagccctgttttatggccttctgattcctaatgtttggttcttttgtgagcgtatgcatggttttttaaaagtgtgtatgaccaaataaaaataaaggagggactgtg

SEQ ID NO: 3075 - DNA, 2153 bp, Rattus norvegicus
  Genbank Accession No. NM_013082
cgtcccctccgttctgcatccccaaacttcagccgcagctctgtttcaacccatcggctgcttgcttcaaatcagacagcaccgcgacccagacacccgagtccgcggagtgaaagcacaacgccgagtaggaccagaccaggaaaatagactcgtgaagcagcaactctggattgggagggcagaagccaacaagtgagaaggcgcggcgtttccggggcgctgtgcgaaagctagagcaggcgccagagaagacagctcgagctcagaacccgagaccaagcctctctcccggaggcagctcagctcctatcttctctaggcccgctgcagcgtgcgctgggcttcgttttatgcgggtacgagccacgtccccggggaatatgcagcgtgcgtggatcctgctcaccttgggcttgatggcctgtgtgtcggcagagacgagagcagagctgacatctgataaggacatgtaccttgacagcagctccattgaggaagcttcaggattatatcctattgatgatgatgactattcttctgcctctggctcaggagcttatgaagacaaagggagtccagatctgacaacatcccaactgattccaaggatctccctcactagtgctgctcccgaagtggaaaccatgacgttgaagacacaaagcatcacacccactcagaccgagtcacccgaagaaactgacaagaaggagtttgaaatctctgaggcagaagaaaagcaggaccctgctgtaaaaagcacagacgtgtacaccgagaaacattcagacaatctgttcaagcggacggaagttctagcagctgtcattgctggcggtgtgattggctttctctttgccattttcctcatcctgttgttggtgtaccgcatgcggaagaaagacgaaggaagctacgaccttggagaacgcaaaccgtccagcgcagcttaccagaaggcacccactaaggagttttatgcataaaactcccacttagtgtctctatttaagagatcactgaacttttcaaaataaagctttagcatagaataatgaatatctttgttatctgttttgttcattacagagccatgctggccctttaatgatgaagatcccattgtatttaaaatttttcatatatttctttagaatgacttaaaagtaaaaatttaacatctgcagtgttctgtgaatagcagtggcaaaatattttgttacaaaaacccttgacattcatggaattgatttgaacatctatgtgcaaatacaaaatgattgtgtttgtcctctggttcaaagatgactgctgttcccctcatcagcagatctccagttgaccttaccgagttgatctttgttaatttatctcttgttcctcttctctgccctcccttcttgtctcctcccttaaaaacaaaaccttatgccttttgtagctgtcatggtgcaatttgtctttgaatgattacaataatggtaatttagtgtatatgtgatttttttcaattatgtaaactttaacctcctctttatgtaatttttttaaatgtcagactacccattttacacttgctttaatttccattccctgtagcttcaggcagatttgcaaaggcaaattataaaattggattattactacgaaactgttagtcctagttatctaagcagtcttctcttggaggatttgacatcactgacaagcctcagcaaacccaaagatgctaacagtatttgagaagttgctacagactcctttggccactgtacttgctagtttacaatttgaaggtacaaggaagagtttaaaggaaaaaaaagatcagtttttgttcttaaaaatgcatttaagttgtaaacatctttttaagcctttgaagtgcctatgattctatgtaacttgttgcagactggtgttaatgagtatatataacagtttttaaaaagttggtattttataagcacagacaattctaatggtaacttttgtagtcttatgaatagacataaattgtaatttgggaacaagcaaactactgaataaatcacatggcctaatattgaaaatgtcactgttataaatttgtacatttcttatcaaatgtacagcttccctttgctatgactgactgtctgttctcagtg

SEQ ID NO: 3076 - DNA, 2130 bp, Rattus norvegicus
  Genbank Accession No. NM_013091
ttttctccgagttttctgaactctggctcatgatcgggcttactggatacgagaatcctggaggaccgtaccctgatttccatctacctctgactttgagcctttctaacccggggctcacgctgccaacacccgggccacctggtccgatcgtcttacttcattcaccagcgttgccaattgctgccctgtccccagccccaatgggggagtgagagaggccactgccggccggacatgggtctccccatcgtgcctggcctgctgctgtcactggtgctcctggctctgctgatggggatacacccatcaggggtcaccggactggttccttctcttggtgaccgggagaagagggataatttgtgtccccagggaaagtatgcccatccaaagaataattccatctgctgcaccaagtgccacaaaggaacctacttggtgagtgactgtccaagcccagggcaggaaacagtctgcgaggtgtgtgataaaggcacctttacagcttcgcagaaccacgtcagacagtgtctcagttgcaagacatgtcggaaagaaatgttccaggtggagatttctccttgcaaagctgacatggacaccgtgtgtggctgcaagaagaaccaattccagcgctacctgagtgagacgcatttccagtgtgtggactgcagcccctgcttcaatggcaccgtgacaatcccctgtaaggagaaacagaacaccgtgtgtaactgccacgcaggattctttctaagcggaaatgagtgcaccccttgcagccactgcaagaaaaatcaggaatgtatgaagctgtgcctacctccagttgcaaatgtcacaaacccccaggactcaggtactgccgtgctgttgcctctggttatcttcctaggtctttgccttttattctttatctgcatcagtctactgtgccgatatccccagtggaggcccagggtctactccatcatttgtagggattcagctcctgtcaaagaggtggagggtgaaggaattgttactaagcccctaactccagcctctatcccagccttcagccccaaccccggcttcaaccccactctgggcttcagcaccaccccacgcttcagtcatcctgtctccagtacccccatcagccccgtcttcggtcctagtaactggcacaacttcgtgccacctgtaagagaggtggtcccaacccagggtgctgaccctctcctctacggatccctcaaccctgtgccaatccccgcccctgttcggaaatgggaagacgtcgtcgcggcccagccacaacggcttgacactgcagaccctgcgatgctgtatgctgtggtggatggcgtgcctccgacacgctggaaggagttcatgcggctcctggggctgagcgagcacgagatcgagcggctggagctgcagaacgggcgttgcctccgcgaggctcattacagcatgctggaagcctggcggcgccgcacaccgcgacacgaggccacgctggacgtagtgggccgcgtgctttgcgacatgaacctgcgtggctgcctggagaacatccgcgagactctagaaagccctgcccactcgtccacgacccacctcccgcgataaggccacacccccacctcaggaacgggactcgaaggaccatcctgctagatgccctgcttccctgtgaacctcctctttggtcctctagggggcaggctcgatctggcaggctcgatctggcagccacttccttggtgctaccgacttggtgtacatagcttttcccagctgccgaggacagcctgtgccagccacttgtgcatggcagggaagtgtgccatctgctcccagacagctgagggtgccaaaagccaggagaggtgattgtggagaaaaagcacaatctatctgatacccacttgggatgcaaggacccaaacaaagcttctcagggcctcctcagttgatttctgggcccttttcacagtagataaaacagtctttgtattgattatatcacactaatggatgaacggttgaactccctaaggtaggggcaagcacagaacagtggggtctccagctggagcccccgactcttgtaaatacactaaaaatctaaaagtg

SEQ ID NO: 3077 - DNA, 2664 bp, Rattus norvegicus
  Genbank Accession No. NM_013134
atgttgtcaagacttttccgtatgcatggcctctttgtggcctcccatccctgggaggtaattgtgggaacggtgacacttactatctgtatgatgtccatgaacatgttcaccggcaacaacaagatctgtggttggaattatgagtgcccaaaatttgaagaggacgtgctgagcagcgacatcatcatcctcacgataacccggtgcatcgccatcctgtacatctacttccagttccagaacctgcgtcagcttgggtcaaagtacattttgggtattgccggcctcttcacaattttctcaagtttcgtcttcagcactgtcgtcattcatttcctcgacaaagaattgacaggcttaaatgaagctttgccctttttcctgctcttgattgacctttctagagcgagtgcattggccaagtttgccctgagttcaaactcacaggatgaagtaagggagaatatagcgcgtgggatggcgatcctgggccccacgttcacccttgacgctctggtggaatgtcttgtgattggagttggcaccatgtcaggggtgcggcagcttgagatcatgtgctgctttggctgtatgtccgtgcttgccaactactttgtcttcatgacattcttcccagcctgcgtgtccctggtcctagagctttctcgggaaagccgtgagggtcgtccaatttggcagctcagccattttgccagagttttagaagaagaagagaataaaccaaacccagtaacccaaagggtcaagatgatcatgtctttaggcctggttcttgttcacgctcacagtcgctggatagctgatccttctcctcagaacagcacagcagaacagtctaaggtttccttgggtctggctgaagatgtgtccaagagaattgagccgagtgtttctctctggcagttttacctctccaagatgatcagcatggacatcgagcaagtgattaccctgagcttagcgttgcttttggctgtcaagtatattttctttgaacaagcagagacagaatcaacactctcattaaaaaatcctatcacatctcctgtcgtgaccccaaagaaagctcaagacaactgttgtagacgtgagcctctgcttgtgaggaggaaccagaagctttcgtcagtggaggaggatccaggagtgaaccaagacagaaaagttgaggttataaaacctttagtggcagaagccgagacttcgggcagagctacgtttgtgcttggcgcctctgcagccagccctccattggccctgggggcacaggagcctgggatcgaactccccagcgagcctcgacctaatgaagagtgtctacagatactggagagtgcagagaaaggtgcgaagttccttagtgatgcagagatcatccagttggtcaatgctaagcacatcccagcctacaaactggaaaccctcatggagacgcacgagcgtggtgtgtctattcgccggcagctcctctccgccaagcttgcagagccatcttctctgcagtacctgccttacagagactataattactccttggtgatgggagcttgctgtgagaacgtgatcggatatatgcccatccctgttggagtggcaggacctctgtgcctggatggaaaagagtaccaggtgccaatggcaacaacagaaggttgtcttgtggccagcacgaacagaggctgcagagcgatcagtcttggtggaggtgccagcagccgggtccttgcagatgggatgagccgaggcccagtggtgcgtcttcctcgtgcttgtgactcagcagaggtgaagagctggcttgaaacacctgaagggtttgcagtggtaaaggaggccttcgacagcacgagcagatttgcacgtctacagaaacttcacgtgacgctggcaggacgcaacctctacatccgtctccagtccaaaacgggggacgccatggggatgaacatgatttccaagggtacggagaaagcacttctgaagctgcaagagggcgtgccggagctgcagatactggcggtcagtggtaactattgcaccgacaagaaacctgctgccataaactggatcgaagggagaggaaagactgtggtttgtgaagctgtcattccagccaaggtggtgagagaagtattaaagacgactacggaagctatggttgacgtaaacattaacaagaatcttgtgggctctgccatggctggtagcataggaggctacaacctccatgctgccaacatcgtcactgccatctacattgcatgtggccaggatgcagcacagaatgtggggagttcaaactgtattacgttaatggaagcaagtggtcccacaaatgaagacttatacatcagctgtaccatgccgtctatagagatcggaaccgtgggtggtgggaccaaccttctacctcagcaagcctgcctgcagatgctaggtgttcaaggggcgtgcaaagacaatcctggagaaaatgcacggcagcttgcacgaattgtgtgtggcactgtgatggctggtgagttgtccttgatggcagcattggcagcaggacatcttgtcagaagtcacatggttcacaacagatcaaagataaatttacaagatctgcaaggaacatgcaccaagaaggcagcttga

SEQ ID NO: 3078 - DNA, 1386 bp, Rattus norvegicus
  Genbank Accession No. NM_013156
aattccgcggcgacctccggggatccgagtttgcagactacgtgtgtgcgcagctagccacctcaggtgtttgaaccatgacccctttactcctcctggctgtcctctgcttgggaacagccttagccactccaaaatttgatcaaacgtttaatgcacagtggcaccagtggaagtccacacacagaagactgtatggcacgaatgaggaagagtggaggagagcagtgtgggagaagaacatgaggatgatccagctacacaatggggagtacagcaacgggaagcacggctttaccatggagatgaacgccttcggtgacatgaccaatgaggaattcaggcagatagtgaatggctatcgccaccagaagcacaagaagggaaggttatttcaggaacctctgatgctgcagatccccaagactgtggactggagagaaaagggttgtgtgactcctgtgaagaatcagggccagtgtggttcttgctgggcttttagcgcatcgggttgcctagaaggacagatgttccttaagactggcaaactgatctcactgagtgaacagaaccttgtggactgttctcacgatcaaggcaatcagggctgtaatggaggcctgatggattttgctttccagtacattaaggaaaatggaggtctggactcagaggagtcttatccctatgaagcaaaggatggatcttgtaaatacagagctgagtatgctgtggctaacgacacagggtttgtggatatccctcagcaagagaaagccctcatgaagcctgtagcgacggtggggcctatttctgttgccatggatgcaagccatccgtctctccagttctatagttcaggtatctactatgaacccaactgtagcagcaaggacctcgaccatggggttctggtggttggctatggttatgaaggaacagattcaaataaggataaatactggcttgtcaaaaacagctggggtaaagaatggggtatggatggctacatcaaaatagccaaagaccggaacaaccactgcggacttgccaccgcagccagctatcctatcgtgaattgatggacagcgataataaggactgacggacactacatccgaaggagttcatcttaaaactgaccaaacccgtctctgagtgagaccatggtacttgaatcgttcaggatccaagtcacgatttaaattctgttgacatttttacatgggttaaatgttaccactacttaaaactcctgttataaacagctttataatattggacacttaatgcttaattctgattctggaatatttgttttataaaagttgtataaaactttctttaccttttaaaaataaattttagctcagtgcaaaaaaaaaa

SEQ ID NO: 3079 - DNA, 1899 bp, Rattus norvegicus
  Genbank Accession No. NM_013197
gactttgggctcaggatggtggcagcagctatgttgctacggtcctgtccagtgctctctaagggccccacaggcctcctaggcaaagtggctaaaacttaccagttcctatttggtattggacgctgccccatcctggccactcaaggaccaacctgttctcaaatccatcttaaggcaaccaaggctggagcagactctccgtcttggactaagagccattgtcctttcatgctgtcagaactccaagacaggaagagcaagattgtgcagagggcagctccagaagtccaagaggatgtcaagactttcaagacagacctgctgagcttcatggagtcaactacccgaagccaatcagtgcctcgtttccaggatccagagcagactggaggggcacctcccctgctgattcagaataatatgactggaagccaggcttttggttatgaccaattttttagagacaagatcatggaaaagaagcaggaccacacataccgtgtgttcaagactgtgaatcgctgggctaatgcctacccctttgcccaacacttctccgaggcatctatggactcaaaggatgtttctgtctggtgcagtaatgactatttgggcataagcaggcaccctcgtgtcttgcaggccatagaggagaccctgaagaatcatggagctggagctgggggcactcgcaatatctcaggtacaagcaagtttcatgtggagcttgaacaggagctggctgaactacatcataaggactcggctctgctcttctcctcctgttttgtggccaatgattctactctctttacactggccaagcttctgccagggtgtgagatctactcagacgcaggcaatcatgcctccatgatccaaggcattcgtaacagtggtgcagtcaagtttgtcttcagacacaatgacccaggccacctgaagaaacttcttgagaagtccgatcccaagacaccaaaaattgtggcttttgagactgttcactccatggatggtgccatctgtcctctggaggaattgtgtgatgtggcccaccagtacggggccctgaccttcgtggatgaagtccatgccgtaggactatatggaacccggggtgcagggatcggggagcgtgatggaattatgcacaagcttgacatcatctctggaactcttggcaaggcctttggctgtgtcggtggctatatcgccagcactcgggacttggtggacatggtgcgctcctacgctgcaggcttcatctttaccacttcactgcctcccatggtgctctctggagctctagagtctgtgcgtctactcaagggagaggagggtcaagccctgaggcgtgcacaccagcgcaacgtcaaacatatgcgccagctactaatggacaggggctttcctgttatcccctgtcccagccacatcatccccataagggtgggtaatgcggcactcaacagcaagatctgtgatcttctgctcgccaagcacagcatctatgtgcaggccatcaactacccaactgtgcctcgtggtgaggagctgctgcgcttggccccctccccccaccacagccctcagatgatggaaaactttgtggagaagttgctgctggcctggactgaggtggggttgcccctccaagatgtgtctgtggctgcatgcaacttctgccgtcgtcctgtgcactttgagcttatgagcgagtgggagcgatcctactttgggaacatgggaccccaatatgttactacctatgcctaaggagccagctgccttagatgccaaccccacctgcactccccctggggatggtcttcctcctactctctgctttgctgtgtgcttctagctgacttgattctaaaaataaagagcaacctg

SEQ ID NO: 3080 - DNA, 1866 bp, Rattus norvegicus
  Genbank Accession No. NM_016986
agagccaacagagcaggaaggcatcatggcagcagcgctccgcagaggctacaaggtcctgagaagtgtctctcattttgagtgtcgagcacaacacacaaaaccatctctcaagcaggagccgggactagggtttagcttcgagttgacggagcagcagaaagagtttcaaacaattgctcggaagtttgccagagaggaaataatcccggtcgccccagactacgataaaagcggggaatacccgttccctctcatcaagagagcctgggaacttgggttgatcaacacacacattccggagagttgtggtggtcttggcctgggaacttttgatgcgtgtttaattacggaagagttggcatatgggtgtacaggggtgcagactgctattgaagcaaattctttggggcaaatgcctgtgattattgctggaaatgatcaacagaagaagaagtatttggggaggatgacggagcagccgatgatgtgtgcctactgcgtgacagaaccctcagcaggctctgatgtggcgggcattaagaccaaagcagagaagaagggtgatgaatatgtcatcaatggccagaagatgtggataaccaacgggggaaaggccaactggtattttgtattgacgcgatctaacccagatcctaaagtacctgctagtaaagccttcaccggattcatcgtggaggccgacaccccgggaatacacatcggaaaaaaggaactaaacatgggtcagcggtgctctgacaccagaggaatcaccttcgaagatgtcagagtgcctaaggaaaatgtgttaattggtgaaggagcaggtttcaagattgcaatgggggcttttgatagaaccaggccgacggtcgcagctggtgctgtcgggctagcccagagagccctggacgaagctactaagtatgccctggacaggaaaacatttggaaagctgctagtggagcaccaaggagtttcatttctgctcgcagaaatggcgatgaaagttgaactggccagactcagttaccagcgagcagcctgggaggttgactccggccgccggaacacgtactttgcctctattgcgaaggcctttgctggagatattgccaaccagctcgctaccgatgctgtgcagattttcggaggctatggattcaacactgagtacccagtagaaaagctgatgcgggacgccaagatctatcagatttacgaaggtactgcacaaattcagaggctgatcatagctcgtgagcacattgaaaagtataaaaattaacagaaattactatcgaacgatgcttcaccctcatgtaactacgctcagagcactgttgctgcttcagggggaaagggctttacttgtcttcccacagaaatgagataaaagacgcgtgtcacagatctgtgcaatggggtcccacggcggagggtgcctctgttgagttccacagtgaccctttctagataggtttggttttggacagtgagtggtcagtccttggccccgaattgtgttaatttgctccttgatcacttgagatggagaaataccctggagttctaatgctcattcaagtgacaagaaaggtagcctgtcacgaaagaactcaggattctacacagacactgaggaatgtggcggattggacccatcacactgtgaagagagagcatttctgtgctgagctgtttcataattttgattatatttcccttgtattgcagaagagtaaaaaagtttatatgcattttctcccattataaaactaaaaactttctggaaaatcttaattctgaactggcattttatttgtcttgattacaatgattcaataaagctagccttaactt

SEQ ID NO: 3081 - DNA, 4269 bp, Rattus norvegicus
  Genbank Accession No. NM_016987
taagctggtgcttacggacagagagccacactcgggctttctcgaagaggtaaaccaggtccctctgcagccatgtcagccaaggcaatttcagagcagaccggcaaagaactcctttacaagtacatctgtaccacctcagccatccagaaccggttcaagtatgcccgggttactcccgacacagactgggcccatctcctgcaggaccacccctggctgcttagccagagcttggtagtcaagccggaccagctgatcaaacgtcgaggaaagcttggtctagtcggggtcaacctctctctggatggagtcaaatcctggctgaaacctcgactgggacatgaggccaccgtcggcaaggccaaaggcttcctcaagaactttctgattgagcccttcgtcccccacagtcaggcggaggagttctacgtgtgcatctatgctacccgggaaggagactacgtcctgttccaccatgaagggggtgtggatgtgggcgatgtggacaccaaagcccagaagctgcttgtgggtgtggacgagaaactgaacgctgaagacattaagagacacctgttggtccacgcccccgaagacaagaaagaaatcctggccagcttcatctccggcctattcaatttctacgaagatctttacttcacctaccttgagatcaacccccttgtggtgaccaaagatggtgtctacatccttgacctggcggccaaggtggacgccactgctgactacatctgcaaagtcaagtggggtgatatagagttccctcccccctttgggcgtgaggcatacccagaggaagcctacattgcagacctggatgccaaaagtggggcgagcttgaagctgaccttgctgaaccccaaggggcggatctggaccatggttgccgggggtggcgcctctgtcgtgtacagtgataccatctgtgatcttggaggtgtcaacgaactggcgaattacggggagtactctggtgcccccagtgaacaacagacctatgactacgccaagaccatcctctcacttatgactcgagagaagcacccggatggcaagatcctcatcattggaggcagcattgcaaacttcaccaacgtggccgccaccttcaagggcattgtgagagcaattcgagattaccagggttccctgaaggagcacgaggtcaccatctttgttcgaagaggtggcccgaactatcaagagggattacgagtgatgggagaagttgggaagaccactggaatccccatccatgtctttggcacagaaactcacatgacggccattgtgggcatggcctgggcaccggccattcccaaccagccacccacagcggctcacactgccaacttcctccttaatgccagtgggagcacatcgacaccagcacccagcaggacagcgtctttttccgagtccagagctgacgaggtggcccctgcaaagaaagccaagccagccatgccccaagattcagtcccaagtccaagatccctgcaaggaaagagtgccaccctcttcagccgacataccaaggctatcgtatggggcatgcagacccgggctgtgcaaggcatgctggactttgactacgtgtgctcccgagatgagccttcagtggctgctatggtctacccgttcacgggggatcataagcagaagttttactggggacacaaggaaatcctgatccctgtcttcaagaacatggctgacgccatgaaaaagcatccggaggtagacgtgctgatcaactttgcatctctgcgatcggcttatgacagcaccatggagaccatgaactatgcacagatccggaccatagccatcatagcagaaggcatccctgaggctctcacacggaagctcatcaagaaggcagaccagaagggcgtgaccatcattgggccagccacggttgggggcatcaagcctggatgctttaagattgggaatactggtgggatgctggacaacatcctggcctccaaactgtatcgcccaggcagtgtggcctacgtctcgcgttcaggaggcatgtctaacgaactcaataatatcatctctcggaccacagatggtgtctacgagggtgttgccatcggcggggacaggtaccctgggtccacattcatggatcacgtgctgcgttaccaagacactccaggagtcaagatgattgtagttcttggggagatagggggtacagaagaatataagatctgccggggcatcaaggagggccgcctcaccaagccagtggtctgctggtgcatcgggacctgtgccaccatgttctcttctgaggtccagtttggccacgctggggcttgtgccaaccaggcttctgaaacggcagtagccaagaaccaggccttgaaggaagcgggagtgtttgtgccccgaagctttgatgagctcggagaaatcattcagtccgtgtatgaagatcttgtggccaaaggcgccattgtacctgctcaggaagtgccacctccaacagtacccatggactactcttgggccagggagctgggtttaatccgaaaacctgcctcattcatgaccagcatctgtgacgagcgggggcaggaactcatttatgcgggcatgcccatcaccgaggtcttcaaggaagagatgggcattggtggtgtcctgggcctcctctggttccagagaaggttgcccaagtattcctgccagttcattgagatgtgtctcatggtcaccgctgatcacgggccagctgtctccggggcccataacactatcatctgtgctcgggctgggaaggacctggtctccagcctcacctcagggctgctcaccattggggaccggtttgggggtgccttggacgcagcagcgaagatgttcagtaaagcctttgacagcggcattattcccatggagtttgtgaacaagatgaagaaggaggggaaactgatcatgggcatcggccatcgagtcaaatcgataaacaacccagacatgcgagtgcagatcctcaaagactttgtcaaacagcacttccccgccaccccgctgctcgactatgcactggaagtggagaaaatcaccacctcaaagaagccaaatcttatcctgaacgtggatggtttcatcggcgttgcgtttgtggacatgcttaggaactgtggctccttcacccgggaggaagctgacgagtatgttgacattggagccctcaatggcgtctttgtgctgggaaggagtatgggcttcatcgggcactatcttgaccagaagaggctgaagcaagggctgtatcgtcacccctgggacgacatttcctatgttctcccggaacacatgagcatgtaaccgagccagcagccctaccgtagaaaaaggaagacaaaaactccctcctcgacaatatagcggacagacagctggaaacagagcccgttatgggctgggcctggaatggaaatagccattgatgtgcaggcatggaaagccaacaccacaggcccattcagtccacacagagaagcttagtatttttttttatatatatatctatatatatataagcatagaaatttaaaaccaagccaatacttgtgacgtttgcgctgctacctgctgtatctattacatggaagactgtaagcaagcgctgtcagaataatgttcttctagggccttatgatgttgctttctttttttaattagttgaaaatttatttttcctctagaactagtggatccgacttttaagacttcaggatactatctgtttgtaggaccactgtctggtatcccacctcccactcatcttcacaccacatgaagaacactgtattaatctgattttttaggatctttttttttttttttgtgttatgtgttaagggtttatttagtatcccactgaaacgttctgtgtttcggaccaatgtctacttatgtcaaggggaggagggttggggccattgtacccttagccatcgtcacacatgtggagtagtaacttaaatgtaaagttgtaacatacaagtgtttaaaatggaaaccgcaaagcaaaaagctgtgaaacgtctcgtgtcttgtgttctctgtgttcatgcagctgacttgtctgttactgaagtgtgggtccaaagactcacatctgttccgcatctgtaacccacagagattctggcagctgccacctcagtctcttctctgtattatcatgtttggtttaaataaactagatagtaaaaa

SEQ ID NO: 3082 - DNA, 1589 bp, Rattus norvegicus
  Genbank Accession No. NM_017005
ctttccatccacgtacagcagcaccatgaaccgcgcattctgtctcctcgctcgctcgcgtcgcttcccgcgggtcccctccgccggtgctgtattgtcaggggaagcggccaccctcccacggtgtgctccgaacgtcgtgcgaatggcaagccaaaattccttccgtatagaatacgacacctttggtgaactgaaggtcccaaccgataagtattatggtgctcagactgtaagatctacgatgaactttaagattggaggtgcgacggagagaatgccaatcccagtcattaaagcatttggcatcttgaagcgagctgctgctgaagtgaaccaggagtatggtctcgatcccaagattgctagtgcaataatgaaggccgcagatgaggtagctgaaggtaaattaaacgatcactttcctctggtggtatggcagactgggtcaggaacccagacgaacatgaatgtaaatgaagtcattagcaacagggcaatcgaaatgctaggaggtgaacttggcagcaagaagcccgtgcaccccaatgatcacgttaacaaaagccagagctcgaatgacaccttccccacagcaatgcacattgctgctgcactggaagttcaccaggtcctgttgccaggattacagaagctgcacgatgccctcagtgcaaaatccaaagagttcgcgcaggtcataaaaattgggcggactcatacgcaggacgctgtccctcttactcttggacaggagttcagtggttatgttcagcaagtccagtatgcgatggagaggataaaagctgccatgcccagaatctacgagctcgctgctggcggcactgccgtcggcacgggactaaacaccaggatcggcttcgcagaaaaggtggctgcaaaagtcgcagcactcacaggtttgccttttgtcactgccccgaataagtttgaagctctggccgctcatgatgctctggtggagcttagtggagccatgaacactacggcctgcagtctgatgaagattgccaatgacattcgcttcctcggttctggtcctcggtccggtttgggggagctgatcttgcctgaaaatgagccagggagcagcataatgccaggaaaggtgaaccctactcagtgtgaggcgatgaccatggttgcagcccaagtcatggggaatcatgtcgctgttactgttggaggcagcaatggacatttcgaactgaatgtttttaaaccgatgatgattaagaatgtgttgcactcagccaggctactgggagatgcttcagtgtccttcacagagaactgtgtggtagggatccaggccaacacagagaggatcaacaagctaatgaacgagtctttaatgttggttacagctcttaatccgcatatagggtatgacaaagcagcgaagattgccaagactgcacacaagaacggatcaaccttaaagaaaacggctattgaacttggctatctcacagcagagcagtttgatgagtgggtgaaacccaaggacatgctgggtccaaagtgacttaaataaatttatattaaaataaacatgtatgaaattt

SEQ ID NO: 3083 - DNA, 2324 bp, Rattus norvegicus
  Genbank Accession No. NM_017006
gtgaacgtgtttggcagcggcaactaaattcagaaaacatcatggcagagcaggtggctttgagccggacccaggtgtgtgggatcctgagggaagagttgtaccagggtgatgccttccaccaagctgatacacacatatttatcatcatgggtgcatcgggtgacctggccaagaagaagatttatcctaccatctggtggctgttccgggatggccttctacccgaagacaccttcattgtaggctatgcccgctcacgactcacagtggatgacatccgcaaacagagtgagcccttctttaaagtcactccagaagaaagacccaagctagaggagttctttgcccgtaactcctatgtagctggccagtatgatgatccagcctcctacaagcacctcaacagccacatgaatgccctgcaccagggaatgcaggccaaccgtctgttctacctggccttgccccccactgtctatgaagcagtcaccaagaacattcaagagatctgcatgagtcagacaggctggaaccgcatcatagtggagaagcccttcgggagagacctgcagagctccaatcaactgtcgaaccacatctcctctctgtttcgtgaggaccagatctaccgcattgaccactacctgggcaaagagatggtccagaacctcatggtgctgagatttgccaacaggatctttggacccatctggaatcgagacaacattgcttgtgtgatccttacatttaaagagccctttggtactgagggtcgtgggggctattttgatgaatttgggatcatcagggatgtcatgcagaaccacctcctgcagatgttgtgtctagtggccatggaaaagcctgcctctacagattcagatgatgtccgtgatgagaaggtcaaagtgttaaaatgtatctcagaggtggaaactgacaacgtggtccttggccagtatgtggggaaccccagtggagaaggagaagctaccaatgggtacttagatgaccccacagtaccccatgggtctaccactgctacctttgcagcagctgtcctctatgtggagaatgaacggtgggatggagtacccttcatcctgcgctgtggcaaagctctgaatgagcgcaaagctgaagtgagacttcagttccgcgatgtggcaggtgacatcttccaccagcagtgcaagcgtaacgagctggtcatccgtgtgcagcccaatgaggcggtatacaccaagatgatgaccaagaagcctggcatgttcttcaaccctgaggagtctgagctggacctaacctatggcaacagatacaagaatgtgaagctccctgatgcctatgaacgcctcatcctggatgtcttctgtgggagccaaatgcactttgtccgtagtgatgaactcagggaagcctggcgtatcttcacaccattgctgcacaagattgatcgagagaagccccagcccatcccgtatgtctatggcagccgaggtcccacagaggcagatgagctgatgaagagagtgggcttccagtatgagggtacctacaagtgggtgaaccctcacaagctctgagccctggaaacttacaccatctgcactctgcctcttctggccaccctttctgcatctgcccttctcaccatctaaccctctattaggactattgacctcatattggaaagactttgggaccataggccttagctacacattctagtccctgggcttaggccaccattctgtcctatgctgctgccactgccactaccactaagcccagctacattcctcagataccaggcattcaaaacgcattgcaatgctttcaggaccaccactgtccctatctgagccacccatctttccacaagacctgaatcacctcctcccctcaatcccctgcagaaagaacgcctatcagtctgtccctggactccttaagataggagttaggaacaattgggaggagccttgggccttggagggacaatgaccaaaccacacttccctgagactgtgggcaagctcctcaaaacttaaagtgatcaaggacacccatctgagaggacctgcccatagccacactagccttagtgctacttgacattcctcctcaccagctggaagaactctcatgctgcctagcaatattttgggggccatagatatctcctaaacaattccatagtccatagtcagcctcatccaacccatgggcagcctccttaccaaaggaaggtaagagcagcagctagaattttcctaccccaaccctgccattaaatcctcaaaaaaaaaaaaaaaaaa

SEQ ID NO: 3084 - DNA, 650 bp, Rattus norvegicus
  Genbank Accession No. NM_017050
gttttgcaccttcgtttcctgcggcggcttctgtcgtctccttgctttttgctctcccaggttccgaggccgccgcgcgtctcccggggaagcatggcgatgaaggccgtgtgcgtgctgaagggcgacggtccggtgcagggcgtcattcacttcgagcagaaggcaagcggtgaaccagttgtggtgtcaggacagattacaggattaactgaaggcgagcatgggttccatgtccatcaatatggggacaatacacaaggctgtaccactgcaggacctcattttaatcctcactctaagaaacatggcggtccagcggatgaagagaggcatgttggagacctgggcaatgtggctgctggaaaggacggtgtggccaatgtgtccattgaagatcgtgtgatctcactctcaggagagcattccatcattggccgtactatggtggtccacgagaaacaagatgacttgggcaaaggtggaaatgaagaaagtacaaagactggaaatgctggaagccgcttggcttgtggtgtgattgggattgcccaataaacattccctatgtggtctgagtctcagactcatctgctgtcctgctaaactgtagaaaaaaaccaaaccattaaactgtaatcttaacagtt

SEQ ID NO: 3085 - DNA, 1548 bp, Rattus norvegicus
  Genbank Accession No. NM_017068
gtcggtggtcgcccgtgctttcgctttctcagggctgtgagggtgttcgttggaattgtcggtccagtcgtcacttgtcctgagggatcacgatgcgccttcctctctccggttacggctcgaagctcgtcctgctctttctgttcctgggagcagttcggtccgatgcattgaaacttaatttgacagattcaaagggtacttgcctttatgcagaatgggagatgaatttcacaataacatatgaagctctaaaagtcaatgaaactgtaaccattacagtgcctgacaaggtgacatacaatggaagcagttgtggcgatgataagaatggtgccaaaataatgatacaatatggatccactctctcttgggctgtgaatttcaccaaggaagcatctcagtattttattaacaacatcacgctttcttacaacactaatgataccaaaacatttcctggtgctgtacctaaaggaatccttactgttatcattcctgtgggatcccagcttccattgggtgtcatctttaagtgcagtagtgttttaactttcaacctgagtcctgttgttcagcactattggggcattcacctgcaagcttttgtccaaaatggtacagtgagtaaacatgaacaagtgtgtaaggaggacaaaactgctaccactgtagcacccatcattcacaccaccgtgccatcgcctactacgacactcactccaacttcaatacccgttccaactccaacggttggaaactacaccatttctaatggcaatgctacctgtctgctggctaccatggggctgcagctgaacatcaccgaggagaaggtgcctttcatttttaacatcaaccctgccacaaccaacttcaccggcagctgtcagccccaaacagctcaacttaggctgaacaacagccaaattaagtatctcgactttatctttgctgtgaaaaatgaaaaacggttctatctgaaggaagtgaatgtcaacatgtatttggctaatggctcagctttccatgtttcaaataacaaccttagcttctgggatgctcctctgggaagttcttatatgtgcaacaaagagcaggtggtttccgtgtctcgaacatttcagataaatacctttaacctgaaggtgcaaccttttaatgtgacgaaaggagagtattctacagctcaagactgcagtgcagatgaagacaacttccttgtgcccatagcggtgggagcagccctgggaggagtacttattctagtgttgctggcttattttattggtctcaagcgccatcatactggatatgagcaattttagcacctacaatctgattgaatatattacaaaatacatacaaataacaaagttgtcttacctgtcagtttatgaaacactttgctacttaagacagactccttggaacttttatttggaaatcagtccccacaatttgagataaggctttttttgaaaaaaaacaaaaaacaacaaaaaaacaaaaaacaaaaaaatcattctctgatctgcttaaaatgca

SEQ ID NO: 3086 - DNA, 1715 bp, Rattus norvegicus
  Genbank Accession No. NM_017075
gacaagcttttccggtctccatggctgccctggcggttctacacggcgtcgtccgcaggcctctgctccgcgggctgctgcaggaagtaagatgcctgggacgaagttatgcatccaaacccactttgaatgatgtggttatagtgagtgctacacgaactcccattggatccttcctgggcagccttgcctctcagccagccaccaagcttggtactattgcaattcagggagccattgaaaaggcagggattccaaaagaagaagtgaaggaggtctacatgggcaacgtcatccaagggggagaaggacaggccccgaccaggcaagctacactgggtgcaggtctacccattgccactccgtgcaccacagtaaacaaggtgtgtgcctcaggaatgaaagccatcatgatggcctctcaaagtcttatgtgtggacaccaggatgtgatggtggcaggcggaatggagaccatgtcaaatgtcccgtacgtaatgagcagaggagcaacaccatacggtggggtaaaacttgaagacctgattgtgaaagacgggctaaccgatgtctacaataaaattcatatgggcaattgtgctgagaacaccgcgaagaagctgagtatctcgcgggaggagcaggataagtacgccatcggctcttacacccgaagtaaagaggcgtgggatgcagggaagtttgcaaatgagattacgcccatcaccatctcagtgaaaggtaaaccagacgtggtggtgaaggaagatgaagagtacaagcgagttgacttcagtaaagtgccaaagctcaagacagtgttccagaaagaaaacggcacagtaacagctgctaacgccagcacactgaacgacggagcagctgctgtggttctcatgactgcagaggcagcccagcggctcaaggttaagccactggcacgaatcgcagcatttgctgatgctgctgtagaccccattgatttcccactcgcacctgcatatgctgtacctaaggttcttaaatatgcaggactgaaaaaagaagacattgccatgtgggaagtaaatgaagcattcagtgtggttgtactagccaacattaaaatgctggagattgaccctcaaaaagtaaatgtccatggaggagctgtttctctgggccatccaatcgggatgtctggagctcggattgttgttcacttggctcatgccttgaagcaaggagaattcggtctggctagtatttgcaatggaggaggaggggcttccgccgtgctgattgagaagctgtagacatcttgttttaggagacagttccacgtgacccgctgaagtgaactaccccttgggccagattatattcaggataagctatttcattttttattattttctactaaaaatttttaaaaatcacatccaaaaacccattgaaattgcaaataaaaatttctcctcctttaatattttgtaaacagtcggatactctactattgaaatatactgtaggtactagaggcatggctcagccgttaagagcacttgttgctacctgtgtggtgcatggctttaatcccagcacttggagacagaggcaagtgcatctttctgagttaaagttagcctggtccacagagctagtgccctgacagccaagactacacagagtagtagaaactctgggggaaaaaaaaaaaacaaataaaaaaaaaa

SEQ ID NO: 3087 - DNA, 2171 bp, Rattus norvegicus
  Genbank Accession No. NM_017076
ccttgccgctcgctgctagcttggatccgcgtggactacagggactgaatcggacccggaaccacatggccccactcgccggtgcctctcgctcccgggtgtggtcagcggggctactgaggctgctgctgctgtcctgctttacgctccagaaagcgggtggggagatagctgtgcaggtgctctccaattcgaccggcttcttgggagggtctacagtcttgcactgtagtctggcttccaaagacaatgtgacaatcactcagctaacatggatgaagagggatccagatggatcccacccttccgtgcctgtcttccaccccaagaaggggcccagcatctctgatccagagagggtgaagttcttggttgccaaggtgtacgaggatctgaggaacgcatctctggccatctcgaacttgcgtgtagaagacgaaggcatctatgagtgtcagattgccacgttccccacaggcagtaagagcgccaatgtctggctgaaggtgttcgcccgacctaaaaacacagcagaggccctggagccctctcccaccttgatgccgcaggacgtggccaaatgcatctctgctgatggtcaccctcctggacgaatcacgtggtcctcgaatgtgaatggaagctaccgtgaaatgaaggaaacagggtcccagccgggcaccaccacagttatcagctacctctccatggtgccttctagccaggcagatggcacgaacatcacctgcacagtggaacatgaaagcttccaggagccggaccagcagccattgatcctttccctaccttatccacccgaagtgtccatctctggctatgaaggcaactggtacattggcctcactaacgtgaacctgacctgtgaagctcgcagcaaaccaccgcccaccaactatagctggagcacggccacgggtccccttcccaactccactcatttccaggaaaacggcagtcacctgctaatctccaccgtggatgacctcaataacacgatctttgtgtgcaaagccatcaatgccctagggtctgggcagggccaagtgaccatcctagttaaagaggcatctgagattctgccgccaaagacaagcttaggcactggctacatcattgccatcgtcttttgtgtcctgatcatcggagtagtagcaggcattgtattctggaaatacaggcgtggttgtggtcggcagtccaggaccttagacagggagaacgtccgctattcagcagcgaatggcgtctctgtcccaaacgtggagacgaacaacttgaggtgatggtgctggggtagacagaactaaggaacttgaagacataacaactggaaccctacttccacaaaagaaaaagcctccagagagacttgactgtccagtgtggcgaacatagcaaggttgggggtctccttggccgctgccgaattccgcattgtcgaaaggactcatggaacccggtgtgctgactcacacttgacatctcagcaagcgagggccacataaagcaaggttgagtctagcacggctgtagagagaagccctgtctatacacaggcaagctaaggggctttgagacagtcagaaactgaagtctttctttgggtaaggtaaatcctctacctcgtgtatgtgacaaacttgaaagacttctacctctgagactcaagtgcggactctctttatagctgactcagctggggctaacccctctctcctctctggacaaggtctcagagtgtagccaaagctagaccgaaactcacagaggtccgtctgtctctacctcccaagtgctgcagttaaaggtttgtgtgtgccacactcctttgctaggtctttttaataaagtaaatatttaataaagtaatatatttataaaaaaactagttataatatatattttttgagacagtgtttcctgtagcccaggctgacctcaaacttactatgtagccaagaatgatagtaaactaatttattttaatttgtcttcaagcttaaacatagcccaacccctgctcctttccctctcttctctcaatccattttcgtcttctttttcttcccagacactattctgatgtatgtcttcattgcaaacattttattgaccttcgtaaaaatgtgtgaaccacagataaaaaaaag

SEQ ID NO: 3088 - DNA, 860 bp, Rattus norvegicus
  Genbank Accession No. NM_017125
ggctgctgagccgcggtaggagagcatcaagaagcgtcggggagcgcaggcccagcagccatggcggtggaaggaggaatgaagtgtgtcaagtttttgctctacgttctcctactggccttttgcgcctgcgcagtgggattgattgccattggcgtagcagttcaggttgtcttgaagcaggccattacccacgagactactgctggctcgctgttgcctgtggtcatcattgcagtgggtgccttcctcttcctggtggcctttgtgggctgctgtggggcctgcaaagagaactactgtctcatgattacatttgccatcttcctgtctcttatcatgctcgtggaggtggcggtggccattgctggctatgtgtttagagaccaggtgaagtcagagtttagtaagagcttccagaagcagatgcagaattaccttacagacaacaaaacggccaccattttggacaaattgcagaaggaaaataaatgctgtggagcctctaactacacagactgggagcgcatccccggtatggccaaggacagggtccccgattcttgctgcatcaacatcactgtgggctgtggaaacgatttcaaggaatccaccatccatacccagggctgcgtggaaactatagcggcatggctgaggaagaacgtactgctggtggctggagcagccctgggcattgcttttgtggaggtcctgggcattatcttctcctgctgtctggtgaagagtatccggagtggctacgaagtaatgtagggtgggggcgtgtctgagctcgtctgtcttttcatggagtggactctccaggttttcaattaaacggattattttttcagacc

SEQ ID NO: 3089 - DNA, 838 bp, Rattus norvegicus
  Genbank Accession No. NM_017126
gggacccaggggacccttggcactgcgcaggaccccgcgggacccggaaccttccgacagggttatggcggccgctccgggcgcccgactcctgcgcgctgcctgcgcctccgtcgcttttcgtggtctggactgccgtcggctgctggtctgcgggacccgtgcgggacctgccgtccctcagtggaccccgagcccccacacgcttgcagaggccggacctggccggccactgagcgtgtctgcgcgcgcgcggagtagctcagaagataaggtaacagtccacttcaagaaccgagatggtgaaacgctaacgaccaaggggaaagttggtgactctctgctagatgttgtgattgagaataacctagatatcgatggatttggtgcgtgtgaggggactttggcttgctctacctgtcatcttatctttgaggaccatatatatgagaagttagatgccattactgatgaagagaacgacatgcttgacctggcttttggactaacaaacaggtcacggctgggctgtcaagtttgtctgaccaaggctatggacaatatgactgtccgtgtgcctgaagcagtggcagatgtccgacagtctgttgacatgagcaagaattcctaagctacaataaaaagaatattttcattaaatttttacctatttttataattatttcttagcataattgattatatggccaaaatatgtagctgtgctgtcttagttcagttttgtagtactgaaaatttgcagtttttattttgattaaattattaaaatatcagtctattagaagacagctgatacaataaactccttatgtatttt

SEQ ID NO: 3090 - DNA, 1386 bp, Rattus norvegicus
  Genbank Accession No. NM_017134
ctcagctgcaggaaccctggatgagcatgagctccaagccaaagcccatagagattatcggagcgcctttctctaagggacagcctcgaggaggggtagagaaaggtcccgcagcattaaggaaagctggcctggtggagaagcttaaagaaacagagtacaatgtgagagaccacggggatctggcctttgtggatgtccccaatgacagcccctttcaaattgtgaagaacccacggtctgtgggaaaagccaatgaacagctggctgctgtggtagcagagacccagaagaatggaacaatcagtgtggtgctgggtggagaccacagtatggcaattggaagcatctctggccacgccagggtccaccctgacctatgcgtcatttgggtggatgctcacactgacatcaacactccgctgacaaccagctctgggaatctgcacgggcaaccggtggcctttctcctgaaggaactgaaaggaaagttcccagatgtaccaggattctcctgggtgaccccctgcatatctgccaaggacatcgtgtacatcggcttgcgagatgtggaccctggggaacactatataataaaaactctgggcattaagtatttctcaatgactgaagtggacaagctgggaattggcaaagtgatggaagagaccttcagctacctgctgggaaggaagaaaaggcccattcacctgagttttgatgttgatggactggacccagtattcaccccggctacgggcacacccgttgtgggaggcctatcttacagagaaggtctctacatcacagaagaaatttacaagacagggctactttcaggactagatatcatggaagtgaacccaactcttgggaagacaccagaggaggtgactcgtactgtgaacacggcagtgccgttgaccttgtcttgttttggaacgaaacgggaaggtaatcataagccagagactgactaccttaaaccaccgaaataaatgtgaatacatcgcataaaagtcatctggggcatcacagcaaaccgaacagaaccaggccaacgctgctcctcccaagggcttgttcttttagaaaaaagaatgttttttcccaatatgtatgtattctagcagttcctttctggaatgaaattcagggtgtgggaattaaaacagctatgaaattaggagacacgtacttcccattttagcagaagttatccttaagaagtagtataaattaatatctaattaaaaaatgcaccaggagttaaaatacacagtgatgtcaagtgtcaactcacggttggaagcaaaggcatctggagacgaggcctgcatccacgtcgttcaaaacatgtgatttttgtaataaactctttataat

SEQ ID NO: 3091 - DNA, 1018 bp, Rattus norvegicus
  Genbank Accession No. NM_017138
gctggaacgggtccgtacggcgttgttcttggttcccatcgtaacttaaaagggaaacttacacaatgtccggaggccttgacgtcctgcagatgaaggaggaggatgtcctcaaattccttgctgcaggaacccacttaggtggcaccaaccttgactttcagatggagcagtacatctacaaaaggaaaagtgacggtatctacatcatcaacctgaagaggacttgggagaagctgttgttagccgctcgagctattgttgccattgagaaccctgctgatgtcagcgtcatctcctccaggaacactggccagcgagctgtgctgaagtttgccgctgccacaggagccactccaattgctggccgcttcacacctgggaccttcactaaccagatccaagcagccttcagggagccccggcttctagtggtgactgatccccgggctgaccaccagcccctcacagaggcctcttacgtcaacctgcccaccattgctctttgtaacacagattctcccctgcgctatgtggacattgccatcccatgcaacaacaagggagctcactcagtgggtctcatgtggtggatgctggccagggaagtactccgcatgcgaggaaccatctcccgggagcacccatgggaggttatgcctgatctttacttctacagggacccagaggagattgagaaggaggagcaggctgccgctgagaaggctgtgaccaaggaggaattccagggtgaatggacggcaccagcgcctgagttcactgctgctcagcctgaggtggccgactggtctgagggtgtgcaggtgccctctgtgcccattcagcagttccccacagaagactggagtgcacagccggccactgaggactggtcagcagctcccacagcacaggctactgagtgggttggagccaccactgagtggtcctgagctcctctgcaggtgcctgagcgaagggaaaaaaggtggaaggaaaataaagttcctgaaagctg

SEQ ID NO: 3092 - DNA, 630 bp, Rattus norvegicus
  Genbank Accession No. NM_017150
tcttccggtcccaggcgctcggggagccgcggcttaccgtgcagacatggccaagtccaagaaccacaccacacacaaccagtcccgcaaatggcacagaaatggcatcaagaaaccccggtcacaaagatacgaatctcttaaaggggtcgaccccaagtttctgaggaacatgcgctttgccaagaagcacaacaagaaaggcctgaagaagatgcaggccaacaatgccaaggcagtgagtgcacgagcagaggccatcaaggccctcgtgaagcctcaggctgtcaagcccaagatgccaaagggctccagccgcaaactcagccgtctggctttcatcgctcaccccaagcttgggaagaagattcgaagctacatggccaagggtcgtaggctctgccaaccaaagcccaaggttcaaaccaaggcagaggccaaagctccagctaaggcccaggccaaagctccagcccaggctcccaagggtgcccaggcccctgtgaaggccccatagaacaggctcctgccagtgtgaagacagacagactgctgtgacacacccacctacacactatctgcagatgaccagtgtcctatgctgtttttacaaataaacttgagacaaga

SEQ ID NO: 3093 - DNA, 1731 bp, Rattus norvegicus
  Genbank Accession No. NM_017158
ggcatcagtaaggagggtctccatggatctggtcactttcctggtacttactctctcctctctcattctcctctcactctggagacagagctctaggagaaggaagctccctcctggccccactcctctcccaataattggtaatttcctccagatagatgtgaagaacatcagccaatccttaaccaagttttcaaaaacctatggccctgtgttcactctgtatttgggctcacagcccactgtcatattgcatggatatgaagcaataaaggaagctctgattgataacggggagaagttttctggtagaggaagctatccaatgaatgaaaatgttactaaaggttttggcattgtttttagcaatggaaacagatggaaagagatgagacgattcacaatcatgaactttcggaatttgggaattggaaaaaggaacattgaggaccgtgttcaagaggaagcacagtgcctagtggaagaactgaggaaaacaaaaggctcaccctgtgacccctccttgatcctgaactgtgctccatgcaatgtcatctgctccattactttccagaatcattttgattataaagataaggaaatgcttacgttcatggaaaaagtgaatgagaatctcaagattatgagctccccatggatgcaggtctgcaatagttttccttcactcattgactattttcctggaactcatcacaaaatagcaaaaaatattaattatatgaaaagctatttgttgaagaaaatagaagaacaccaggaatcattggatgttacaaaccctcgtgattttgttgattattacctgattaaacaaaaacaggcaaacaacatcgaacaatcagaatattcacatgaaaatctgacatgcagtatcatggatctcattggtgcagggacagagacaatgagcacaacattgagatatgctctcctgcttctgatgaagtacccacatgtcacagctaaagtccaggaagagattgaccgtgtgattggcagacatcgcagcccctgcatgcaggatagaaaacacatgccctacactgatgccatgattcatgaggtacagagattcattaactttgtcccgaccaacctgccccatgcagtgacctgtgacattaaattcaggaactacctcatcccgaagggaacaaaagtgttaacatcactgacatcagtgctgcatgacagcaaggagttccccaacccagagatgtttgaccctggccactttctagatgagaatggaaactttaagaaaagtgactactttttgcctttctcagcaggaaaacgagcttgtgttggagagggcctggcccgcatgcagttgtttctattcttgacaaccattttacagaactttaacctgaaatctctggttcacccaaaggacattgatacgatgccagttctgaatggttttgcctctctgccacccacttaccagctctgcttcattccttcctgaatagatcaggcattttggcttctactgtgttgccttctgcaatccccttcaggtttttatccagtcccttccctctatcatccatcctgactcttgtcttaagatccagaaagcacatgcagtttctggagttatagcacaaatccacttgtattatctctttcatataacaatttatgatcccttgtgtcattgtgtatccattcctgagttaaaataaagcttcactataaaat

SEQ ID NO: 3094 - DNA, 1679 bp, Rattus norvegicus
  Genbank Accession No. NM_017177
gactgataggcgtgtcgggcgggaccagagcgcgccccactcagcgaaagctgccgtccctctttgccttgagcgccgcagccctgagaatcgcatctggcttggaaacagtcctaagactggagtctcgaagaaagccggagacagtcgcgaagaacggaggacgcccagagactcttcggcttcccggaagtggaaccgagcatacccggaaggagctaatcccacctgaagattgctgagcacccgcaggcgttaagcctaacggagtccacgtcatggcggcggatgggacaggtgtagtcggaggaggggctgtcggcggccccctgtccaaggacggtttgctggatgctaagtgcccagaaccaatccccaatcggcggcgctcttcctcgctgtcccgtgacgcgcagcgccgagcctatcagtggtgccgggagtacctgggcggagcctggcgcagagcgcggccggaggagctgagcgtttgccccgtgagcggaggcctcagcaacctgctcttccgatgctcgctaccgaaccacgtgcccagtatgggcggggagccccgggaggtgctgctacggctgtacggggctatcttgcagggtgtagactccttggtattagaaagcgtgatgttcgccattcttgcagagagatctctagggccccaactttatggagtgtttccagagggccgcttggaacagtacctcccaagccggccattgaaaactcaagagctccgggacccagtgttgtcaggagccattgcaacaaagatggcccgtttccatggtatggagatgcccttcaccaaggagccccgctggttgtttgggaccatggagcggtacctaaagcagatccaggacctgccgtccactagccttccccagatgaacctggtggagatgtacagcctcaaggatgagatgaatcacctcaggacgttgctagacgctacaccgtccccagtggtcttctgccacaatgacatccaggaaggaaacatcttactgctctcagagccagacagtgatgacaacctcatgttggttgatttcgagtacagtagttacaactacaggggctttgacattgggaatcatttctgtgagtgggtttacgattacacttacgaggagtggcctttctacaaagcaagacctgcagactaccccactagagaacagcagctccttttcatccgtcattatctggcggaggttcagaaaggtgaggtcctctccgaagaggagcagaagaaacaggaagaagatttgctgatagagatcagccggtatgccctggcctctcatttcttctggggcctatggtccaccctccaggcttccatgtccactatagagtttggctacttggaatacgcccaatctcggttccagttctacttccagcagaaggggcagctgaccagcttcctatcaccttgaggatccaacccccacctcagatttctcctggagcctccggggcaggccctcggagggaggggcaaagagcagaagcccccagagcttgggctgtgcctctaagtgagactgtcgttgaagtagctgacctccgtactcctttcttagtacttgcccaaggggggcatctgacagcccctggggctgtgcacctaaataaatgaacttcacaaatac

SEQ ID NO: 3095 - DNA, 1386 bp, Rattus norvegicus
  Genbank Accession No. NM_017181
ctgctgcccagtgctcttcagcatgtcctttattccggtggccgaggactccgactttcccatccaaaacctgccctatggcgttttctccactcaaagcaacccaaagccacggattggtgtggccatcggtgaccagatcttggacctgagtgtcattaaacacctctttaccggacctgtcctctccaaacatcagcatgtcttcgatgagacaactctcaatagctttatgggcctcggccaagcggcatggaaggaggcaagagcatctttacagaacttactgtctgccagccaagcccagctcagagatgacaaggagcttcggcagcgtgcattcacctcccaggcttctgccacgatgcaccttcctgctaccataggagactacacggacttctactcctctctgcagcatgccactaacgttggcattatgttcaggggcaaggagaatgcgctgttgcccaattggctccacttacctgtgggataccatggccgagcttcctccgttgtggtgtctggtaccccaattcgaagacccatgggacagatgagacctgataactcaaagcctcctgtgtacggtgccagcaaacgcttagacatggagttggaaatggctttctttgtaggccctgggaacagattcggcgagccaatccccatttccaaggcccaggagcacattttcgggatggtcctcatgaacgactggagtgctcgagacatccagcaatgggagtacgtcccccttgggccattcctggggaaaagttttggaaccaccatctccccatgggtggtgcccatggatgctctcatgccctttgtggtgccaaacccaaagcaggaccctaagcccctgccatatctctgccacagccagccctacacatttgatatcaacctgtccgttgctttgaaaggagaaggaatgagccaggcagctaccatctgcaggtccaactttaagcacatgtactggaccattctgcagcaactgacacaccactctgttaatggatgcaatctgagacctggggacctcttggcttctggaaccatcagtggatcagaccctgaaagctttggctccatgctggaactgtcctggaagggaacaaaggctatcgatgtggggcaggggcaaaccaggacctttcttctggacggagatgaagtcatcataacaggtcactgccagggggatggctaccgtgttggttttggccaatgtgctgggaaagtgctgcctgccctctcgccagcctgaagctccagaatccacagaacacagccttgccttgtgaggatcatactgcaactgcatgagtcaggaatgaataaagctattttgattggggaaaaaaaaaaaaa

SEQ ID NO: 3096 - DNA, 1072 bp, Rattus norvegicus
  Genbank Accession No. NM_017187
ggcacgagggaaggaagtctctctgtggaggtctgagggaagagctcgcgccaggtagacgctgcgccgtcatcatgggcaagggggaccccaacaagccgcggggcaagatgtcctcgtacgccttcttcgtgcagacctgccgggaggagcacaagaagaagcatcccgactcgtcggtcaacttcgccgagttctcgaagaaatgttcggagagatggaagaccatgtctgccaaggaaaagtcgaagtttgaggatttggccaagagcgacaaagctcgttatgacagggagatgaagaactatgttcctcccaaaggtgataagaaaggaaagaaaaaagatccaaatgctcccaagagaccaccgtctgccttcttcctgttttgctctgaacatcgcccaaagatcaaaagtgaacaccccggcctgtctattggagatactgcaaagaaactgggggagatgtggtctgagcaatctgccaaagataaacaaccgtatgagcagaaagcagctaaactaaaggagaagtatgaaaaggatattgctgcataccgtgccaagggcaaaagtgaagtaggaaagaagggtcctggtaggccaacaggctcaaagaagaagaatgaaccagaagatgaggaagaggaggaggaggaagaagatgatgaagatgaagaggaggaagatgaggatgaagaataagtatctgtcctaaagtgtggagtatatgtgctcaggcaattattttgctaagaatgtgaaattcaagtgcagctcaacattagcttcagtataaaaactgtacagatttttgtatagctgatgagattctttgtagagaaaatactttttaaaaagggtttgtagctttttcaggggctacaacgtacagttagatttaaagcttttgatgttgaatgtttctaaatatttaatggtttctttaatttcttatgatagcaaaaaaaaaaacttcataggaatttctattaccagtaaaagaattttttttttaggatgttgcatttttgtttttttttaaaatttgtaataaaataatgtatatt

SEQ ID NO: 3097 - DNA, 2029 bp, Rattus norvegicus
  Genbank Accession No. NM_017201
ctcactctagcggacttcgccagcatggctgataaactgccctacaaagtcgcggacattggactggctgcctggggacggaaggccctggacatagctgagaacgagatgccaggtttgatgcgcatgcgggagatgtactcagcctccaagccactgaagggcgctcgcattgctggctgcctgcacatgactgtggagactgctgtcctcattgagactctcgtggccctgggtgctgaggtgcggtggtccagctgcaacatcttctccactcaggaccatgcagcggctgccattgccaaggctggcattccagtgtttgcctggaagggagagacggatgaagagtacctgtggtgcattgagcagacgttgcacttcaaggacggacccctcaacatgattctggatgatggcggtgaccttactaacctcatccacaccaaacacccacagcttctgtcaggcatccgaggtatctctgaggagaccacgactggcgtccacaacctctacaagatgatggccaatgggatactgaaggtgcctgccatcaacgtcaacgattctgtcaccaagagcaagtttgacaacctctatggctgccgggagtccctcatagatggcatcaaacgggcaacagatgtgatgattgcgggcaaggtggcagtggtagcaggctatggtgatgtgggcaagggttgtgcccaggccctgcggggtttcggggcccgagtcatcatcaccgagattgaccccatcaatgcactgcaagctgccatggagggctacgaggtaaccaccatggacgaggcctgtaaggagggcaacatctttgtgaccaccacgggctgtgttgatatcatccttggtcggcactttgaacagatgaaggatgatgccattgtctgtaacattggacacttcgacgtggagattgatgtgaagtggctcaatgagaacgctgtggagaaggtgaacatcaagccccaggtggaccgctacttgctaaagaatgggcaccgcatcatcttgctggctgagggccgtctggtcaacctgggttgtgccatgggccaccccagcttcgtgatgagcaactccttcacaaaccaggtgatggcacagattgagctgtggacccacccagacaaataccccgtgggggttcacttcctgcctaagaagctggatgaggcagtggctgaagcccacctgggcaagctgaacgtcaagctgaccaagctgactgagaagcaggctcagtacctgggcatgcccattaacggccccttcaagcctgatcactaccgctactgagagctgggactgcccttcaccttccagctgccatccttgttccaggccctacctctcgttcccaagagcaaatgtcaccaactttgcagttacttctccggtgttctgctccctcccccggccctcatccacactgtgactggtctttctgtctttggcttctgctgtacccctcatactgttccctatgtggcatagagaacagagaggtacctgggaggcatccacaggggatctgagctcttggaaggtctgaggctggatgttgctggtggtcacaagcccatgcaccttactatccaaactctcgcttggtctttagatccgtgtgcttggtttacagaccaatggtttctcggcccaggacccaagaaggagctctaccatgggggaaggaaccactggagtttgaaggctcctgagagcttggcctttttactgttgggctgtctcttaaacctcctaatactgagttggctacttttggtccctatttcacaagggttaggacagattaaccaagaaaggacaagtgacagagactgaaaggggctggaaaaacaaatagggaaaggcctgtcacctacggtataattgatggttcctatcacaagcctggatcacaaacagattaatttgttctatgtttatatactgtttagaatgttaacacaggaaggtggataaaatacagtttctagtgcct

SEQ ID NO: 3098 - DNA, 696 bp, Rattus norvegicus
  Genbank Accession No. NM_017202
gctcttccggtgcgggacccgctcttccggtcgcgagcacccggggtgtagagggcggtcgcggcggtcgcctgggcagcagtggcagaatgttggctaccagggcacttagcctaattggcaagagagccatttctacttcggtgtgccttcgggcacatgggagtgttgtgaagagtgaagactatgctctcccatcttatgttgatcggcgtgactaccccttgcctgatgtggcccacgtcaagctgctgtctgccagccagaaggccctgaaggagaaggagaaggccgactggagcagcctttccagggatgagaaagtccaattgtaccgcatccagtttaacgagagcttcgctgagatgaacaagggcaccaatgagtggaagacagtggtgggcctggccatgttcttcatcggcttcactgcgcttgtgctgatctgggagaagagctacgtgtatggccccatccctcatacctttgatcgtgactgggtggccatgcagaccaagcggatgctggacatgaaggtcaaccccattcagggcttctccgccaagtgggactacaacaagaatgaatggaagaagtgagagcctgctgctgtgggctcctccctccctccctccctcagcatgctggaagctgctgtgtccaatggtccatgttaataaatgaccagtttacgtg

SEQ ID NO: 3099 - DNA, 2622 bp, Rattus norvegicus
  Genbank Accession No. NM_017208
cacctctgcgtattcacggaatggggaaatgccaagagccttccagtacgatttggtgtccagttctaccctgtacaccccttccgtgaacttctcatctgtggtgagcccgtgcagctctccagactcggcggtcttcccagaggcaaacggctcccagcttccgtctgcagtctttttgaacactttcacggtcacagtcctcactcacccacggagcatccaggatgaagtctgcgactgggcctctgcttcctacattgctggggctactgctcctgtctataccaaggactcagggtgtcaaccccgccatggtggtcaggatcaccgacaagggcctggagtacgcggccaaggaggggctgttgagtctgcagagagagctgtacaagatcacactgcctgacttcagcggggacttcaagatcaaggctgtgggccgtggacagtacgagtttcatagcctggagatccagagctgtcagctgcgtggctcgtccctgaagccgctcccaggccgaggcctgagtctctccatctctgactcttcgatcagcgtccggggcaaatggaaagtgcgcagatccttcgtgaaacttcacggctcctttgacctggatgtcaaaagtgtcactatttcagtggacctcctcctgggcgtggatccctcagaacggcccacagtcaccgcctctggatgcagcaaccgcattcgtgatttggaattgcacgtatcaggaaatgtggggtggctgctgaatcttttccacaaccagatcgagtccaagctccagaaagtattggaaagtaagatttgtgagatgatccagaagtctgtgacctctgatctgcagccttatctccaaactctgccagtcacagcggatatcgacactatcctgggcattgactacagtttggtggcggctccccaagcaaaggcccagacgctggatgtgatgtttaagggtgaaatttttaatcggaatcaccgctccccagtcactacccccaccccgaccatgagcctacctgaggacagtaaacaaatggtctactttgccatctcagatcaggccttcaacatagccacccgggtttaccaccaggccgggtacctgaactttaccatcacagatgacatgttaccgcctgactccaacatccggctgaacaccaaggccttccgccccttcactcctctgataaccagaaagtaccccgacatgaacttggagcttcttggaacagtggtctctgccccacttctgaatgtcagtcctgggaatctgtccttggccccacagatggagattgaaggctttgtgatcctgcccagctccgcccgcgaatctgtcttccggcttggcgtggtcacgaatgtattcgtctcattaacttttgacaacagcaaggtcaccgggatgctgcatccagagaaggcgcaagtgagactgatcgaatccaaagtcggcatgttcaatgtgaacctgttccaggcattcctcaactactaccttctcaacagcctctaccctgatgtcaacgatgagctggccaagggcttccccctccctctaccaaggcgtattaagctccacgacctcgacttccagatccacaagaacttcctatacttgggtgccaatgtccagtacatgagagtctgaggacaagaagaaagatgggcctcagaggccacagcgggacctgccatttgtaattccagatgcgtagcacatctccagagagtctcaaaatacaaagaagtttctgttcctggctctggtggatcctgtccccacagtcctcttcgccaggtgcaccctcagcctggacttgactctgacctctccagggagaagccctcccctcaccaacctctccagggagagcccctccccccaccaacctctccagggagacccctctcccaccactgacctggaatcacttaaagagcaggcactgtggttttgagtgcaccttctcaccttcatgtctgacggagtgctggcacttagtaggtcctcaataaatatttatagaatgacatgacagcccagctgaacctctttattgctagaccatctggtctgagccagccttagatgctctgtcagagctgttatctccaaggctagaccaccttttcactcttgttggcctctgctatgagggcctcaacaagggagtgaatgactacacacacacacacacacacacgcgcacacacacacacacgcacgcacgcacgcacgcacacgcatgcacatgcatacactcacgcacgtgcacgcacacaccactcccttcaccagcacgtgtctaggcttctagccttattcccacagatacctcctccttgcctcctgcttgctgcagacaacagacccagaaggaaagcaaaattgtagccccccgaggctgtccccatggaggtctgtgcaagtgagaaagagatggagccaaggaaggttttggttggacccaaatcaaacgctcatcggactgttgttcacgagccacatgcctgcgaggagagaccatgatttctaactaccgaacaataagcctttgatcagacttaataaagagtcatttccgtgttatgtaaaa

SEQ ID NO: 3100 - DNA, 1696 bp, Rattus norvegicus
  Genbank Accession No. NM_017248
cgctgaacgctctcatcatcctaccgtcatgtctaagtcagagtcccccaaggaaccggaacagctgcggaagctcttcattggagggctgagcttcgaaacaaccgacgagagtctgaggagccattttgagcaatggggaacactcaccgactgtgtggtaatgagagatccaaacaccaaaagatccagaggctttgggtttgtcacatatgccactgtggaggaagtggatgctgccatgaatgcaagaccacacaaagtggatggaagagttgtggaacctaagagagctgtgtcaagagaagattctcagagaccaggtgcccacttaactgtgaagaagatctttgttggcggtattaaagaagacactgaagaacatcacctacgagattattttgagcagtatgggaaaattgaagtgattgaaattatgactgacagaggcagtggaaaaaagaggggatttgcgtttgtcacctttgatgaccatgactctgtggataagattgttattcagaaataccatactgtgaatggccacaactgtgaagtaagaaaggctctgtgcaaacaagagatggctagtgcttcatccagccagagaggtcgaagtggttccggaaactttggtggtggtcgtggaggtggtttcggtggcaatgacaattttggtcgaggagggaacttcagtggtcgtggtggctttggtggcagccgtggtggtggtggatatggtggcagtggggatggctataatggatttggcaatgatggaagcaattttggaggtggtggaagctacaatgattttggcaattacaacaaccagtcatcaaattttggaccgatgaaaggaggaaactttggaggcaggagctctggcccttatggtggtggaggccagtactttgctaaaccacgaaaccaaggtggctatggaggttccagcagcagcagtagctatggcagtggcaggaggttctaattacagccaggaaacaaagcttagcaggagagccagagaagtgacagggaagctacaggttacaacagatttgtgaactcagccaagcacagtggtggcagggcctagctgctacaaagaagacatgttttagacaatactcatgtgtgtgggcaaaaactccaggactgtatctgtgactaattgtataacaggttattttagtttctgttctgtggaaagtgtaaagcattccaacgaagggttttactgtagacctttttcacccatgctgttgattgctaaatgtaaaagtctgatcatgacgctgaataaatgtgtcttttttttttttttttaatgtgctgtgtaaagttagtctactctgaagccatcttggtaaacttccccaacagtgtgaagttagaattccttcagggtggtgccaaattccatttggaatttatttatggttgcttgggtggagaagccattgtcttcaaaaaccttggtgttgctaaactgccagttactgttgtaacttaatgagtttcaccatttaaagggtcatccaagcaagatcacaatttggttataaaatggttgttggacacctatgaagagaaaattgaataacggtctcagataaaataagagatgggaatgaagcttgtgtatcatccattatcatgtgtactcaataaacgatttaattctcttgaatgg

SEQ ID NO: 3101 - DNA, 806 bp, Rattus norvegicus
  Genbank Accession No. NM_017257
tgcgaaagctggggctgctatcccagattcgagagctggcaagtggggaagcatggccaagccttgtggggttcgcttgagtggagaagcccgtaaacaggtggatgccttcagacaaaatcttttccaggaggctgaggacttcctttgcactttcttgccacggaaaatcatatccctgagtcagctcttgcaagaggattccctcaatgtggctgacctctcctccctccgggctcctctggacatccctatcccagatcccccacccaaggatgatgagatggaaaccgagcaggagaagaaagaagtccctaagtgtggcttcctccctgggaatgagaagcttctggccctgcttgccttggttaagccagaagtctggactctcaaagagaagtgcattctggtaatcacatggatccagcacctgatccccaagattgaggacggaaatgattttggggtggcaattcaggagaaggtgctggagagagtgaatgctgtcaagaccaaagtggaagccttccagacagccatctccaagtatttctcagagcgtggggatgctgtagccaaggcctccaaggacacccatgtaatggattaccgggccttggtgcacgagcgagatgaagcagcctatggggcgcttagggccatggtgctggacctgagagccttctatgctgagcttcatcacatcatcagcagcaacctagagaaaattgtcaacccaaagggtgaagaaaagccatctatgtactgagcaaaggattagaaggaaaataaatgatttatacttt

SEQ ID NO: 3102 - DNA, 2519 bp, Rattus norvegicus
  Genbank Accession No. NM_017259
agagcccgtgaggcggccggaccatcatcgtcctgctaatacagctacttcctcaaccaccggtatgagccacgggaagagaaccgacatgctcccggagatcgccgccgccgtaggtttcctcaccagtctcctgaggactcggggctgcgtgagcgagcagagactcaaggttttcagtagggcgctccaggacgcactgaccgatcattacaaacaccactggtttccagaaaagccatccaagggctccggctatcgctgtatccgcatcaaccacaagatggaccccatcatcagcaaggtggccagccagatcggactcagccagccccagctgcaccagctcctgcccagcgagctgaccctgtgggtcgatccctacgaagtgtcctaccgcatcggggaagatggatccatctgcgtgctgtatgaggaggcgccggtggccacctcctacgggctcctcacctgcaagaaccagatgatgctgggcaggagcagtccatcgaagaactacgtgatgactgtctccagctagagaggagccgccccgccctggcactctactgttctcatgctgccctgacaacaggccaccgtatacctcaacctggggaactgtatttttaaagtgaagagctatttatacatgttatttttttttttaagaaaagaggaggaaaaaaaccaaaagtttttttttaaaaaaacaaaaaagaaaaaacaattcgttaacgggagctgcttggaagtggtctccccaggtgcctttggagagaactgttcttgattgagtctatgagccagtgtttgcctaggggagtgggttggggattggcctagccaaggtaaaaggggattcttggctgatcccccaggaggtggtggaagggagcaaggttagcaactgtgaacgagaggggtcagggtctgctctgggttaccgttcccgctgggatgcctgtattcctggtccctctcttactcaggggcattcaagcctggtctcaaataatactacattgcctaatcttctcttttgtttttctgctgagatcctgggcacacggaaaggcctctcctgtcccttccgtctgagcagagtttcttgaaactgtgtctcgtttctgatcctaccctcggggtcctgaagaggtggtttcccggcctagaatctatctaaacgtttttggagggtgggctataaggcagatataatggaggggaaccgcacaaaccctttgctttgctctgtgctgctttgtatggatggatggttaataacttagggatgatttgcaatggaattttgggacccaaagagtatccaatgggggtgggtgttttggacctaagccctccttttgggaaccacgtgacagtctgaatgctgctaccattattcctttgagaggtggctcaaagctccagggaactccaggtcctttcttactgccttctcttcaagagcaacctcccccatttcttttccctctttcctgcggttgggtcctggagggccccatttcctaggacaagagttctcaatcactgtgcaatagtcccaggaagctctggaactgggcctcccagcccctcctgattcctggtgggttttaggaccccgccttccccgttcttctgactggctggtgggccttgaggagatctccctcggccgcagggagggcacctgtgcactgcaggactacctggtactcctgtggggctgccacggagagccaaaccttaggcatagctttgtctcctcggtgctcagagcacctgcagggggaggttgcccccctcagtaaaaatccaaatttatttgtagatgtgtgcaatatttactgttctgggttggagaaaatcgggaaacactgggaagaagtggccttccttcaggttcagtgacactgatgagggcttctcagaaggcctcgagtctctcaaaccaaaggacagagctagagccagccagtcacccttagtgaggatccccttccccatgtctctccactgccgtggcatcccatgtcctggatttctcaattcctcagtttctactcaaaggtgctacttaccaaacactctgcccgtcccgctctccccagcttcgcacagccgtcccaggtggcttcgtctctcctgctttaaagttaactttgggcccacagacccgagagctgtgggttgaagcaaagctgtgaatcgctccagatggtccctgtgttctgtccacacacaggtccccgcctttttagaagcagcctcctggtctcatgcttaaatctgttcctcactgcccgtgttcactttagaaatggcagaaccacagagctggactgttgagcaggcctgtctctctcattaaatagaaataagtaagtttgtaagctattccgacagaagagacaaaggttactgattgtacaatagcgcttttatatggaagactgtacagctttatggacaaatgtaaaacttttttgtttttaataaaaatgtagcagacc

SEQ ID NO: 3103 - DNA, 921 bp, Rattus norvegicus
  Genbank Accession No. NM_017264
ctcgcgtgcggcgttcagccccggctctggccatggctacactgagggtccatcctgaagcccaagccaaggtcgatgtgtttcgtgaggacctgtgtagtaagacagagaacctgcttgggagctattttcccaagaagatctcagagttggatgccttcttaaaggagccagctctcaacgaagccaacctgagcaatctgaaggctccattggacatcccagtccctgatcccgtcaaggagaaagagaaggaggagcggaagaagcaacaggagaaggaagagaaggacgaaaagaagaaaggggacgaagacgacaaaggtcctccctgtggtccagtgaactgcaatgagaagattgtggtcctcctgcaacgcctaaagcccgagatcaaggatgtcattgagcaactcaacctggttactacctggttgcagctacagatacctcggatagaggatgggaataattttggcgtggctgtccaggcaaaggtgtttgagctgatgaccagccttcataccaagctggaaggcttccaaacgcagatctctaagtacttctccgagaggggtgatgccgtggccaaagcagccaagcagcctcatgtgggtgattatcggcagctggtgcatgagctggacgaggcggaataccaggagatccggctgatggtcatggagatccgtaacgcttatgctgtgttatatgacatcatcctgaagaactttgagaagctcaagaagccccgtggagagacaaaggggatgatctattgagccccctctctcgttctatgatgggtataacagaaaccttcctactcttgactaggaactctagactgcacccagtcttcttcctgctggggtctcctccctcactctgccttccaaacacaataaatacatagttgcc

SEQ ID NO: 3104 - DNA, 3275 bp, Rattus norvegicus
  Genbank Accession No. NM_017268
cccagggtccgatcgcgtttggtgcctgaaggaggaaccggtgacagacctggagactacagttctctgtccttcacacagctctttcaccatgcctgggtcacttcctttgaatgcagaggcttgctggccaaaagatgtgggaatcgttgcccttgaaatctactttccttctcagtatgttgatcaagctgagttggaaaaatacgatggtgtagatgctggaaagtataccattggcctgggccaggccaggatgggcttctgcacggatcgcgaagacatcaactctctctgcctgactgtggttcagaaactgatggagagaaatagcctttcctatgactgcattgggcggctggaagtcgggacagagacaatcatcgacaaatcaaaatccgtgaagtctaatttgatgcagctgtttgaggagtctgggaatacagatatagaaggaatagatacaactaatgcatgctatgggggcacagccgcagtcttcaatgctgtgaactggatcgaatccagctcttgggatggacgatacgctttggtagttgcaggagacatcgctatatatgcctcaggaaacgccaggcctacaggtggagttggagctgtggctctgctaattgggccaaatgctcctgtaatttttgaccgagggcttcgtgggacacacatgcagcatgcctacgacttttacaagcctgacatgctctctgaataccctgtggtagatggaaaactctccatacagtgctacctcagcgcattggaccgctgctattctgtctaccgcaaaaagatccgggcccagtggcagaaagagggaaaggataaagattttaccctgaatgattttggcttcatgatctttcactcgccatactgtaaactggtgcagaaatctctagctaggatgttcctgaatgactttcttaacgatcaaaacagagacaaaaacagtatttacagtgggctggaagcctttggggatgtgaaattagaagatacttacttcgacagagatgtggaaaaggcatttatgaaggctagtgctgagctattcaaccagaaaacaaaggcatctttgcttgtatcgaatcaaaatggaaacatgtacacatcctctgtatacggttcccttgcttctgttctggcacagtactcacctcaacagttggccgggaagaggattggagtgttctcttacggttctggcttggctgccacactctactcccttaaagtcacacaagatgccacaccaggatctgctcttgacaaaataacagcaagtttatgtgaccttaagtcaaggcttgactcaagaacgtgtgtggcaccagacgtctttgctgaaaacatgaagctcagagaggacacacatcacttagccaactatattccccagtgttcaatagattcactcttcgaaggaacatggtatctagtcagagtggatgaaaagcacagaagaacttacgcccggcgtccctccacaaatgaccacagtttggatgaaggagtgggacttgtgcattcaaacacagctacagagcatattccaagcccggctaagaaagtgccaagacttcctgcgacctcgggcgaacctgagtcggctgtcatcagtaacggggagcactgagagccgtggccttcacagaggctcggggctggatggggtatgggaaacgttagaggaatggatgtcttgggacaattttacagattacgtgttgcttaaaaatgtaatgtaactgacacagagcccagaaaactgttgtgtttttggagaagtctcgctgagctcctaacacacttcctgctgtgggctggccaatggtgaatgtactgcgatggtgttaagggctctgcagaacgtcatacctcgctgcatgtttacacgcatgcgggttaggcttcaaactcggtctgaactgagtgcttctgactgcaaaggcagaggtactgctgtccagtttaaaaaattgttttttttttttttaatgtgtaagaatttttatacttaaataaaaaaaagtacctgtagcttttgggggaaaaaaaaaaacctttttctaggttggggattgtggaatttaaatgttacacataaactctgcttaatggcaaggcaaacatttatctttttcgaagatttataaatcctgaagagaaaaaaagagggtatggttctaggatctggatgaaccatcagtgagaaaggttagtcataatcaagtgagcagaaggatgctggcgttgagcaggcctctgtcacagcaaccagggctctgtgggcacagctgagggaactttctggccaggtgcccgtgactgctgctcagctgcactgagatgcagtggagctgctgcacggaagcttgctgtggtgctgaacgccttacctgcggataaagtgtaaagtaggagggatgggcagggcactattaggttacagtgttacagacccaggttatagacttgacagctcaaactcaccagacacctttttccctttgtggtttgtgtattttttgtgttttgtttgtttttttttatattgttcaatttaaaaaatttagaaaattttaaccttacgttttcacatagtgtgattagccaaaaggaatttcacttcaagatctagaaatagaattcataacattttttcctaaactttgacttttaaaacaacgaaaattaccacatgagatgaacaagaaaattcattagaaagttctctgggtgatttttggtgctgaactgacatgagcctcatagactgtaaaacagaggtagttgaaactaatgtacagaactacattttttaattttatttgcatttaattctgtgaagtttcagttatctaaaataaacacataaacgtgtaatgtttcagattgcaaggtgagatgtaatgtagcatttgtaagatattcttgtcaatattaactggtaggattttgatttgtacagttttaattggttaaaatgatctcattttaacatccactgctatagatgaatgatgtaagctcagatttaatgaatggtggggaaatggtgcatgtaattttttcgcaagtatcgagagttctgtatgttttgaaaagaataatttaacgtttgggttgccaggaagggggctttcccagagtccattgccaggcgttgggcaagcctcgcaatgttggcacggagcgttaaccacaccttactaatagcaaggggaataactttgaaataaagttttagacaaata

SEQ ID NO: 3105 - DNA, 1294 bp, Rattus norvegicus
  Genbank Accession No. NM_017271
ggaattcccggaaaccgttgggcccgagcgaaccgtaccgagcgcgggcatcgcagagcgcgagtgcggagctcggagcgcagcacgatgggaggggagcaggaggaggagcgcttcgacggcatgctgctggccatggcgcagcagcacgagggcggcgtgcaggagcttgtgaacaccttcttcagcttccttcgacgcaaaacagactttttcattggaggagaagaggggatggcagagaagctcatcacacagacttttaaccaccacaaccagctggcacagaaggccaggagagagaagcgagctcggcaggagacagagcgtcgggagaaggcagagcgggcagccaggctggccaaggaggccaaggcagagactcccgggccacagatcaaggaactgactgatgaggaggcagagagactgcagctggagattgaccagaaaaaggatgcagagaaccatgaggtgcagcttaagaacggcagtcttgactctccagggaagcaggatgctgaggaagaggaagacgaggaagacgagaaggacaaaggaaagctgaaacccaacctaggcaatggggctgacctgcccaactaccgctggacccagaccctgtcagagctggatctggcagtgcccttccgagtcagcttccggctgaagggaaaggatgtggtggtggacatccagcggcggcacctccgggtgggcctcaaaggacaggcaccagtgattgatggagagctctacaatgaagtaaaggtggaggagagctcgtggctcatcgaggatggcaaggtggtgacagtgcatctggagaagatcaataagatggagtggtggaaccgcttggttaccagtgaccccgaaatcaataccaagaagattaaccctgagaactccaagctctcagacctggacagtgagactcgcagcatggtggaaaaaatgatgtatgaccagaggcagaagtccatgggcttgcccacctctgatgagcagaagaaacaggaaatcctgaagaagttcatggatcagcacccagagatggatttctccaaggccaaattcaactagctcctgttcaccttcctgaactcttgcagttgagcccgtagccactcaacttcctttcctgagacccaggagccttagggctgggcaggcgtgggacttcccaggcatgtgagctccagggattcactggagaagggctgggtcttgggggtcttgtccttgctatttgtcctgttacacattaaaactatttactctgttccaaagg

SEQ ID NO: 3106 - DNA, 1395 bp, Rattus norvegicus
  Genbank Accession No. NM_017276
caagcccttgtgtgcgctcctttccccgccatgaatgaggaatacgacgtgatcgtgctgggcaccggcctgacggaatgtatcctgtcggggataatgtcagtgaatggaaagaaggttcttcatatggatcagaacccatactatggaggagaaagtgcatctataacaccgctggaagatttatacaaaagatttaaattaccaggacaaccaccagcatcgatggggagaggaagagactggaatgttgacttaattcccaagttccttatggccaatggtcagttggtgaagatgctgcttttcacagaggtcactcgttatatggacttcaaagtgatcgaagggagctttgtctacaagggagggaaaatctacaaggttccttccactgaagcagaagccctggcgtctagcttaatgggactgtttgagaaacgccgcttcaggaagttcctagtttatgttgccaactttgatgaaaaagatcctagaacttttgagggtgtggatcctaagaagacctccatgagagatgtgtataagaagtttgatttgggccaggatgttatagactttactggccattctcttgcattgtacagaacagatgactacttagaccagccatgttgtgaacgattaacagaattaaacttttacagcgagtctttggcaagatatggtaaaagcccatacctctatccactttatggtccttgggaattgccacaaggatttgcaaggttaagtgctatatatggaggtacctacatgttgaataagccaattgaagaaatcattgtgcaaaatggaaaagtggttggcgtgaaatctgaaggagagattgctcgctgtaagcagctcatctgtgatcccagctatgtcaaggatcgggttgaaaaagtaggccaggtaatcagagtgatctgtatccttagccaccccatcaagaacaccaacgatgctaactcctgccagatcatcattccacagaaccaagtcaaccgcaagtcagatatctatgtttgcatgatctcctttgcacataatgtggcagcacagggcaagtatattgccattgtaagtacaactgtggagactaaggaaccagagaaagaaatcagaccagctttggagctcttggaaccaattgaacaaaaatttgtcagcatcagcgacctctttgtacctaaagatttgggaacagatagtcagatctttatttcccgtgcctatgatgctaccacacactttgagacaacctgtgatgacatcaaagatatctataagaggatgacagggtctgagtttgactttgaagaaatgaagcgcaagaagaatgacatttatggagaagactaacagcagtacatattatgtaattaggac

SEQ ID NO: 3107 - DNA, 852 bp, Rattus norvegicus
  Genbank Accession No. NM_017279
gtaaagatggcagaacgcggttacagcttctcgctgactacattcagcccatctggtaaacttgtgcagattgaatatgctttggccgctgtagctggaggggccccttcagtgggaattaaagctgcaaatggcgtggtattagccactgagaaaaagcagaaatccatcctgtatgatgagaggagtgtacacaaagtggagcccataaccaagcacatcggtttggtgtacagcggcatgggtccagattacagagtccttgtacacagagctcggaaacttgctcagcagtactaccttgtttaccaagaacccattcccacagcccaactggtacagcgagtagcgtctgtgatgcaagagtatacccagtcaggtggtgttcgtccatttggtgtttctttacttatttgtgggtggaatgagggacgaccatatttatttcagtcagatccatctggagcttactttgcctggaaggccacagcaatgggaaagaactacgtgaacgggaaaactttccttgagaaaagatataatgaagacttagaactggaagatgcgattcacacagccatcttaacccttaaggaaagctttgaagggcagatgacagaagataacatagaagttgggatctgcaatgaagctggctttaggaggctcaccccaactgaagtgagggattacttggctgctatagcgtaatgaagatgtgccggaacaacaaggaacactcattctacttattcatttttaaagtatgttttgtttgtgcagacttatttctacatgctttaatggatttcacatttttaaataataatcataataaactgttaaaaccag

SEQ ID NO: 3108 - DNA, 897 bp, Rattus norvegicus
  Genbank Accession No. NM_017280
cgttctgtggcctgccgggtcagcaccatgagctccattggcactgggtatgacctgtcagcctctacattctctcctgatggaagagttttccaagttgaatatgctatgaaggctgtggaaaacagtagtacagctattgggatcagatgtaaagatggtgttgtgtttggggtagaaaaattagtcctttctaaactttatgaagaaggctccaataaacgtcttttcaatgttgatcgacatgttggaatggcagtggcaggtttgttggcagatgctcgttccttggcagacatagcaagagaagaagcgtccaactttaggtctaactttggctataacattcctctaaaacatcttgcagacagagtggccatgtatgtacacgcgtatacactctacagtgctgttagaccttttggctgcagtttcatgttggggtcttacagtgtgaatgatggtgcacagctctatatgatcgatccatcaggtgtttcatatggttactggggctgtgccattggcaaagccaggcaagctgcaaagacagaaatagaaaagcttcagatgaaggaaatgacctgccgtgatgtagttaaagaagttgcaaaaataatttacatagtacatgatgaagttaaggataaagcttttgaactagagctcagctgggttggtgaattaactaaaggaagacatgaaattgttcccaaagacgtaagagaggaagcagagaaatatgccaaggaatctttgaaggaagaagatgaatcagatgacgacaatatgtaacatttcaccatcctctggtgtccatttctgtgacagttgcatatggctagcaccatggattatatatacccactgaccaattttcattaaattttgtcttat

SEQ ID NO: 3109 - DNA, 970 bp, Rattus norvegicus
  Genbank Accession No. NM_017282
gcggtgtggttgagtagggtgctgctttcagtcgtgtggcctttggaactccgcgtagcactgccgcctcctcctgtcctcgccatgttcctcactcggtccgagtacgacaggggtgtgaacactttttctcctgaaggaagattatttcaagtggaatatgccattgagggccataagcttggttctacggccattggcatccagacatcagagggtgtatgtctagctgtggagaagagaattacctcgccactaatggagcctagcagcattgagaaaatcgtagagattgatgctcatataggttgtgccatgagtgggctaattgctgatgctaaaactttaattgataaagccagagtggagacacagaaccactggttcacctataatgagacaatgacagttgagagtgttacccaggctgtgtccaatctggctttgcagttcggagaagaagatgcagatccaggtgctatgtctcgtccctttggagtagcattgttgtttggaggagttgatgagaaagggccccaactgtttcacatggacccatctgggaccttcgtacagtgtgatgctcgagcaattggttctgcgtcagagggtgcccagagctccttgcaggaagtttaccacaagtctacgactctgaaggaggccatcaagtcttcactcatcatcctcaagcaagtcatggaggagaagctgaacgcaactaacatcgagctggccacagtgcagcctggtcagaatttccacatgttcacaaaggaagaactggaggaggtgatcaaggacatttaaggaggggccatcctcgaacttctgtgggacagtttcagttctaatggctcttagactttatttccaactccacgtcgtgaaaatatccagtatatgtatgtgtgtttttttatgatgtctgtacataacagcaattctgaaataaaaaaaatttacaaat

SEQ ID NO: 3110 - DNA, 932 bp, Rattus norvegicus
  Genbank Accession No. NM_017283
gtgtgtgtgcgctacggggtgwagactgtgtctgaaatagcgggaacgccatgtcccgtggttccagcgccggttttgaccggcacattactattttctctcccgagggccgactctaccaagtagaatatgcttttaaggctattaaccagggtggacttacatctgtagctgtcagaggaaaggactgcgcagttattgtcacacagaagaaagtacctgacaaactactggattccagcaccgtgactcacttattcaagataacggaaaacattggctgtgtgatgacaggaatgacagctgacagcagatcccaggtacagagggcacgctatgaagcagctaactggaaatacaaatatggctatgagattcctgtggacatgctgtgtaaaagaattgctgatatttctcaagtctacacacagaatgctgaaatgaggccacttggttgttgtatgattttaattggtatagatgaagagcaaggccctcaagtgtacaagtgtgatcctgcaggctactactgtggctttaaagccaccgcagcaggagtgaagcagacagagtcaaccagcttcctcgaaaaaaaagtgaagaagaaatttgattggacatttgaacagacagtggaaactgcaatcacatgcctgtctactgttctgtcgattgatttcaaaccttcagaaatcgaagttggagtagttacagttgaaaatcctaaattcaggattcttacagaagcagagattgacgctcaccttgtggctctagcagagagagactgaacactcttatcagcttaccagatccatgatgccatgtgcctatgtgtttagtaacaacaaaccgacatcttagaggccctggattgaagatggaaactctcccactcctcctgccactgactggttaggactctgtataaa

SEQ ID NO: 3111 - DNA, 792 bp, Rattus norvegicus
  Genbank Accession No. NM_017284
cgcgtacccgggaagtccccgtgtgtgtgtaccttgcagcctcccgcttcccggaaccatggagtacctcattggcatccagggtcctgactatgtcctggtcgcttctgatcgggtggccgccagcaatattgtccagatgaaggacgatcatgacaagatgtttaagatgagtgaaaaaatcttactcctatgtgttggagaggctggagacactgtacagtttgcagaatatatccagaaaaacgtgcagctttataaaatgcggaatggatatgaattgtcccccacagcagcagctaatttcacacgccgaaacctggccgactgtcttcggagtcggaccccttatcatgtgaacctcctcctggctggctatgacgagcatgaggggccagcactttactacatggactacctagcagccttggccaaggctccttttgcagctcatggctatggtgccttcctgaccctcagcatccttgaccgatactacacaccaactatctcacgtgagagggcagtggagcttcttaggaagtgtctggaggagctccagaagcgcttcatcttgaatctgcccaccttcagcgttcgggtcattgacaaagatggcatccacaatctggagaacattaccttcactaagcggagttcctaacatcatgttcttccctcccacttaccagggacctttttttgatgggttccttttatttttttctactcttttgacgttcactctcaatagatggttaattcaaaataaagctgaacacagctaaattg

SEQ ID NO: 3112 - DNA, 828 bp, Rattus norvegicus
  Genbank Accession No. NM_017285
aattccgttgctgtcggaaagccagaaccggtttgtaggcagctcagtggagatcgggttcctattacagtgcaatcatgtctgttatgtcctataatggaggggccgtcatggccatgaagggaaagaactgtgtggccatcgctgcagacaggcgtttcggaatccaggcccaaatggtgaccacggacttccagaagatctttcccatgggtgacaggctctacataggcctggccggcctggccactgacgtccagacagttgcccagcgtctcaagttccgactgaacctgtacgagctgaaggaaggacggcagatcaagccttacaccctgatgagcatggtggccaacctcttgtatgagaaacggtttggtccctactacacagaacctgtcattgctggcttggacccgaagacctttaagcccttcatttgctctctggacctcattggctgtcccatggtgacagatgacttcgtagtcagtggcacctgctctgaacaaatgtatgggatgtgtgagtctctctgggagcccaacatggatccagagcacctgtttgagaccatttctcaggccatgctgaatgctgtggacagggatgccgtgtcgggcatgggcgtcattgtccacatcattgaaaaagacaagatcaccaccaggacactgaaggcgcggatggactaacctgtgctctggccccgtctcccttttgttgtttttctttttaataaaatctcctttctttcatgcctgcccgcccttgtttctgcgactttgtccccatcagggagagcccaatacagagcgactttatctc

SEQ ID NO: 3113 - DNA, 1490 bp, Rattus norvegicus
  Genbank Accession No. NM_017288
cgcagcctggatgcgccctgtggcgcacgcacgcagcatcccgagcctcccgccgcgcgcgggatgcctgctctccgggccccggggcttggccccggcggtaaccggagcgggggggcgcgcccccccagcagcagctgcggcgcccgcgcccgggccagtcgccgccggggcccatctcctgtcgccgcgctctgcgacccaccgccttgcgcggccatggggacgctgctggctctcgtggtgggcgcggtgctggtatcctcagcctgggggggctgcgtggaggtggattctgagaccgaggcagtgtatgggatgaccttcaaaatcctgtgtatctcctgtaagcgtcgtagtgagaccaccgccgagaccttcacggagtggaccttccgccagaagggcacagaggaatttgtcaagatcctacgctatgagaatgaggtgctgcagctggaggaagatgagcgctttgagggccgtgtggtgtggaacggtagtcggggcaccaaggacctgcaggacctgtccatcttcatcaccaatgtcacctacaaccactctggcgactacgaatgtcacgtctaccgtctcctcttctttgataattacgagcacaacaccagcgtcgtcaagaagatccacctggaggtggtggacaaggccaacagagatatggcatccatcgtgtcagagatcatgatgtacgtgctcattgtggtgttaaccatatggctcgtggcggagatggtgtactgctacaagaagattgctgctgccacggaagctgctgcacaagagaatgcctcggaatacctggccattacttccgagagcaaagagaactgtacaggcgtccaggtggctgaatagcgctggctctgggctccgcctcaaggaagagccagcctacgggtaccctccagccctgcagtggggatcagcccctggtgggtaccctcccctggcagtggggatcagcccatcggtctccccagcctcacagttctgcagtggagccaccagggtgggagcgggcagggactgatcccacctcacccaccgcctcccacctaccctcccaccgccatgcatgatgggtgaagcaatatggccgccccaccctgcttttgctgcctgtttgggggagggggcggtgaggcgagggggcaggccccgcccccttctttttgctgatttgcacataggccacttccacacgcactgccaggccagccggcccacccctgcttgatggggtgaagaggggtcgggacagggacagtagtgggcagggggttctgggcctcatctcccctccgcttcctccggctggacctggggttcccttcctgtgacacctcctagccctggcccacccgccctctctcaccagccttcaattgtggtctcttgggaaggcctcttcggcctcctatctttacagaagtagtttttgttcatgaaataaagattcttggactcga

SEQ ID NO: 3114 - DNA, 1575 bp, Rattus norvegicus
  Genbank Accession No. NM_017307
gggtccgggcgcccctcctcctgcccgccatggctgcgcctcgcgcaccccgcgctctgacggctgccgctcccgggtccgggaaagccaaactgacgcaccccgggaaggcgatcctagcaggcggcctggctggaggcatcgaaatctgcatcaccttcccgaccgaatacgtgaagactcaactacagctagatgaacgcgcgaacccaccgcggtaccggggcattggggactgcgtgcggcaaactgtccgcagccatggcgtcctgggcctgtaccgcggcctcagctccttgctctacggctccatccccaaggcggctgtcaggtttgggatgttcgagttcctcagcaaccacatgcgggatgcccaaggtagactggacagcaggagaggactgctgtgcggtctgggtgccggcgtggcagaggcagtggtagtcgtgtgccccatggagaccgtgaaggtgaaattcatccatgaccagacttcctccaatccaaagtaccgaggatttttccatggggttagagagattgttcgggaacaagggctaaaggggacataccaaggcctcacagctactgtactgaagcagggctcaaaccaagccatccgattcttcgtcatgacctccctacgcaactggtaccaaggagacaaccccaacaagcctatgaacccactgatcaccggggtctttggagctgtcgcaggtgcagccagtgtctttgggaacacacccttggatgtgatcaagaccaggatgcagggcctggaggcacacaaataccggaacaccctggactgtggagtgcagatcctgaagaatgaggggcccaaggcattctacaagggcaccgttccccggctgggccgagtctgcctggacgtggccatcgtattcgtcatctatgatgaagtggtgaagctgctcaataaagtgtggaagacggactaaccctggagggtgcaatggggcgtcccagctcctccaggccacctactcttgacgattccagtgcagtagtgccaaaaggccccttcctttgtccctcaagttctgtggcctggtgtgtcatagtgactgtcatgtgttccttagtactgtactcccatgtggtctatgtgtaacactactattgtatctgtgtccagcctggccgtggctgggtgtctctttggcctgtgaagacgtgctcacttacccatgtgcttgcttgtgagccatgtgcctgtttcatgttctatgtcatgtgaccctgtgccccacttcctggggtgcctatgtgccctggtccatggccttggagccatggtcaggtcacagtccggtgccttccaccccctatggcaagggcgccctgccctggcctaccacagctgcctctgggcttcggcctggcttcaccgcattccaggggctataggcccccctgcttctcccgccattggccttaaatggccctcgggccctccctctgcccggaacagggtggcaccagccactctcaggaccaccttgccaaggagaataaaccggatcctgttgcaaaaaaaaaaaaaaaaaa

SEQ ID NO: 3115 - DNA, 1330 bp, Rattus norvegicus
  Genbank Accession No. NM_017320
gggactctctcatgccgccatacggagatggctgttttgggtgcccctggtgtgctctgtgacaatggagcaactgcagagagacctaccctggaccaccactgggatctctggaagaaaactcgcatgagaaggaatacagatcagaatgaagaagacgtacgacgtctcatctgggaaaagaatctcaagtttataatgcttcacaatctggaacattctatgggaatgcattcatacagtgtgggcatgaaccacatgggagacatgacacctgaagaagtcataggttatatgggctctctgagaattcccaggccctggaatagaagtggcactctcaagtcaagctctaatcagacattgcccgactctgtggactggcgagaaaagggctgcgtcactaatgtgaaataccagggctcttgtggttcctgctgggctttcagcgccgagggggcccttgaagggcagctgaagctgaaaacggggaagctggtgtctctcagtgctcagaacctggtggattgctcaaccgaagaaaagtacgggaataaaggctgcgggggtggcttcatgaccgaagctttccagtacatcatcgatacgagcatcgactcagaagcttcctatccctacaaagccatggatgaaaagtgtctctatgacccaaaaaatcgagctgccacgtgttcaaggtacattgagctccccttcggcgatgaagaagctctgaaagaagcagtggccactaaagggcctgtctctgtgggcatcgacgacgccagccattcctccttcttcctctaccaaagtggtgtctatgatgacccctcctgtaccgagaatatgaatcatggtgttctcgtggttggctatgggactcttgatgggaaagactactggcttgtgaaaaacagttggggccttcactttggtgatcaaggatatattcggatggcgagaaataacaaaaatcactgcgggattgctagctattgctcttacccagaaatctaaaccgtttcttctttttctaatgggtcacaaagacggaatacactctaatttaattttgtctgctccatccggaggacccaagtgtgtcgtgatcagtgtgtacatactgtgctaactggcttacagcttgtttgttttataactttacctctctctgaaaagtctgtaagcaaggacgcgctgaggatggagctggcagtctgtcctagatattctttctatgcttgcaccctgtcgtctaatgtgtctaataaccctttgtaacacagatatccccaaagtgcctaataaaatctgtcatttcaagctc

SEQ ID NO: 3116 - DNA, 3741 bp, Rattus norvegicus
  Genbank Accession No. NM_017340
acacgggtcgttgctttggtgtctgtcacttctgtcgccacctcctctgccaacaccaacactgacctccgtcatgaaccccgacctgcgcaaggagcgggcctccgccaccttcaatccggagttgatcacgcacatcttggatggcagtccggagaatacccggcgccgtcgagaaattgagaacttgattctgaacgacccagacttccagcatgaggactataacttcctcactcgaagccagcgttatgaggtggctgttaagaagagtgccaccatggtgaagaagatgagggaatatggcatctcggaccctgaagaaatcatgtggtttaaaaaactatatttggccaattttgtggaacctgttggcctcaattactccatgtttattcctaccttgctgaatcagggcaccactgctcagcaggagaaatggatgcgcccgtcccaagaactccagataattggcacctacgcccagacggagatgggccacggaactcatcttcgaggcttggaaaccactgccacatatgaccccaagacccaagagttcattctcaacagccctactgtgacttccattaagtggtggcctgggggacttgggaaaacttccaatcacgcaatagttctggctcagctcatcactcaaggagagtgctacgggttacatgcctttgttgtccctatccgtgaaattgggacccacaagcccttgccaggcatcactgtcggggatatcggtcccaaatttggttatgaagagatggataacggctacctgaagatggacaattaccgtattcccagagagaacatgctgatgaaatacgcccaggtgaagcctgatggcacatatgtaaagcctttgagtaacaagctgacgtatgggaccatggtttttgtgaggtccttcctcgtgggaaatgcagctcagagtctgtccaaggcttgcacaatcgccatacgatacagcgctgtgaggcgccagtctgaaatcaagcaaagcgaaccagaaccacagattttggattttcaaacccagcagtataaactcttcccgctcctggccactgcctatgccttccacttcgtaggaaggtacatgaaggagacctaccttcgaattaatgagagcattggccaaggggacctgagtgaactgcctgagcttcacgccctcactgctgggctgaaggcttttactacttggacagccaatgctggcatcgaagaatgtcgaatggcctgcggcgggcacggctattctcacagcagtgggattccaaatatttacgtcacttttaccccggcctgcaccttcgagggagagaacactgttatgatgctgcagacagccaggttcttgatgaaaatctatgaccaggtgcggtcggggaagttggtgggtggtatggtgtcatacctgaatgacctgccgagtcagcggatccagccacagcaggtggcagtctggccaactatggtggacatcaacagcctggagggcctgacagaagcctacaagcttcgtgcagccagattggtagaaatcgctgcaaaaaaccttcagactcacgtgagtcacaggaagagcaaggaagtagcatggaacctaacctctgtcgaccttgttcgggcaagtgaggcgcattgccactacgtggtcgttaaggtcttctcagacaaactccccaagattcaagacaaagccgtccaagctgtgctgaggaacctgtgtctcttgtattctctctatgggatcagccagaaaggaggggactttcttgaggggagcatcatcacaggggctcagctgtcacaagtaaacgctcggatcctggagctgctcaccctgatccgccccaatgctgttgctctggtggatgcctttgactttaaggacatgacacttggctctgttcttggccgctatgatggaaatgtgtatgaaaacttgtttgagtgggccaagaaatccccactgaacaaaacagaggtccatgaatcttaccacaagcacttgaagcccctgcagtccaagctttgaagtttccctgggacacgtctgagctccacaagcagcagaaactctctcctctactcactaatccttgtgaaatcgtcatcaaatttgtgtagctacagagcaaatgatgggtttcttttcctccctataagtaaagagaaatgaacagactttagagattaaatgagaaattcggtgttgtaagtgcagtaatgcagacagagacgtaggaactcagaaagcttcagagctgtggtctgacttgcatttgtactgctgctaatctcagtaggccttgactctggagaattaacagagttttaactacaaatacttacttattttcacatttttactgctaatcactggatatatgttttttaaacaaaagtgttatatagagtggaattttccaggcattcgtgcctaccactttctgatctactgctaagagcaggagtttgggggccagaaactaatagaaaccttgatgtgggtgtgtggctgtcacacaggccgctgctgcctgccatgtgggtgtgtcacccctattaactgtcacattaacatagtcaacaagaggactccttcaacacccacccaccaagaaaccagagttcccgatgggcacaagcacccactccaggctcagccttcgtggtagtggcactactgtgcctttgaccccactttttgacacagttaagttacttgtcttacctccaggctttcagccattgcctggatttcagtcatggtggctgaccttccctttcttgcttgccttccttctcctgaaagagataaaagagatagtagtcagcctctcctcatagattaagtatatggagagccctcagctatggtattactgtattttggtgactttgttaagtaaatttcctgggacaatcctgatttgaaagattctgtattctgttgcacaagctattaaaatgctcagtggtcaccaaagtatttcacacacacacactcacaaatcactcaggtcaccttttacactagaaataacaggaaagccctggccacagccatctgctgagagtgttagttgagatgtttcgttgaagatggctgaagaaagtgcaggccctggggagtttctccttgctgagagccggctctgtggtgagcccctagcagccttacgaggcggtgaaacggccccttcagatgggagcagcctctacaatcattctgagcttaaaggtgaaatatgcaccttttgtcctataaatgtcctataaatgcttggggggaggggtaatgttttgttttttttttcttgaaacagagcccagaatggccttgaactctgatcctcacagcctggtaaatgctgggcctacaggtgtgcgccgacatgtctggctgatcggagctctttattcttaaaagcacagtagggagatgattgtaacattaagtctgtgtctgtggcattcgcattgtgagagcagttccttagaacagttctgagagcacagcatcaatgtagtgaaaacgatgtcgacgcctgacatgaaatcacaaccctccgggtcatcgacacaagccttaacctttctcctggaatgactggtaatcccttaagattgacagtacacagcatgtcaccttgttggggtttctattgacagtaattcatattctggaaaggaactaataaatataaatgaccg

SEQ ID NO: 3117 - DNA, 2277 bp, Rattus norvegicus
  Genbank Accession No. NM_017361
aagagcggagagcactgggcgtcgcgccaccggagccggggaccacttaagtgctgctcccgcgacatggcattcaattttggggctccttcgggcacttcgggcacctctacagccaccgcggcaccggcgggcgggtttggcggatttggaacaacaactacaactgcaggctctgcattcagcttttctgccccaacaaacacaggcagtacaggccttctcggcggcactcagaacaaaggttttggctttggcactggttttggcacatcgacgggtactggcactggtttaggcactggcttgggaaccggacttggattcggaggatttaacacccagcagcagcagcagcagcagcagacttctttaggcggtctcttcagtcagcctgcacaggcccctgcgcagtccaaccaactcatcaacactgccagcgctctttctgctccaacgctattgggggatgagagagatgccatcttggcaaagtggaaccagttgcaggccttctggggaacaggaaaaggatatttcaataataacattcctccagtggagtttacacaggaaaaccccttttgccgatttaaggctgtcggttacagttgtatgcccaataacaaagatgaagatggactagtggttctaattttcaacaaaaaagaaacagatattagaagccaacaacagcagttggtagaatcattgcataaagttctgggaggaaaccagaccctcactgtcaatgtggagggcattaagacactgcccgacgatcagacagaagttgtcatttacattgttgagcgctctccaaatggcacctcgagaagagttccagcgacaacgctgtatgcccactttgagcaagccaacattaaaacacagcttcagcagcttggcgtgaccctttctatgaccagaacagagctgtctcctgctcagatcaagcagctcctacagaaccctcctgctggtgttgatcccattatttgggaacaggccaaggtggataacccggattctgaaaaattaattcctgttccaatggtgggtttcaaagaattgcttcgaagactgaaggttcaagaccagatgactaagcagcaccagaccagattagatatcatatctgaagatattagtgaactgcaaaagaatcaaactacaactatggccaaaatagcacaatacaagaggaaactgatggatctctcacacagaaccttacaggtcctaatcaagcaggaaatccagaggaagagtggctatgccatccaggctgaggaagaacagttgcgggttcagctagatacgattcaaggagagctgaatgcacccactcagttcaaaggtcgactgaatgaactgatgtcccagatcaggatgcagaatcattttggagctgtgaaatctgaagaaaagtattacatagatgcagacctattacgagagatcaagcagcatttgaaacagcaacaggaaggccttagccacctgattagcatcataaaagacgacctggaagatatcaagctggtagagcatggactgaatgagaccatccacagcagaggcggggtctttagctgaccattgcgctgtccagaggttcataaagctgtctgcttgctacgtcaggccttctttacgatgaccacatggacaggaaaagggttcttttcctcactgggatgtttgaggctcctcagaaattactgtacattaaatctgaaatggtcaccacaaagctcttcaaagagagtctttgaaaagtttttgtctaaaagctgtatttactttttgaaaagtattacccagagcataaacactgttgttcattttataacagcgttaagtgtggtcgtggggcttggtggtcattctccactcttcccatagcacaggatgaggccgagctgcttcctacgtaacacgacaagctaatcccctgccagttggagactgttcagagtctgttcagagtataaatgcgtctcagcttctatatctgtgaaatcagctgtgggagtaaagaaaatcccaaagtatttaatgatttgtgtggttttccttttgttctataaagacttgaaaatatatttttatattattttacttatttagaacttacagaaaatacctaaccagttaggatataacaaaatcaccacttttgcaagcttttttttttttaatttttatttctaaaaatgaaatccttaaaataaattgttaaattgtaattttaaaaaaaaaaaaaaaaaaaaa

SEQ ID NO: 3118 - DNA, 1392 bp, Rattus norvegicus
  Genbank Accession No. NM_017365
ccgggatccctgcgcgccgtggtgttctgtgccttgccggtctgttccctccgattgtgcctagcaatgaccacccagcagattgttctccagggcccgggaccctggggtttccgactcgtgggcggcaaggactttgagcaacctctcgccatttcccgggtcactcccgggagcaaggctgctatagctaacttatgcataggagatttgatcacagccattgatggggaagataccagcagtatgacacacttggaagctcagaacaaaatcaagggctgcgtagacaacatgacgctcacagtatccaggtctgagcagaagatttggtctcctctagtgaccgaggaggggaaacgtcacccctacaagatgaatttagcgtcggaaccccaagaagtcctgcacatcggaagtgcccacaaccgtagtgctatgccatttaccgcctcacctgctcctggcacccgggtcatcacaaaccagtacaacagccctaccggcctctactcatctgaaaacatctctaacttcaacaatgcagtggagtcaaagacctcagccagtggggaggaggcgaacagcaggccctcggctcagcctcatccctccggcggccttatcatcgacaaggaatccgaagtttacaagatgcttcaggagaagcaagagttaaacgagccccccaaacagtccacatcattcctggttctgcaggagatcctggagtcggatgggaaaggggaccccaacaagccatcaggatttagaagtgttaaagctccagtcaccaaagtggctgcatctgttggaaatgctcagaagctgcccatctgtgacaaatgtggaaccggcattgttggtgtgtttgtgaagctgagggaccatcatccccaccctgaatgttatgtgtgcaccgactgtggcatcaacctgaaacagaagggccatttctttgtaggggatcagatttattgtgaaaagcatgcccgggagagggtcacaccacctgagggctatgatgtggtcacagtgttccccaagtgatcgagaggacctgccctgtctgctgccctccagcctgcctgctgcacctggttgtcagaatgttctggttctctcctccctgacagtcctgtgcttagtgttagtcctgctcagtaaacattgagtttctcctgtactgactgaccctgactggcagtgtgacacctgcttttacattaccgggaggtggttttgtccctgtcccctcacccacaccacaatgcaccttcttcccttggagtcttccctgctgaaaatggacattggtcacattggaattaagccaaatgttttatctctgatgttactttgttttacttaataaatttagactttaaagcc

SEQ ID NO: 3119 - DNA, 1004 bp, Rattus norvegicus
  Genbank Accession No. NM_019131
cttagccgcagggggcgccggcgttgcaaagcgggcctgggcgggacgaaccggacctggctccgtaactgcaggagcccagcagtagcagctgcagagcgcggaggcagagcacagcctcagccgccgcctcgccatggcgggtagcagctcgctggaggcggtgcggagaaagatccggagcctgcaggaacaggcagatgccgcggaggagcgtgcgggcagcctgcagcgagagctggaccaggagcggaagctgcgggaaaccgctgaagctgacgtagcatctctgaacagacgcatccagctggttgaggaggagttggatcgcgctcaggagcgtctggccacagctctacagaagctggaggaggctgagaaggctgcagatgagagtgagagaggcatgaaagtcattgaaagccgagcccaaaaagatgaagaaaagatggagattcaggagatccagctgaaagaggccaagcacattgctgaagatgctgaccgaaagtatgaagaggtggcccgtaagctggtcatcatcgagagcgatctggagcgtgcggaggagagggctgagctctcggaaggcaaatgtgccgagcttgaagaagagttgaaaacggtgacgaacaacttgaagtcactggaggctcaggctgagaagtactctcagaaagaagacaagtatgaagaggagatcaaggttctctctgacaagctgaaggaggctgagacccgggctgagtttgcagagagatcagtaaccaaattggagaaaagcattgatgacttagaagataagtttctttgcttctctcctcccaagactccttcatcaagccggatgtcccacctctctgagctctgcatctgtctgctctccagctgacccaggtttctttctagtgcccacccaccctagggccaggcacagaccgtgctttctattgtacagaggtgatcctcccagtgtaaaataaacactgtacgctagtcctgtt

SEQ ID NO: 3120 - DNA, 8329 bp, Rattus norvegicus
  Genbank Accession No. NM_019143
ctcgcacccgctgcactgcacaggggaagaaaaggagcccagggtgtgagccggccagcggccacaacttctggtcctctcccgtgtcctccttccatcttcttacaggcgtccccacctcaggacttttcctgcaggctgcgaggggaaccaacttcgtggccactagcctcctggagagggcgactctcctcccatccactcaagatgctcaggggtccgggacccgggcggctgctgctgctagcagtcctgtgcctggggacatcggtgcgctgcaccgaaaccgggaagagcaagaggcaggctcagcaaatcgtgcagcctccgtccccggtggctgtcagtcagagcaagcctggctgttttgacaacgggaagcattatcagataaatcagcagtgggaacggacctacctaggcaacgccctggtttgtacctgctatggaggaagcagaggttttaactgcgagagcaagcctgaacctgaagagacctgttttgacaaatacactggaaacacttacaaagtgggtgacacttatgagcgccctaaagattccatgatctgggactgtacctgcattggggctgggcgaggcaggatcagctgtaccattgcaaatcgctgccatgaagggggtcagtcctacaagattggtgacaagtggaggaggccacatgagactggtggctatatgttggagtgtttgtgtctggggaatggaaaaggggaatggacctgcaagccaatagctgagaaatgttttgatcacgctgctgggacttcctacgtcgtgggggagacctgggaaaagccctaccaaggctggatgatggtggactgtacttgtctgggcgaaggcaatgggcgtatcacctgcacctcccggaacagatgcaatgatcaggacaccaggacgtcctacagaattggagacacatggagcaagaaggacaacagagggaacctgctccagtgtgtctgcacaggcaacggcagaggggagtggaagtgtgagcgacatgttctacagagtgcttcagctggatctggctccttcacagatgtccgaacagctatttaccaaccccagacccacccccagcccgcaccgtacggccactgtgtcacagacagcggtgtggtctactctgtgggaatgcagtggctgaagtctcaaggagacaagcagatgctgtgcacttgcctgggcaatggcgtcagctgccaggagacagctgtgacccagacttacggtggcaactcaaacggggagccctgtgttctcccgtttcactacaacggtaggaccttctactcctgcaccaccgaagggcggcaagacggacatctgtggtgtagcacaacttcaaattatgaacaagaccagaagtattctttctgcacagaccacgcggttttggttcagactcgaggtgggaattccaatggtgccttgtgccacttccccttcctgtacagcaaccggaattacagcgactgtacttctgagggtaggcgggacaacatgaaatggtgcggcaccacccagaactacgatgccgatcagaagtttggattctgcccaatggctgcccatgaggagatctgcacgaccaacgaaggggtcatgtatcgcattggggaccagtgggataagcagcatgacctgggccacatgatgaggtgcacgtgtgttgggaacggccgtggacaatgggcctgcatcccctactcccagctccgagatcagtgcatcgttgatgacattacttacaacgtcaacgacacgttccacaagcgtcacgaggagggacatatgctgaactgtacctgcttcggtcagggccggggcagatggaaatgtgaccccatcgaccgatgccaagattcagagacccggacattttaccagattggtgactcctgggagaagtttgtgcatggtgtcagataccagtgttactgttacggccgtggcattggggagtggcactgccagcctctgcagacctacccaggcacaactggacctgttcaagtaattatcacggagacccccagccagcccaattcccaccccatccagtggaatgccccggagccttcacacatcaccaagtacattctcaggtggagacctaaaacctctacgggtcgctggaaggaagctaccattccaggccaccttaactcctataccatcaaaggcctgaccccaggtgtgatctacgagggacagctcatcagcatccagcagtacgggcaccaagaagtgactcgctttgacttcaccaccagcgccagcacacctgtgaccagcaacacagtgactggagagactgcgcccttttctcctgttgtggccacttccgaatctgtcactgaaatcacagccagcagcttcgtggtctcctgggtctcagcttccgacacggtgtcaggattccgagtggagtacgaactgagcgaggaaggagatgagcctcagtaccttgatcttccaagcacagccacttctgtgaacattcctgacctgctcccgggcagaaagtacatcgtcaacgtctatcagatatctgaagagggaaagcagagcttgatcctgtctacatcacagactacagcacctgatgcgcctccagaccctactgtggaccaggttgatgacacttccattgttgttcgatggagcagaccccaggcacctatcacagggtacaggattgtctattcaccttcagtagaaggcagtagcacagaactcaaccttcctgaaacggccaactccgtcaccctcagcgacctgcagcccggtgttcagtacaacatcactatctatgctgtggaggagaaccaggagagcacacccgttttcatccagcaggagactactggcgtcccacgatccgatgatgttcccgctccaaaggacctacagtttgtggaagtgaccgacgtgaaagtcaccatcatgtggacacctcctaatagcgcagtgactggataccgtgtggatgtcctgcctgtcaacctgccaggggaacatgggcagaggctgcctgtcaacaggaacacctttgctgaagtcaccggactgtccccaggggtcacgtacctcttcaaagtctttgctgtgcatcagggcagggaaagcaagcctctgacagcacaacagaccaccaaactcgatgctcccactaacctccagtttgtcaatgaaacggacagaacagttctggtaacttggactccacctcgagcccggatagcaggctaccgactgacagtgggcctcacccgaggaggccagcccaagcagtacaatgtgggacccatggcttccaagtatcccctgagaaatctgcagcctgggtctgagtacactgtgaccttgatggctgtgaaaggcaaccagcagagtcccaaagccaccggagtctttactaccctgcagcctctgcgctccattccaccttataacaccgaggtgacagagaccacaatcgtgatcacctggacccccgctccaaggattggcttcaagctgggtgtacgaccaagccagggaggtgaagcaccccgagaagtgacttcagactcaggaagcatcgttgtgtctggcttgactccaggcgtggaatacacgtacaccatccaagtcctgagggacggccaggagagagatgcaccaattgtcaaccgagtagtgacaccgctgtctcccccaaccaacttgcacctggaggccaatcctgacactggagtgcttaccgtctcctgggagaggagcaccaccccagatattactggctacagaataaccaccacccccacaaacgggcagcagggaaccgctttggaagaagtggttcatgccgatcagagttcctgcacttttgaaaaccgtaatcctggcctggagtacaatgtcagtgtttacactgtcaaagatgacaaggaaagtgcccctatctctgataccgtcatcccagaggtgccccagctcactgacctaagctttgttgatataactgactcaagcatcggcctgaggtggaccccgctaaactcttccaccattatcgggtaccgaatcacagtagttgcggcaggagaagggatccccatttttgaagattttgtggactcctcagtaggatactacacagttacagggctggaacccggcattgactatgacatcagcgttatcactctcattaatggcggagagagtgcccctactacactgacacagcaaacggccgtccctcctcccacggatctgcgattcaccaatatcggtccggacactatgcgggtcacttgggccccgcctccgtccattgagctaaccaacctcttggtgcgctactcacctgtgaagaacgaggaggatgtggcagagctgtccatttcaccctcagacaacgccgtggtcctaacaaatctcctgcctgggactgagtacctagtcagtgtctccagcgtgtacgaacagcatgagagcatacctctcagaggaagacagaaaacaggtctggactccccaactggttttgattcttctgatgtcaccgccaactcattcaccgtccactgggtggctcctcgggcccccatcaccggctacatcatccgccatcacgccgagcattctgccggaagacccaggcaagaccgagtgccgccctcaaggaattctatcaccctcaccaaccttaatccgggcacggagtacattgtcaccatcattgctgttaatggcagagaggagagccccccactgattggccagcaatccacggtttccgatgtcccgagagatctggaggtcatcgcttccacccccaccagcctgctcatcagttgggaaccccccgccgtctctgtgcgctattacagaatcacctatggagagacaggaggaaatagccctgtccaggaattcactgtgcccggaagcaagtccaccgccaccatcaacaacattaaaccaggagcagactacaccatcaccctgtatgctgtcactggccgtggggacagtccagccagcagcaagccagtttccatcaattatcaaacagaaattgacaagccatcccagatgcaggtgacggatgtccaggacaacagcatcagtgtcaggtggctgccttcaacttctcctgtgacaggttacagagtgaccaccgctcccaaaaatggcctaggaccaacaaaatctcaaactgtcagtccagatcaaacagaaatgaccattgaaggtttgcaacccaccgtggagtatgtggttagtgtctatgctcagaaccggaacggagaaagccagcccctggttcagactgcagtgaccaacattgaccgccctaaaggactggcattcactgatgtggatgtcgattccatcaaaattgcctgggaaagcccacaggggcaagtttccaggtacagggtgacctactcaagccctgaggatggaatccatgagcttttccctgcgcctgatggtgacgaggacacggcagagctgcacggcctcaggccgggttctgagtacacagtcagtgtggttgccttgcacggtggcatggagagccagcccctgattggagtccagtccacagccattcctgcgccaaccaatctgaagttcactcaggtgtcacccaccaccttgactgcccagtggacagcgcccagtgttaagctcactggctaccgagtgcgggtgaccccgaaggagaagacaggaccaatgaaagaaatcaacctttctccagacagcacctccgtgattgtgtcagggctcatggtggccaccaagtatgaagtcagcgtctatgctctcaaggacacattgacaagcagaccagctcagggagtcgtcacgactctggagaatgtcagccctccaagaagggcccgtgtgaccgacgctacagaaactaccatcactattagctggagaacgaagacagagacgatcactggcttccaagtcgatgccattccagccaatggccagaccccggttcagaggaccatcagcccggatgtcagaagctatactattacaggtttacagccaggcactgactacaagatccacctgtacacgctcaacgacaatgcccggagctctcctgtggtcattgatgcctccacggccattgatgccccatccaacctgcggttcctgaccaccacacccaactccttgctggtatcatggcaggcaccccgtgccaggattactggctacattatcaagtatgagaagcctggatcccctcccagagaagtggtccctcggccccgccctggtgtcacggaggccaccatcactggtctggagccaggaaccgagtacaccatctatgtcatcgcactgaagaacaatcagaagagtgagcccctgattgggaggaaaaagacagatgagcttccccaactggttacccttccacaccccaatcttcatggaccagagatcttggatgttccctccacagttcaaaagacccccttcgtcaccaaccctgggtatgacaccgaaaatggtattcagcttcctggcacatcccaccaacaacccagtgttgggcaacaaatgatctttgaggaacatggctttaggcgaaccacgccacccactgcggccacccccgtcaggcttaggccaagaccatacctgccgaatgtagatgaggaggtccaaatcggtcatgttcccaggggagacgtagactaccacctctatcctcatgttccggggctcaatccaaatgcctctacaggacaagaagctctctctcagacaaccatctcttggacgccattccaggagagttctgagtacatcatttcatgccaacctgttggcactgacgaagagcccttacagttccaagttcctggaacttctaccagtgcgactctgactggccttaccagaggggtcacctacaacatcatagtggaggccctgcacaaccagaggaggcacaaggtccgagaagaggttgttactgtaggcaacactgtcaacgaaggcctgaaccagcctacggatgactcatgctttgacccttacacggtttcccattacgccgttggagaggaatgggagcggttatctgactctggctttaagctcacttgccagtgcttgggctttggcagtggtcatttcagatgcgattcatctaaatggtgccatgacaacggtgtcaactacaagatcggagagaagtgggatcgtcagggagaaaatggccagcggatgagctgcacatgtctcgggaatggaaagggagaattcaaatgcgatccccatgaagcaacgtgttatgacgacgggaagacctaccacgtaggagaacagtggcagaaagagtatctcggagccatttgctcctgcacgtgtttcgggggccagcggggctggcgctgtgacaactgccgcagacctggggctgctgaacccagtcccgatggtaccactggccacacctacaaccagtatacacagagataccatcagagaacgaacactaatgtaaattgcccaattgaatgcttcatgccgttggacgtgcaggctgacagagatgattccagagagtaatctttccatccagcccaagccaacaagtgtctctctaccaaggtcaatccacaccccagtgatgttagcagaccctccatttctgagtggtcatttcacccttaagccttctgctctggagtcaagttctcagcttcagctcaacttacagcttctccaagcatcgccccgcgggatgttttgagacttccctcttaaatggtgacagttggtgccctgttctgcttcagggtattcagtactgctcagtattattgtctaagagaatcaaaagttcttgtgatttggtctgggatcaaagggaaacacaggtagccaaccacgatgcaatgaattgaatggtagtacccaagagcgggagcaggaagttaaaccagacagttctgctttcttttgccgtctgatctgcagcactgtcaggaggcctgtcctgtggctgtgtccaaacaccccacaggactcactgtcccaacaatcctaattgcctagaaatatctttctcttacctgttatttatcaatttttcccagtatttttatacggaaaaaattgtattgaagacactttgtatgcagttgataagaggaattcagtataattatggttggtgactatttttataatgtacatgccaacactttactactgtggaaagacaagtgttttaataaaaagatttacattccat

SEQ ID NO: 3121 - DNA, 1018 bp, Rattus norvegicus
  Genbank Accession No. NM_019170
cagctgcagagtttaccccaggttctttggtctccgacggcctttctacgcacacgcagccatgtcttccgacagacccgtggcactggtgactggtgctaacaaaggaatcggattcgcgatcgtacgtgatctctgtcgtaaattcttgggggacgtggtcctcacggcgcgggacgagtcacggggccacgaggcggtgaagcagctgcagaccgagggcctgagcccacgcttccaccagctggacatcgacaacccgcagagcatccgcgcgctgcgtgactttctgcttcaggagtacggaggactgaacgtgctggtcaacaatgcgggcatcgccttcaaagttgttgaccccacccccttccacattcaagcagaggtgacaatgaaaaccaacttttttggtacccaagatgtctgcaaggagctactccctataataaaaccccaaggcagagtggtgaatgtatcaagcagcgtgagtctcagggccctgaaaagctgcagcccggagctgcagcagaagtttcgaagtgagaccatcactgaggaagagctggtggggctcatgaacaagtttatagaggatgcaaagaaaggagtccatgcgaaagaaggctggcccaatagtgcatatggggtcaccaagataggggtgacagtcctgtccagaatctatgccaggaaactcaatgaggagaggagagaggacaagatcctcctgaatgcctgctgccctgggtgggtcagaaccgacatggcaggaccaaaagccaccaaaagcccagaagaaggagcagagacccccgtgtacttggcccttttgcctccaggtgcagaggggcctcacgggcagtttgttcaagataaaaaagttgaaccatggtgaatccaactctcacccccaccccttctatcctgacttggtgaaagccaagggacatttataatataccatcacttctggaaaaataaacataactaagtctttaagcacacaacaggtgtttgc

SEQ ID NO: 3122 - DNA, 1580 bp, Rattus norvegicus
  Genbank Accession No. NM_019177
acattcttcctgagtgcagcacaccctccttgtgcaagagcacagcgccccaggtgcagaagactgaggcccgcagaaggacttacagaagagacccagcaagccatggtgtttccatggagatgtcagagtgctcagcggggctcctggagcttcctgaagctgtggatctggacactgctgtgttgtgatctcctgccacaccatggaactcactgttggacttaccattattctgaaagatccatgaactgggaaaatgctagaaagttctgcaagcacaattacacagatttagttgctatacaaaataagagagaaattgagtatttggaaaagacattacccaaaaaccctacctactactggataggaatcaggaaaatcgggaaaacgtggacatgggtgggaaccaacaaaaccctcaccaaagaagcagagaactggggtactggggagcccaacaacaagaagtctaaggaagactgcgtggagatctatatcaagagggaacgagactctgggaagtggaatgacgatgcctgccacaaacgaaaggcagctctctgctacacagcctcctgccaaccagaatcttgcaaccgccatggagaatgtgtggaaactatcaacaataacacctgcatctgtgacccagggtattatgggccccagtgtcagtatgtgatccaatgtgagcctttgaaggcccctgagctgggtaccatgaactgtattcaccccttgggagacttcagcttccagtcacagtgtgctttcaactgttctgagggaagcgagctacttgggaatgcaaaaacagagtgtggagcatctggaaactggacatatctagagccaatctgtcaagtgattcagtgcatgcctctagcagcaccggatctgggcactatggaatgcagtcaccccctcgccaacttcagttttacttctgcttgtaccttcacctgctcagaagaaactgacttaattggggagagaaaaactgtctgcagatcatctggctcctggtctagtcctagtccaatatgtcaaaagacaaagagaagtttctcaaagatcaaggaaggcgactataaccccctcttcattccagtagctgtcatggtcactgcattctcagggctggcatttatcatttggctggcaaggcggctaaaaaaaggcaagaaatcgcaggaaaggatggatgatccttactgattgatcctttgtgagaggaaagtcataaggtactaacaaccgccaccaaaaaccattggaagacaacttcaacacctcctgttaagattttgcacacgggcatctcccacgttagagatgcagtgtttgctcagtgtaactgagtacggatttcaacacgaccaacagctcctcctaatttcctctcactcactcatcctataaatctattccataacttgtgcttatacagatcggtattttatcatcttttctgtgaaagaacaaataagacaattgagcaaaagagttactgtaggatataaagatacctgcttttactcttccccaactctcgtttcctctttcagtgccaa

SEQ ID NO: 3123 - DNA, 1067 bp, Rattus norvegicus
  Genbank Accession No. NM_019186
acggaggaccgtcagccagcaatcgcgtagctcgatcgatcacccaggaagagaaattgtaagcagataagaagaacgcgttcggtttgggacaccatttgcagctggaaatggggaatggactgtcagaccagacttccatcctatccagcctgccgtcctttcagtcctttcacattgttattctgggtttggactgtgctggaaagacaacagttttatacaggctgcagttcaacgaatttgtaaatactgtacctaccaaaggatttaacactgagaaaattaaggtaaccttgggcaattccaaaacagtcacttttcacttctgggatgtaggtggtcaagagaaattaagaccactgtggaagtcatatacccgatgcacagatggcattgtgtttgtggtggactctgttgatgttgagagaatggaagaagccaaaactgaacttcataaaataactaggatatcagaaaatcagggagtccctgtgcttattgttgctaacaaacaagacctgaggaactcactctctctctcagagatcgagaagttgttagcaatgggtgaactgagctcatcgactccttggcatttacagcccacctgtgcaatcataggagatgggctaaaggaaggacttgagaaactacatgatatgataattaaaagaagaaaaatgttgcggcaacagaaaaagaagagatgaatggcagtacttttatatcggtgtggaataggttttacttggtctgatttctgacaagctgaagagtgtctacagcctggtttgcctgtctgccctcacggatgctattaaagctttgttttgttgaacagtcagatacccaactctgttgccttgtggaagatgagtaaatgcaatgcttcttaaaggggtctcttctccgtgacccacaaatcttttggtactaccattttgggaagccaaaaaaggctagtaattgaccagaaaacaattttgtggaaatttgacctgaagttagtgaaataaaactttgaagagtgtaaaaaaaaaaaaaaaaaaaaaaaaaaaaaaaaa

SEQ ID NO: 3124 - DNA, 817 bp, Rattus norvegicus
  Genbank Accession No. NM_019194
gggctccttccctctagtcctgaagaagctgatggagaaccccccgcgcgagacgcggctcgataaggaaaaggggaaggaaaagctggaggaagacgagtctgcagcagccagtaccatggccgtctctgcctccctcatgccacccatctgggacaagacaatcccctacgatggcgagtctttccacctagagtacatggacctggatgagttcctgttggagaatggcatccctgccagccccacccacctggcccagaacctgctgctgcctgtggcagagcttgaggggaaggagtctgccagctcttccacagcatcaccaccatcttcctctactgccatcttccagccctcggaaaccgtgtccagcacagaatcatccttggaaaaggagagggagacaccaagtcccatcgaccccaactgtgtggaggttgatgtgaacttcaatcctgaccctgctgacctggtcctctctagtgtaccaggtggggaacttttcaaccctcggaagcacaagtttgcagaggaagacctgaagccccagcctatgatcaagaaagccaagaaagtctttgtccctgatgagcagaaggatgagaagtactggacaaggcgtaagaagaacaatgtggcagctaaacgctcccgggacgccaggcgcctgaaggagaatcagatcaccatccgggcagcatttctggagaaggagaacacagccctgcggacggaggttgctgagcttcgcaaggaggtgggcaagtgcaagaccatcgtgtccaagtatgagaccaagtacgggcccttgtaa

SEQ ID NO: 3125 - DNA, 2430 bp, Rattus norvegicus
  Genbank Accession No. NM_019201
acgaggcgcggctggcggcgcggtggcggctcggcacggcggtggccggtcgcaggcggccgggcggaatagcagactgcgccgaagccgccccaggcgcagggctcgcggcggcggagagcgccggactcatcggggcccgcggccacccgcgcctttcaatgggcagctcgcacttgctcaacaagggcctgccgctggtaagactttgaacccgacgcaggcttcagtggctgctgtggagcagaagcctgagagctttggttggagacaataagacgtgggatgaggctccgtgacagaacgcggttcggcctggggattctgaagacaaaaagctttggacaggcgaattcatggtcgtggaaaccccgccccaattaagcaatgtcaggcgtccgacctcccatcatgaacgggcccatgcacccccggcccctggtggcgctgctggatggccgggactgcacagtggagatgcctatcctgaaggatgtggccacagtagccttctgtgatgcgcagtccacacaggagatccatgagaaggtactgaatgaggcagtgggcgccctgatgtaccataccatcacactgaccagagaagatctggagaagtttaaagctctcagaatcatcgtccgaattggcagcgggtttgacaacatagacatcaagtcagctggtgatctaggcatcgcagtgtgcaatgtaccagcagcatctgtggaagaaacagcagactccaccctgtgccacattctgaacctataccgacgaactacctggctacaccaggcacttcgggaaggcactcgggtccagagtgtagagcagatccgagaggtggcttcaggagctgccaggatccgtggagagaccttgggcatcattggactaggtcgtgtgggccaggcggtggcacttcgggcaaaggcttttggcttcaacgtcctcttctatgacccatacctatctgatggaatcgagcgggccctggggctgcagcgtgtgagcacactgcaggacctgctcttccacagtgactgcgttaccctgcattgcggcctcaatgagcacaaccaccacctcatcaatgacttcacagtcaagcagatgagacaaggagccttcctggtgaacacagcccgtggtggcctggtggatgagaaggcactagcccaggccctgaaggaagggcggatccgtggcgcagcgctggacgtgcatgagtcagagcctttcagctttagccagggacccttaaaggatgcacccaacctcatctgcaccccccatgctgcatggtacagtgagcaggcgtccattgagatgcgagaggaggcagcccgggaaatccgacgagccatcacaggccggatcccagatagcttgaaaaactgtgtcaacaaggaccacctgacagctgccacccactgggccagcatggaccctgctgtggtgcaccctgagctcaatggggctgcctacagcaggtaccctccaggtgtggtgagtgtggcccccactggcatcccagctgctgtggaaggtattgttcccagcgccatgtccctgtcccatggcctgccccctgtggcccacccaccccacgctccttctcctggccagactgtcaagcctgaggcggatagagaccatacgactgaccagttgtagcctgtgaggagctctccagccttgacacctggtggagggagctgcacacccttggacccaagtgtgcagaggtgacatccagtgtggccctagcactccagagactggcccgggcgtgcaccaggcggggcaagaggaagcacgtccccaagttgattgtagttgtcccgtcctgtgggctggctcactgtcctgtgtcctttgcgttcctcgtttaagcaaaagaagttagtagctaattctatcacgaatgttcttgtctgtgtacagtttttagaacattaccaaggatttgtttgcttagctgtcaacaaaaagaaaacctgagggagcattcagcaagtcagtttgagattatttttccttttctacgttggaacgtgccccggaatgtggccgtcggcacacttctcaggacaatgaatccttcctgtttttctttttatgccacacagtgcattgtttttctatctgcttgtcttatttttagaataatttagaaaaacaacaaaggctgtttttcctaattttggcatgaaccccttgttccaaatgaagacggcatcgcgagtggctctgaggtgtgtctgcagtgcccagtgtgctcaggaccatcggggtctgtcctggggaaggcaggggttggcagacccttgcctacgtggtgccgtcctgctgatgtggtaggctagcaatattttggttaaaatcatgtttgtgactgtaaccatttgtatgaattattctcgt

SEQ ID NO: 3126 - DNA, 4301 bp, Rattus norvegicus
  Genbank Accession No. NM_019206
ggcacgagaagtcggaccctcccaccctgctcacaccctccaagtggtccacggagttccgagactttctgaagatagccttggataagaacccagaaacccggcccagtgctgcgcagctgctgcagcatcccttcgtcagtacagtcaccagtaataaggcccttcgggagctggtggctgaggcgaaggctgaggtgatggaggagatcgaggacggcaaggaggacggcagggaggacggcagggaggatgggaaagaggaggattgagacgagaaggatgctgtgagtgctgttccgcccccagtcaaccacactcaggactcctctgccaatggaactcagccaagcctcaactctgacaagcttctccaggattcttctacccccctgcctcccagccagcctcaggagcctgtgaacgggccctgtaaccaaccctcaggggatggatccccccagaacaccagccctgcagatgaggtctccaagaatgacaatggcttaaaggtacctgttcccctccggaagtcccggccattgtccgtggatgccagaattcaggtgaccgaagagaaacaaatcactgaccaggctgagaaccccagttctgcagccagcaaacccccgaaggtcaaccagagccgacctaacagcagcgccctggagactttgggtgtcgagactctggccaatggaggcctggagctccctggctctgtaactccaaaccattctaagagggcgtcggactgtagcaacctgtctacctcagagagcatggactacggcacctccttgtctgctgacctgtcattgaacaaagagacgggctcattgtctctcaagggctcaaaactgcacaacaagaccctgaagaggacccgccggtttgtggtggacggtgtggaggtgagcatcaccacctccaagatcatcagcgaagacgagaagaaagacgaggagatgaggtttctcaggcgccaggaactccgagagcttcggctcctgcagaaagaagagcatcggaaccagacgcagctgagcaccaagcacgagctgcagctggagcagatgcacagacgatttgaacaagaaatcaacgccaagaagaaattctatgacgtggagctagagaacctggagcggcagcagaagcagcaggtggagaagatggagcaggaccacagcgtgcgtcgcagagaggaggccaagcggatccgcctggagcaggatcgagactacgccaggttccaagagcagctcaagcagatgaagaaggaggtgaagaatgaggttgagaaactgccccggcaacagcggaaggagagcatgaagcagaagatggaggagcacgcacagaagaaacaactgctggaccgagactttgtagccaagcagaaggaagacctggagctggccatgaagaagctcacggcagaaaacaggcgtgagatctgtgacaaggaacgtgattgccttaacaagaagcaggagctcctccgagaccgagaggcagccctgtgggagatggaggagcaccagttacaggagagacatcagctggtgaagcagcagcttaaggaccagtacttcctgcagcggcatgacctgctgcgcaagcacgagaaggagcgggagcagatgcagcgctacaaccagcgtatgatggagcagctgaaggtcagacagcagcaggagaaggcgcggctacccaagatccagaggagtgacggcaagacccgcatggccatgtacaagaagagcctgcacatcaatggtgcgggcagtgcctccgagcagcgggagaaggtcaagcagttctcccagcaggaagagaagaggcagaaggcggagaggctgcagcagcagcagaaacacgagaaccagatgcgagacatggtggcacagtgcgagagcaacatgaacgagctgcagcagctgcagaatgaaaagtgtcatctgttagtggagcatgaaacccagaagctgaaggccctggacgagagccataaccagagcctgaaggaatggcgagacaagcttcggccacgcaaaaaggccctggaagaggatttgaaccagaagaagcgggaacaggaaatgttcttcagactaagtgaggaggcagagaccagacccaccacacccaacagagccagcaagttcttcccctacagctctggggatgcttcctaacacacacatgcctgggctgcggtgcggcagtacagccaccagggccaccaaccctctacaaacaagtgactcaggacctcttcctcttgcttctgtgccagctccaactacccagcaccccagttgcccacagcaccaccccagtgcttctgatggatgacctcatcccaactcagattcccatcacctggaagtgacctgggctgttggggtccgggaccgagcgggatgggcgtacccctcctgtttgccaaaacaccagctctactgtctgtgggcacaagcgctactgatgacatcaccacgaacccatccttattgtgatccttgtggttttttcttctccttcagtaattcctcacagtgttggaaaacatccctcagagccattttgcttctcagcagccagctctcaggggtgtccccattaccctgcttcgcacagctgactttgtgctcgatgagacgctgtgtatgtgggggtagggagtggggaaagggaggccagaaatgttcattctgctggtttctgacattttatgccatctcattttgcctctccctgtcacacacacacacacacacacacacacacacacacacacacacacacacacaatgcaaacacacaacttggccctcctgaacctgatcgtaggacacggagtacagagcatgtcaggtggagcagctgctggggcatgctgagtgctggccccaaagcccagagaaggcacaggctgtactgcagcctgcctgccactcgtttggctgcacacaggatcctgtgttcaggggtaaactcccctccacacttgtcttctgctgcctagcgcatgccaatctcgcccttgcccagttgttggcaagtactggggaaggctcctgacctttgacctttgccccagtcctgcactggagtcccactgtacatttccactaagccggacagtcctttggacttctctgtttaggaagagatgcttcccacccctgggaacagccgaagctcaggaaaatgccaagcctcgtgcctgggcctttgggttgctcaggtagcctcccaagatgctgcgccccataggctaccatgcccagaaaagcagctggtcggcccagccggcgttcgctgatagcgccttagggctcagttaaagcacaggtaaatggctggctgctttgtataccctccttttagacagcatcaccccagggattaggatgggatgggtgggggcggggcacccaggcagtggagtctgggagtggctgagacctcagcagtatttccccatcactgccccatgctgagacaaccttctaggacgtttcctcagatgctgactgggtgcttgggaggggagtgggctagtaaaacaaaataggaaaacaggtcttgggactcccagatcttgtgtgcagtaaggaagttcacagagccccaggaaggcgatagttctcagggtagcgagcgtcagcttgctttcaggccgcacaccgaggagtcttgaggaacagttgacttctttcttactggtgcatgggggctgggaaacacaagttgtcagagtgcagctgtgggactcagagatgggaagtgggcaaggccacgccctgcagggctctaccattgtttacaatgtacttggctgcattcgggggtggggggaacttgacagtggctattaggcaaaatgccggttttgtggttcaggtaacagtctttgaccactccctgacgtcattcgtactgtcctcctccttgttgcttccacacttagtcccacctgagctctggtacctctgctgtgccttttttgagtggggtctagccttgtcttccagcctcataatttaacctaagtgcaatgcctgccaccgacaaaggcccgtgaagtattcctcatgtcctgtgctaacgttttctgtataggaacaggcagaaatgtctttagcaccgcggatataactaacttatatttcccttcacgaaggatagaagtaacgggtgtgtcatttccaacggtcatgtataatttttgtaaactgttctctgcaaacaaaaaaaatgtaaatatgcttctaataaaataataaggt

SEQ ID NO: 3127 - DNA, 897 bp, Rattus norvegicus
  Genbank Accession No. NM_019213
cggcacgaggacgagagcacccgggaagagtcggcgccgctagtgccgggaccaggagcctccgcgagcaagatggccgctcccgagaccgaggccagggggcaggggtactaagtccggacccgcgtgcccttctcccggccgcctgcgccctcatcaagacctcgcgcttctagccaagacatctacatggattattctcgccgtggtcacgaggccgttccaatagagctctagttggcccagattgagaactctggcatttggctgctctgagctggaacctccgggaggtctgctgcaacaggtgcgaccctgaccgctccatgctcgtgggcgcggggaggcgtggcctcccccggggcggccacctctgttggttgctgtgcgctttcaccttaaagctctgcgaagcagaggccccggtgcgcgaggagaagctatcagtgagcacatcaacttcaccatgttggttggtagaagagtttgtggtgaccgaagagtgtactccgtgttctaacttccagattaaaacgacacctgagtgtggttctacagggtatgtggagaaaatcacatgcagctcatctaagaggaatgaattcaaaagctgccgttcagctcttctggaacaacacttattttggaagtttgaaggcatcgtggtgggggtagctttagtcttcgcttgccttgtcatcattcgtcagcgacagctggacagaaaggctcttgaaaaagtccggaagcaaattgaatccatatagctgaatctgctgtgtatggtgggtcccacggatgcatctcagatggagaaagttcagggctaatgtgccctcataagccttgtggtagtgcatcttcaatgactcctcttccaggccattaatgagcaca

SEQ ID NO: 3128 - DNA, 1800 bp, Rattus norvegicus
  Genbank Accession No. NM_019222
  misc_feature (1)..(1800): n = a or c or g or t
ggagcggagagcggtgagcgacatgtccttccgaaaagttgtgcggcagagcaaattccggcatgtatttggtcagccagtcaagaatgaccagtgctatgaggacattcgagtctcccgagttacctgggacagtaccttctgcgcagtcaaccccaagttcctggcagtgattgtggaagccagtggtgggggtgcctttatggtgctccctctaaacaagacaggccgcattgacaaggcctacccaacagtatgtgggcacacaggacctgttctggatattgactggtgcccccacaatgacgaagtcattgccagtggatcagaggactgcactgtcatggtgtggcagattccagagaatgggctgacctcccctctgacagagccagtagtggtgcttgaggggcataccaagcgtgtgggcatcatcacctggcaccccacagcccgaaatgtgcttctcagtgcaggttgtgacaatgtggtgcttatctggaatgtgggcactgcagaggagctgtaccgcctagacagcttgcaccctgacctcatctacaatgtgagctggaaccacaacggcagcctcttttgcacagcttgcaaggacaagagtgtccgaatcatcgatcccaggcggggcaccctggtggcagaacgggagaaggctcatgagggggctcggcccatgcgggccatctttctggctgatgggaaggtgttcaccgctggtttcagccgcatgagtgaacggcaactggcactctgggacccagaaaactttgaggagcccatggccctgcaggagctggattcaagcaatggggctctactgcctttctatgacccggacaccagtgtggtctacgtctgtggcaagggtgattccagcatccggtactttgagatcacagatgaacctccctacatccactttctgaatacctttaccagcaaagaaccccagaggggtatgggcagcatgcctaagaggggcttggaggtcagcaagtgtgaaattgccaggttctacaaactgcatgaacgcaagtgtgagcccatagtaatgactgtgccaagaaagtctgacctctttcaggatgatctgtaccctgacacagccggacccgatgctgctcttgaggcagaggattgggttagtggtcaggatgctgatccaatcctcatctcactacgggaagcctatgtgcccagtaaacaacgggacctgaaggtcagccggcgcaacgtgctatcggacagcaagcctgccggttacagccgctccggagtctccacagctactgcaattactgacattcccagtggcaaccttgctgggtctggtgaagctgggaagctggaagaggtgatgcacggacttcgggcacttcgggtgctggtcaaggaacaaggggagcgtatcagccgcctggaggagcatctgggccgcatggagaatggggatacataggaccaccagggacctgctcccgatactgcctccttctcctccaacccttcccacctagcttctgtggccaggtcacaccaggcagtttgctgctcagtgcctctgtggcaggtcatggccagtttgcacctctccacagcctggggcncaggttggaagcaccacctggcttttggaagatttttgtaccaaggcaaattccaagtactctaagggaccatctcctcgacttgcccaacccactgccccctcactagaaaaagcagcagagatgggttctatattttcattccaaataaaagctctttctaaagccaaaaaaa

SEQ ID NO: 3129 - DNA, 3485 bp, Rattus norvegicus
  Genbank Accession No. NM_019246
gaagtgaagttgctgtcagtggcgcctccggctcccggggaagctgagagtttccgcaggtggcggctgcggcggcggcggcagcggtagcaactgcaacagtagcaacgaaggctgtgggtctgcagctgtgttcccagtcgacattgctcacggtgaaggtgacatctccctccagtttcacaaaatgagtgtggtatggttacgaagaccaggacctaaacttcacagagagcccagcctgctgttctgatgccgaaagggagacagaaagtcccacgcttggatgcccgcctgggcctgcctatctgcctctgtctggaattagccatcttctttctggttccccaggtcatgggcctaacagaggcaggtggtcttgacaccttgggtgcaggggggctaagctgggctgtacatctggacagcctagaaggtgagaggaaggaagagagtctgatacaacaggcaaatgctgtggcccaggcagcggggctggtgaatgctgggcgcattggagagctccaggggcactacctctttgtccagccagctgggcacgggcaagccatggaggcggaggccatgcggcaacaggcagaggctgtgttagccaagcatgaagctgtgcgctggcactcagagcagaggctgctgaagagggccaagcgcagcatccacttcaatgatcccaagtatcctcaacagtggcacctgaataatcggcggagcccaggaagagacatcaatgtgacaggtgtgtgggagagaaatgtaactgggcgaggggtgacggtggtagtggtggacgacggagtggagcacaccgtccaggacattgcacccaactatagcccagagggaagctatgacctcaactctaatgacccagatcctatgccccaccctgatgaggagaacggtaaccaccatgggacccggtgtgcaggagaaattgcagctgtgcccaacaacagcttctgtgcagtaggtgtggcctatgggagccgaatagcaggtatccgggtgctggatggaccactcacagacagtatggaagctgtggcattcaacaaacactatcagatcaatgacatctacagctgcagctggggccccgatgatgatgggaagacagtggatggtcctcatcagcttgggaaggctgccttacaacatggagtgatggctggtcgccaaggctttggaagtatctttgtggttgccagtggtaatggtggccagcacaatgacaactgcaactatgatggctatgccaactccatctacactgtcaccataggagctgtggatgaggagggacggatgcctttttatgcagaggagtgtgcctccatgctggcagtcaccttcagtggaggagacaagatgctgcggagcattgtgactactgactgggaccttcagaagggcactggctgcactgaaggccacacaggaacctcagctgcagcccctctagcagctggcatgatagctctcatgctgcaggtgcggccctgcctcacgtggcgggatgtccagcacatcattgtcttcacagccactcagtatgaagatcatcgtgcagactggctcactaatgaggctggattcagccacagccatcagcatggtttcggcctgctcaacgcctggagacttgtcaatgcagccaagatctggacgtctgtcccttacttagcttcctatgtcagccccatgctgaaagaaaataaggctgttccacggtccccccactctctggaggtcctatggaatgtcagcaggacggacctggagatgtcggggctgaagaccctggaacatgtggcggtgacagtctccatcactcacccacgacgtggcagcttagaactgaaactgttttgtcccagtggcatgatgtctttgatcggcgcgccccgcagcatggactcggaccctaacggcttcaatgactggacattttccactgtgcggtgctggggggaaagagcaagaggagtctacagactggttatcagggatgtaggagatgagccgctccaggtgggcatcctccagcagtggcagctgacgctgtatggctccacgtggagtccagtagacatcaaggacagacaaagtctcttagaaagtgctatgagtggaaaatacctgcatgatgacttcactctgccttgcccacctggactgaaaattcctgaggaggatggttacagcattacccctaacacactcaagacccttgtgctggttggctgcttcagtgtcttctggaccatttactacatgctagaagtgtgcctgagccagaggagcaaggcttccacccatggctgcaggagaggatgctgcccctggcccccacaaagccaaaactccaaggaagtggggacagcactagaatcaatgccactgtgcagcagcaaggacctggatggagtggattcagagcacggggactgcacaactgcctctagcttgctggccccagagctgctgggggaagctgactggagtctgtcccagaacagtaagagtgacctggattgtcctccccaccaacccccagacctgaaggatggacagatctgctgaccccagagcccagcttcttccatgtacaacaggctcttcctaaacttggttatgaggctttcaatcatggatgctcaggagagaatggtcctgatagtgacatctgccacccaaggcctctgaagcattctcagccttctcaagagggtgagggccatcttaattaagcgcagtggtaagggactggtgttcatggctcctctagctgagctttgctgagagcctttcgacaaggggttggcgcccaggccaggcagcccttgatttcatctctctcgggctagtcactgtcctcggccatcaggacctccaccccttcacaagttatgcagcaggtgcctgtatacctaggaacactctcaacagaagtgccgctgtaccgagggcccagagagaggctggcaagagcctagacatgcctaccctgaaagcagctgccttcattaccctttcctgtgtgcctgttctgaagcccgtaccttcactaccactcacccttcctgctgaaggaatggtggcgtgtcccaggaaaactgggaggcacaggattcccagccagcacccttgctgcctcactggggaagttgtcctgctgggctgcagagagctgagacacagtgttgtctaagatagcatgggagcccctgcctatgaccacctgtcttcctctgcaaagtgctcagggaaatggccttcattccagaggccagctgtccgcctgacttttcctccattcttggccttctccccttcccatctttggagctaattgttaatatgaattttttaatgcttaagatttgatttttacttttcaaagcaacattttgttgaatttttttctgcacagctttccaaaataaaaagcagaagtaaaaaaa

SEQ ID NO: 3130 - DNA, 822 bp, Rattus norvegicus
  Genbank Accession No. NM_019252
gaaatggccaccgggacagaccaagcggtgggatttggccttgtcgccgttagcttgatcatcttcacctactacaccacttgggtgattcttttgccattcattgacagccagcatgtcatccacaagtacttcctgccccgtgcctacgctgtcctcctcccattggccgcaggcctcctgctgctcctgtttgtggggttgttcatcacctatgtgctgctgaagagccagaaggtgaccaagaaggctcagtgaaggtccagcggggatgaggctgcagaggccgcctccacatctcctccagggaagggaccaagggtcacagcctacaagacaggctggctgcactgcagccctctttgggacatggggctgcttacgactcagtttgacaaactggaaccctctctctctctctcggtcatccttttagaagccgagaagaaggtggggtgggaaacctcttgctcactcccttggggctcagaggctgagcagtgctggtcctgtccaccccacagtcaaagctccctgtcccttctacggagttgtgttctctcacctccgttctcctgctgtgctgataggccgagcaggctccaggatgtgtgcagccttctcgcctctctgtacaaatcctgtcccttcacaaggcagctcttccgagtctgacacttccaggctccatgaggacttctggacccacaaagcctggggaaagaccgataaaccccagaagcacaggggtgcgtccaggcagccgcattagaccccagctggcctgtttgggaaaacttagaaataaatgttaatcatgtg

SEQ ID NO: 3131 - DNA, 1430 bp, Rattus norvegicus
  Genbank Accession No. NM_019289
atggcttaccacagcttcctggtggaacccatcagctgccatgcctggaacaaggaccgtactcagatcgccatctgccccaacaaccacgaggtgcacatctacgagaagagcggtgccaagtggaacaaggtgcacgagctcaaggagcacaacgggcaggtgacaggcatcgactgggcccccgagagtaaccgcattgtgacctgcggcacagaccgcaatgcctatgtgtggacgctgaagggccgcacgtggaagcccacgctggtcatccttcggattaatcgagctgcccgctgcgtgcgctgggcccccaatgagaacaagttcgccgtgggcagtggctcccgtgtcatttccatctgttattttgagcaggagaatgactggtgggtgtgcaaacacatcaaaaagcccatccgctccactgtccttagcctggactggcaccccaacaacgtgctcctggctgcaggctcctgtgacttcaagtgcaggatcttctctgcctatatcaaggaggtggaggaacggccagcccctacaccgtggggctccaagatgccctttggggagctgatgtttgaatcgagcagcagctgtggctgggtgcatggtgtctgcttctcggccggtgggagccgagttgcttgggtcagccatgacagcactgtgtgcctggtagatgctgagaagaagatggccgtggcaaccctggcctctgagacattaccgctcctggccatcaccttcatcacagaaaatagtctcgtggcagcgggccacgactgcttcccggtgctgtttacctatgacaacgctgcggggacattgagctttggtggccggctggatgtgcccaagcagaactcccagcgtggcctgacagcccgagagcgcttccagaacctcgacaagaaggccagctctgaagggggtgcagccacaggggctggcctggattcactgcacaagaacagcgtcagtcaaatctcggtgctcagcgggggcaaggccaagtgctcgcagttctgcaccacaggcatggacggtggcatgagcatctgggatgtgaagagcttggagtcagccttgaaggacctgaagatcagatgagctgtgaggagtgctgtcctcatcccacatgctggggaggagggaaaggggttggggaggctaagggctgctttgctgaatgcttctagggtgtagtacaggtctgcaaaggggatgctctctctccaaagaggggaagaggaaggtggggaactttcctgcctatttaatgaaaatgtgccttttaaagagatgctttcattcattgcaaaccaaaaacaagacaaaaaacccaaagcacaatgctggtcataaactgcttcaaaatgtgggctaataaacataccaaatgtgaaaaaaaaaaaaaaaaa

SEQ ID NO: 3132 - DNA, 1259 bp, Rattus norvegicus
  Genbank Accession No. NM_019290
ggcacgagggcgagggtgcagccccggagcggcggcggggcaaaatgaaaaacgaaattgctgctgttgtcttctttttcacaaggctggttcgaaagcatgataagttgaaaaaagaagcagttgagaggtttgctgagaaattgactcaaatacttcaagagaaatacaaaaatcactggtatccagaaaaaccctcaaaaggacaagcctacagatgcattcgtgtcaataagtttcagagagttgatcccgacgtcctgaaagcctgtgaggacagctgcatcctgtacagtgacctgggcttgccaaaggagcttacactctgggtggatccgtgtgaggtgtgctgccggtatggaaagaaaaacaatgcattcattgttgccagctttgaaaatgaggatgagaacaaggatgagatctccaagaaagttagcagggctcttgataaggtgacctctgattatcattcagggtcctcctcctcagatgaagacacaagcaaggaagtagaagtgaaaccgagtgcagtggctacaacgccaagccccgtgtaccagatttcagaactgatattcccacctcttccaatgtggcaccctttgcccagaaaaaagccaggaatgtaccgagggggtggccatcagagtcactaccctcctcctgttccatttgcttatccaagtccaggaaggaagaataaagcgttccgcccaattccagtgacatgggtacctcctcctggaatgcattgtgatcggaatcactggattaatcctcacatgttagcacctcactagttcatttggattgggcggatgtcattttgatagaaaggaagaaataccttcttagatacttaagagtttcacaacttgtagtgaagtcagatggacaaaaccatcaggcttatttttatagaaaagctattgagataatctttcttaaagtatatatatatatgcactttagatatattgatatagtttgagaaactttattaaagttagtcaagtgcctgagtttttaatattggacttgagtatttatatattgtgcattgactctgttggatacaaaacactgtaggagggcgatatgttttagcacctttgagcatttactttatggagaatatgtaagttatttatacagaaggacatttattttatgtcacatagaagaattgtgtgaaatcatgtagttgcaaataaaaagtagtttgaggcgtgaaaaaaaaaaaaaaaaaaaaaaaa

SEQ ID NO: 3133 - DNA, 6071 bp, Rattus norvegicus
  Genbank Accession No. NM_019299
ccctcccttccccttctcctcctctcccttggagagcccgggcaggcactgccctgcagccccagtgacaggaggagaccatactccccgacagcgccatggcccagattctgccaattcgctttcaggagcatctccagctccagaacctgggtatcaacccagcaaacattggcttcagtaccctgactatggagtcagacaaattcatctgcattagagaaaaagtgggagagcaggctcaggtggtgatcattgacatgaatgatccaagtaatccgattcgaagaccaatctcagcagacagtgccatcatgaatcctgccagcaaagtgattgcactgaaagctggaaaaactctacagatatttaacattgaaatgaaaagtaaaatgaaggcccacaccatgaccgatgatgtcaccttctggaaatggatctctctgaatacggttgctcttgttacggataatgcagtttatcactggagcatggagggggagtctcagccagtgaagatgtttgatcgtcattccagcctcgcagggtgccagatcatcaattaccgtacagatgctaagcagaagtggttgctcctgactggcatatctgcacagcaaaatcgcgtggttggagctatgcagctgtattctgtagacaggaaagtctctcagcccattgaagggcatgcggcgagttttgcacaatttaagatggaaggaaacgcagaagaatcgacgttattttgttttgctgtgcggggtcaggcaggggggaagttacatatcattgaagttggtacaccacccacaggaaaccaaccctttccaaagaaggcagtggatgtcttctttcctccagaagcacaaaatgattttcctgttgcaatgcagatcagtgaaaagcatgacgtggtgttcctgattaccaagtatggttatattcacctctatgaccttgagactggcacgtgcatctacatgaacagaatcagtggagaaaccatctttgttactgctcctcatgaagccacagctggaataataggagtcaacagaaagggacaagtcctatcagtttgtgtggaagaagagaacataattccttacatcaccaatgtcctacaaaatcctgatttggctctgagaatggctgtgcggaacaacctagctggtgcagaagagctcttcgcccggaaatttaatgctctcttcgcccagggaaactactcagaggctgcaaaggtggctgctaatgcaccgaagggaatccttcgtactccagataccatccgtcgattccagagtgtcccagctcagccaggtcaaacttcacctctgcttcagtattttggaatccttttggaccaaggccagctgaacaaatacgagtccttagagttatgtagacctgtccttcagcaagggcggaaacaacttttggagaaatggctgaaagaagataagctggaatgttctgaagaactgggtgatctcgtaaaatctgtggacccaacgttagcactgagtgtatacctcagggccaatgtccctaataaagtcatccagtgctttgcagagacaggtcaagtccagaagattgttttatatgctaaaaaagttggctatactccagactggatctttctcctgagaaatgtcatgcggatcagtccagatcaaggacagcagtttgcccaaatgttagttcaggacgaagaacctcttgctgatatcacacagattgtggatgtctttatggaatacaatctaatccaacaatgtactgccttcttacttgatgctttgaagaataatcgcccttctgaaggtcctttgcagacgcgattgcttgagatgaaccttatgcacgcacctcaagttgcagatgccattctagggaatcagatgttcacccactatgaccgggctcacatcgcccagctgtgtgagaaggcgggcctactgcagcgtgcattagaacatttcaccgacttatatgatataaaacgagcagtcgttcatacccatcttctcaaccccgagtggttagtgaattactttgggtccttatcagttgaagattccctagaatgtctcagagccatgctgtctgctaatattcgtcaaaatctacagatctgggttcaggtcgcttctaaatatcatgaacagctgtcaactcagtccctgattgaactcttcgagtcattcaagagttttgaaggcctcttttattttctggggtccattgttaacttcagtcaagacccagatgtgcactttaaatatattcaggcggcttgcaagactggacaaatcaaagaggtggaaagaatctgcagagagagcaactgctatgatccagagcgcgtcaagaatttcctcaaggaggcgaaactcacagatcagttgccactcatcatcgtctgtgaccgctttgacttcgtccatgacctggtgctgtatttatacagaaacagtcttcagaagtacatagagatatatgtccagaaagtaaatccaagtcgacttcctgtggttattggaggattgctggatgttgactgctctgaagatgtcattaaaaatttgattcttgttgtgagaggtcaattctctactgatgagcttgttgctgaagttgagaaaagaaacagattgaagctgcttcttccttggcttgaggctagaattcatgagggctgtgaggagcctgctacacacaatgcgttagccaaaatatacatcgacagcaataacaacccagagagattccttcgtgaaaacccctactatgacagtcgtgtcgtgggaaagtactgtgagaagagagacccacatctggcctgtgttgcttatgaacgtggccagtgtgatctggaactaatcaacgtttgcaatgagaattccctcttcaaaagtctttctcgctacctggtccgtcgaaaggatccagagttgtggggtagtgtgctactggaaagcaatccatacagaagaccattaattgaccaggtcgtacagacagccttgtctgaaactcaggacccagaagaagtgtcagtaactgtcaaggcttttatgacagcagatcttcctaatgaactcattgagctgctggagaaaattgtccttgataactctgtattcagtgaacacaggaatctgcaaaacctcctcatcctcactgcaattaaggctgaccgaacccgagttatggagtatattaaccgcctggacaattatgatgcgccagatattgccaacattgccatcagcaatgagctcttcgaagaagcatttgctattttccggaagtttgatgtcaatacttcagcagtgcaggtgttaattgaacatattggaaacctggatcgtgcatatgagtttgctgaacgctgcaatgagcctgctgtttggagtcaactcgcaaaagctcagttgcagaaagggatggtgaaggaagccattgattcttacatcaaagcagatgatccttcgtcttacatggaagttgttcaggccgccaatactagtggaaactgggaagaattggtgaagtatttgcagatggcacgcaagaaggcccgagagtcctacgtggagacagaattgatatttgcactggctaaaacaaaccgtcttgcagaattagaagagttcatcaatgggccaaataatgctcatattcagcaagttggtgaccgttgttatgatgagaaaatgtatgatgctgctaagttgttgtacaataatgtttctaactttggacgtttggcgtctaccctagttcaccttggcgagtatcaggcagcagttgatggtgctagaaaagctaatagtactcgaacatggaaagaggtctgctttgcctgtgtagatgggaaagagtttcgccttgctcagatgtgtggactccatattgttgtgcatgcagatgaattagaggagcttatcaactactatcaggatcgtggatattttgaagaactcatcaccatgttggaggcagccttgggactagagcgagctcacatgggaatgttcacagagctagcaattttgtattctaaattcaagccacagaaaatgagggaacacctagagttgttttggtcaagagtgaatattcctaaggtgctgagagccgcagagcaagcccatctttgggcagagctggtgtttctgtatgacaagtatgaagagtatgataatgccatcatcactatgatgaatcaccccaccgacgcatggaaggaagggcagttcaaagacatcatcaccaaggtggctaatgtggaactgtactacaaagcaatccagttctacttagaattcaagcccttgttgttaaatgacttgctcatggtgctgtctccacggttggctcatactcgtgcagtcaattatttcagcaaggttaaacagctaccactggtgaaaccatatttacgctcagttcagaaccacaacaacaagtccgtgaacgaatccctgaacaacctctttatcacagaggaggattaccaggctctgcgaacatcaatagatgcttatgacaactttgacaacatctcacttgctcaacgtttggaaaaacatgaactcattgaattcagaagaattgctgcttatctcttcaaaggaaacaatcgctggaaacagagtgtggagctgtgcaagaaagacagcctttacaaggatgcaatgcagtatgcctctgaatcgaaagacacagaattggctgaagaactcctgcagtggtttctgcaggaagagaagagagaatgctttggagcttgtctcttcacctgctacgatcttttaaggccagatgttgtcctggaaactgcatggagacataatatcatggattttgccatgccctatttcatccaggtcatgaaggagtatttgaccaaggtggataaattagatgcttcggagtcactgagaaaagaagaagaacaagctacagagacacagcccattgtttatggtcagccccagctgatgctaacagccggacccagtgtggcagtccctccccaggcaccttttggttatggttatactgcaccaccatatgggcagccacagcctggctttgggtacagcatgtgagacggaagctgatcccgtagtctcctattttcatactgaagcatcgtccacccacttctcagtttataaacgggaaacaggcaacgtgttcttgtaacctttacttcatgaaggactacctttttgttctaactatagactcggatcgcctaggttaaaactttattttcacattccgcatcattagaccttcttttcaaaggggaatagtactcacgtgggctttttctccccctcattctttgaagaactgattactattcaatctattgtgaagaacctgatttgcactctgtagtgtttaaagaaacaaagaaactctaatattgaatctcttaaatttagtgtatgtaaacagctttcactatgtattctgtaaatgcaccccattctcttttattcaaagaaaagctaacgtgaaaatactgctatgtgaccatgcaagactgtcagagccaacaaagacaacactaatcagcatatcttacattggaatcacagcgctctccaaattatttgaaaatgcatacagacaacttgcctgattttttttttttttaaaacgagtatcacaggccctgtaacctatgcaggtttccccattatgcatatagaaaatgctagtgtgttgctcacttcatgtgtaacaggtgccctcatgttgtgctgtatcctgtgctttttctgtgggaccattccattcaggaacaaagagcaccatgactgcacacgtgtgtatttactaacccttccctgaggtgtgtgtatgttggatattgtggtgttttagatcactgagtgtacagaagagagaattcaaacaagatattgctgttcttcagttttgttcgtggaatttgaaattactccaatttaaaataaattactggactgtggaaataacatgtagaattgcagttttaattaaatacatctcaaaaccag

SEQ ID NO: 3134 - DNA, 4259 bp, Rattus norvegicus
  Genbank Accession No. NM_019331
aaaaaagaggattccgtggcttaaaaaaaaagtttgaaagcctctgacttaatagtttccaccaccaaggaaactgaggcccagagagaggaaatgacctgggtaagatctccgagggaccagtagttgaacagggactaggagttaaaatttcatgggaggtgcctgtaacaggacctgccttggggtctctgctggaaagagagacctgattgggtttcccagcagtcttcagtggcttgctccgtggctgcctcagccaggtctccagcagccacacctggggatctggcccccgtcctgtcctccagccccacccacctcggctccatgccccccccagtcagcttcgggaccctggcagtgagcaggcacgtggcagccaaggccctgtgaccaggccagggagacggagctctggggtcccagtcacctgcccccccatggagctgagaccctggttgctatgggtggtagcagcagcaggagccttggtcctgctagcagctgaagctcgcggccagaagatcttcaccaacacgtgggctgtgcacatttctggaggcccagctgtggctgatagtgtggcacggaagcatgggttccacaacctgggccagatcttcggtgactattaccacttctggcacagagcagtgacaaagcggtccctgtcgcctcaccgcccgcggcacagccggctacagagggtgcctcaagtgaagtggctggagcagcaggtagccaagcaaagggccaagagggacgtgtatcaggagcccacagaccccaagttccctcagcagtggtacctgtctggggtcactcagcgagacctgaatgtgaaggaagcctgggcccagggcttcacagggcgtggcattgtggtctccatcctggatgacggcattgaaaagaaccatcctgacttggcaggcaattatgacccgggagccagctttgatgtcaatgaccaggaccctgacccacagcctcggtacacgcagatgaatgacaacaggcacggcactcggtgtgccggggaagtggcagcggtggccaacaatggtgtctgtggtgtaggtgtagcttacaatgcccggattggaggggtgcgtatgttggatggcgaggtgactgacgcggtagaggcacgttcgctgggcctgaatcccaaccacatccacatctacagcgccagctggggccccgaggacgacggcaagaccgtggatgggccagcccggctcgccgaggaggccttctttcggggagttagccagggccgcggagggctgggctccatctttgtctgggcctcagggaatgggggccgggaacatgacagctgtaactgtgacggctacaccaacagtatctacacgctgtccatcagcagtgccacacaattcggcaacgtgccctggtacagtgaggcctgctcctccacactggccaccacctacagcagtggcaaccagaatgagaagcagattgtgacaactgacttgaggcagaagtgcactgagtctcacacaggcacctcagcctccgcccctttggcagctggtatcattgctctcaccctggaggccaacaagaacctcacctggcgggacatgcagcacctggtggtgcagacctcaaagccagcacatctcaacgctaacgattgggccaccaatggcgtgggccggaaagtgagccattcctatggctacgggctgttggatgcaggtgccatggtggccctggcccagaactggacaacagtggccccccagcggaagtgcatcattgaaatcctggcagagcccaaggacattggcaaacggctagaggtgcgcaagaccgtgacagcgtgcctgggtgagcccaaccacatctccagactggaacacgttcaggcacggctcaccctgtcttacaatcgccgtggtgacctggctatccacctcatcagccccatgggcacccgttccaccctattagctgccagaccacatgactactctgctgatggatttaatgactgggctttcatgacaactcattcctgggatgaggacccctctggcgagtgggtcctagagattgaaaataccagcgaggccaacaactatgggacgctgaccaagttcactctcgtcctatatggcacagcctctgagggtctctctgcacctccagagagcagcggctgcaagaccctcacatccagccaggcctgcgtggtgtgtgaggaaggtttctcactgcaccagaaaagctgtgtccagcgttgcccaccaggcttcacaccccaagtccttgatacacactacagcactgagaatgatgtggagatcatccgtgccagcgtctgcaccccctgccacgcctcatgtgccacttgccagggcccagctcccacagactgcctcagctgccccagccatgcctccctggaccctgtggagcaaacctgctcccggcaaagccagagcagccgagagtcccgacctcagcagccacctcccgcactgcgcccagaggtggaagtggagccccggttgcgggctgggctggcctctcacctgccggaggtcctggccggcctcagctgccttatcatcgctctcatctttggcatcgtcttcctcttcctgcatcggtgttcaggcttcagcttccggggagtgaaagtgtacaccatggaccgtggcctcatctcctacaaggggctgcctcctgaggcctggcaggaggagtgcccatctgactcagaagaggatgagggccggggcgagaggaccgcctttatcaaagaccagagcgccctttgatgagcccactgcccaccctatcaaatcgatcccttcctcggcactttttaattcaccaaagtatttttttatcttgggactgggtttggaccctagctgggaggtgagaggggcagagacccttgggcctacctgtttgcctgaggtggggtcccgggagcctcaccccccaccaaccctccatgtggaggaaggagtaaatctttagggcagcttcctgcagagtgaagaggggcagcctttctgactccctggccagctgcagccttgcccctcccctgcccctcagaaagcaataatggtccccatccaggcaacagggaggctggccaggaggtacttgaagaaggtggccacctctccaagggcttttgcatcccctgaccctctctggctcaggatgagcctctgaagaagcttgcagtcacaggaagggaccaaagcaaacgaggcactctccagtgtgcctgcactcttgctctcagcctgcctctgcactccaggtctccacctcagctggtagccaggctgagctagacctgcacaggtcaggctctggggccttatgctggtgtcctgaccatcctctatggcaccccccccccaagccagggccttgttttctgagcccggggctgcctgggcagttggcgctcacagtccaggagcccctgggtgggtggtggggagggacggtggctcctcccacctcccacccgatgctgctttcccctgtggggatctcaggagctgtttgaggatatattttcactttgtgattattcactttagatgctgatttttttttttttgtatttttaatgggggtagcagctggaccattcaccttctcctacccatgtccaccctgcctttcccatggctgcccagctctgaggcagagggaatcactaagccccaagtcctgaagaggcaggccagccagctgggctccaggaaagggggtcatggtgggaggggtaggctgacatcatctgtttcaaatggggttgtgccacaggcttttgggttgctggctctccaagtgccaggggtgggcaggtggcaccaccaagcccaaactaacactgtgccctggtggagaaagcattggcctatgatgccccccaaaccccctgttctgatgtgcctttcgcacccctcccattaggacaatcagtcccctcccacttgggcctcctcttttctttttcctagcccttctcggtacccaacctacctgtccagggtgccccttgctctcctgcccacccctagcggccatccaggctggttttgtaagatgctgggttggtgcacagtcatttttttttccttgtaatttaaacaggcctggcattgttggttctatttaatggacacgagataatgttagaggttttaaagtgattaaacgtgcagactatgcaaacc

SEQ ID NO: 3135 - DNA, 1102 bp, Rattus norvegicus
  Genbank Accession No. NM_019352
gcaacgcgggtcttcccgctgttgctgtcggggccacggccgagcacacgaccccggcctgaggtggtggtgggaagcccgccgctgtttgctgcgacctcatggagggtggcggaggaagtagcaacaaatccaccggcgggttagcgggcttcttcggagcgggaggagcgggttactcgaacgctgatttggccggcgtcccgctgactggtatgaaccccctgtctccttacttaaatgtggacccacgctatctcgttcaggatacagatgagtttattttgccaactggagctaataaaacccgaggcaggtttgaactagctttcttcaccattggaggatgctgcatgacaggggctgcattcggggcactgaacgggcttcgtttaggattgaaggaaactcagagcatgccctggtccaaaccaagaaatgtacagattttgaatatggtgactagacaaggggcactttgggctaatactctaggttccctggctttgctctatagtgcttttggcgttatcattgagaaaacacggggtgcagaagacgacttcaacacagtagcagctggaaccatgacaggaatgttatataaatgtacaggtggtcttcgaggaatagcacgtggtggcctggcgggactgacactgaccagtgtctatgcactgtataacaactgggagcacatgaaaggttccctgctccaacagtcactctgaagatgtctgccacctcaggaatgggggacacttcatagtcatccagatcaaggaataagtcagtctggagctgctttctctcttgcacctacaattactttgaacaattggagactctgatttgctgtgacaaagatcatggatgcttagcctggactgcactgcttgccctctgagtggaagccaaacccttggtggctcactgagaatgtgttctcttctcctttggagatgacctcgcacctcctgcccccaaactggaaaaccacttactctccaaatttattaccatgttaattcatttaaaaatctaaaacttaatattgccctgttttccaaataaagggtgaaaatacaaccaaagctaaaag

SEQ ID NO: 3136 - DNA, 1377 bp, Rattus norvegicus
  Genbank Accession No. NM_019356
gttcgggattcacacatacacttcagaatgccgggtctaagttgtagattttatcaacacaaatttcctgaggtcgaagatgtagtgatggtgaatgtaagatccattgctgaaatgggggcctatgtcagcttgttggaatataataacattgaaggcatgattcttcttagtgaattatccagacgacgtatccgttctataaacaaactgatccgaattggcagaaatgaatgtgtagttgtcattagagtggataaagaaaaaggatatatagatttgtcaaaaagaagagtttctccagaggaagcaatcaaatgtgaagacaaattcacaaaatccaaaactgtttatagcattcttcgccatgttgctgaggtattagagtataccaaggatgagcagctggaaagcctattccagaggactgcctgggtctttgatgacaagtacaagagacctggatatggtgcctatgatgcctttaagcatgcagtctcagacccatctatcttggatagtttagatttgaatgaagatgaaagagaagtactcattaacaatatcaataggcgtttgaccccacaagctgtcaagattcgagcagatattgaggtagcttgctatggttacgaaggcattgatgctgtaaaagaagccctgagagcaggtttgaattgttctacagaaaccatgcccatcaagattaatctaatagctccacccaggtatgtgatgacaacaacgaccctagagaggacagaaggactctctgttctcaatcaggctatggcagtcatcaaagaaaagattgaggagaagaggggagtgttcaatgttcagatggagcccaaagtggttacagatacagatgagactgaacttgcaaggcagctggaacggcttgagagagaaaatgcagaagtggatggagatgatgatgcagaagaaatggaagccaaagctgaagattaaccttttggaaaacagtccaatttaaggagtacgaagcagccctttctggctgtaaaccctagacttgaaagttttccagtattgaaaacttcaaagctgaatatttttatttccaagtatttaagtattcgacaagccagaatctaaatgccctccttcatgtcagctgttttcacatagtggctctaacacctcaagcgtttttaagggagtggcttgatttgaccagagacaaatgttaaaccgcagtcctaaaattgggcttgcggttttcatttctgatgtctctggattggcacccttatggtttagagaattaccaggggctccagacaccaacaatcccaacctttctatataaaatgtactcaagcaaacatcaaataaatttctgggatattt

SEQ ID NO: 3137 - DNA, 2825 bp, Rattus norvegicus
  Genbank Accession No. NM_019371
ggatccaggttttcaagtttgttaggggatttaatgcaaatcaatatgcaaacagagagcattgtaaaaaaaaaaatccagtcctttctccggtcacacacaggttagctaatgtggagctcgcccagatgctctgcagcaccagctcaaggggaagggccaggaggagggcagtcccgggggcgggaccatgacgttgaggtcaaggcggggcttcctctcgttcctccccgggctgcggccgccgcggcggtggctccgcatctccaaaaggggccctccgacttctcactgggccagtccggcgctgggtggcagaactctacactactcctgccggtctcagagcgggactcccttctcttcagagtttcaagcaactttccccgcctttgcagctaaagtggctcggggaccgtggctgccgcaggtggtagagcccccggcccggctctctgcatctccgctgtgcgttcgctctgggcaagccctcggtgcgtgcaccctgggggtcccccgcctcggctctgtgagcgagatgcctctgggacacatcatgaggctggatctggagaagatcgccctggagtacatcgtgccctgtctgcacgaggtcggtttctgctacctggacaacttcctaggcgaggtggtgggcgactgcgtactggagcgagtcaagcagctgcattacaacggggccctgcgtgacggccagctggcggggccccgcgccggcgtctccaagcggcacctgcgaggcgaccagatcacgtggatcgggggcaacgaggagggctgcgaggccatcaacttcctcctgtccctcatcgacaggctggtcctgtactgcgggagccgcctgggcaaatactatgtcaaggagcggtccaaggcgatggtggcttgctatccaggaaatggaacaggttatgttcgtcatgtggacaaccccaatggtgatggccgctgtatcacctgtatctactacctgaataagaattgggacgccaagttacatggaggggtcctgcggatatttccagaaggaaaatcatttgtagcagacgtggagcccatttttgatagactcctgttctcctggtcagaccgcaggaatccacatgaagttcagccctcctatgccaccaggtacgccatgactgtctggtacttcgatgctgaagaaagggcagaagccaaaaagaaattcaggaatctaactagaaaaactgaatctgctcttgctaaagactgacggtggtgtgaagtccgctgggcgcattcgtttagtgacagttcctgaaatgttaagtgtcaagatccaaagactctgtccaatcccctgcctaccgcctgcatcgtttggctccctaccttgtttgtggtacttcgtgttttcttgctgggaatgcgttgccctccagacactctctttgccggatgaactcatttgctaactccagaaacacctgcagacatcctagctggccagcggtttaacggatagatctgggaatggatagatatgggaatgcagctgttcagcccaggattgcctcgtgttcgcactttatgcatacttcctggtctgataggaggaggtttgcgaagaaataaactggtgacagatgccacaaagaggcacccttgaaaccctaacagcaagaaagagaaagatctgaactatttccagatgttgttaacccgagactggacgattacggacaacctgatgacattatcgcctctagaaagggctgctgtcatagcgatcgatttataagtgtcccacggtggatgctcctttttcctggtcctacaacctgttctttttgaaggtcattgctaaattgatgctctcttgtcgaagacgaccccagcctgtatgctccatttttacttcttacttggggatcctaattatccagagaataaaactcaccaggtagtttgggttgttttttctggtactgaaaatttgaagttaaatgagagggacaggaagcgtcctggtaatttagcttctgctaactctgtgggaagagcaaagcctagcggtatgcgataaccatgcatacggtgagcagttcgagagggagatgtggttggaagtgcagacagccccctttcatcatgttccctttagctgttcttcgttcatggctaagaacagcatgttgtactcttaaaagatatggaaataaaaagacctcaaagctatcgagttctcccacattgtctgctctgccagcctcgctttagccgtcttgatccttgagagcaactggttggaagtgcatccagtggtgtggaatttcctagaactgtgggaggtttctcctgcaggatgcaggtgccgcttcccccagaactctgtacgaaacacccattttacggaagttagccatcctagttttcgctgctacttccccatctttcgaacctctttaatttccttgttagaatcccacaagcagcacagacccgagagtgttttatttcatcgtgttcagccatgcagactttccaagcaaagaagttgatacttctttcttctttcgggaaagtgtccaggaagaactgtcattcctccccccatggctctgttttgttttatttcccaccttctaacttacaacgtcatttccttatttattatgtttattgtcttgtagcctatgatgtctagagtgttaaacacaacgaaggcagggatttgtacgtttttgatccatgcagcatgttcccagcacctaagctaacatacagtaagcaacggcttaccaaacacatgttcaataaactcagtctcctctgtaaaa

SEQ ID NO: 3138 - DNA, 546 bp, Rattus norvegicus
  Genbank Accession No. NM_020082
  misc_feature (1)..(546): n = a or c or g or t
ggaattccgctaatagctagactggtnccagtcagacggaggaaacctggccagcttttgcactttctaggtgacgatggacatacagaggacccaatccttgcttctgctcttgttgctgaccctgctggggttagggcttgtacagccctcctatggccaagatagaatgtaccaacggttccttagacagcatgtggaccctgagggtacaggcggcagcgacaactactgcaacgtgatgatgcagagacggaggatgacttctacccagtgcaaacgcttcaacaccttcatccacgaagacatctggaacattcgcagcatctgtgatactgccaatatcccatgcaagaatggcaatatgaactgtcacgaaggcatagtgagggtcactgactgcagagagacagggagctctgtgccccacaactgtaggtacagggcgagagccagcactaggcgagttgtcattgcctgtgagggtaccccagaggtcccagtgcactttgacagatagatgacatctgtagctgctactgctgg

SEQ ID NO: 3139 - DNA, 1574 bp, Rattus norvegicus
  Genbank Accession No. NM_021577
tgagtggcgcgcttgctgagtgctgccacatcccgcaagctgagcaggtatcccaactctgttcctgcccggtagaccacccgaggtgtgagtgtggtcttgtcttccagattcgtaggacagaagctccaggaggaggacccgcccaacatggcatcggagagcgggaagctatggggtggccgatttgcaggctcggtcgaccccaccatggacaagttcaactcatctatcgcctatgaccggcatctgtggaatgtggacctgcagggaagcaaggcctacagcaggggcctggagaaggcagggcttctcaccaaagctgagatgcagcagatactgcaaggcctggacaaggtggctgaagagtgggcccaaggcatcttcaaattgtaccctaatgatgaagacatccacacggccaacgagcggcgcctgaaggaactcattggtgaagctgcagggaagttacacacaggcagaagtcgcaatgaccaggtggtcacggacctcaggctgtggatgaggcaaacctactcaaaactctccaccttcctcaaggtgctcattgaagccatggtagaccgggcagaggcggagtgtgaagtcctcttccctgggtacacacacttacagagagctcagcccatccgctggagccactggatcctgagtcacgccgttgcgctgacacgagatttagagagactgaaggaggtgcagaagcggatcaatgtcctgccactgggcagtggggccattgcaggcaaccctctgggtgtggaccgggagttcctctgtgcagaactgaactttggagccattacgctcaacagtatggatgccaccagcgagagagacttcgtggctgagttcctgttttgggcttctctgtgcatgacccatctcagcaggatggcagaagacctgattctctacggtaccaaggaattcaactttgtgcagctctccgatgcctacagcaccggaagcagcttgatgccccagaagaaaaacccagacagcttggagctgatccggagcaaggcgcgccgagtgtttggacggtgcgcaggactcctgatgaccctcaagggacttccaagcacctacaacaaggacttacaggaagacaaggaggctgtgtttgaagtgtctgacaccatgacagctgtcctccaagtagccactggagtcatctctacactgcagattcatcgtgagaacatggcacaggcactcagccctgacatgctggctaccgaccttgcctactacctggtccgcaaagggatgccattccgccaggcccacgaggcctcagggaaagctgtggtcgtggcagagatgaaaggggtggctctcaaccagctgtcacttcaggagctgcagaccgtcagtcccctgttctcgagtgacgtgaatctcgtgtgggactacagccacagcgtggagcagtacacagccttgggtggcacagcacagtccagtgttgagtggcagatcagccaggtgcgggccctgctgcagatgtagcagccctagattccacccagtcaaactgcgccccaata

SEQ ID NO: 3140 - DNA, 1182 bp, Rattus norvegicus
  Genbank Accession No. NM_021740
gttcccgggtcgtgctccgcgctcactgcagccaccttcgccgcccaccgtctcctccaacgcggactccggcagctttctcgccagagtcctcgaaactcgactaattccttacgcgtacgaccagaccaccggcgtgccccaccatgtcagacgcggcagtggacaccagctccgagatcaccaccaaggacttgaaggagaagaaggaagttgtggaggaggcagagaatggaagagacgcacctgccaatgggaacgctcaaaatgaggaaaatggggagcaggaggctgacaatgaggtagatgaagaagaggaagaaggtggggaggaagaggaggaggaggaagaaggtgatggtgaggaagaagatggagatgaagatgaggaagctgaggctcctacgggcaagcgggtagctgaggatgatgaggatgatgatgttgagaccaagaagcagaagaagactgatgaggatgactagacagcaaaaggaaaagctaaccttacgcaccgtgacctattcaccctccacttcccgtctcagaatttaaacgtggtcaccttcgagtagagaagcaggcccccgcccgcccactgcgcgagtgccacccaccaatgacatgcgctcttcaccaccccaccaaaaccacaacatgaattggcaacatgggaggagaaaagaaccagaacttcccaggccctgctttttttcttaaaaatactttaaaaggaaaatttgtttgtattttttatttacattttatatttttgtacatattgttaggggtcagccatttttaatgataacgggtgaccaaaccagccttcagagcgttttctgtcctacttcagactttacttgtggtgtgaccatgttcattatactctcaaaggagaaaaaaaaccttgtaaaaaaaacaaaaacaacaacaaaaaaacaatcttattctgagcattccagtaactttttttgtgtatgtacctagctgtactataagtagttggtttgtatgagatggttaaaaaggccaaagataaaaagattttttttcctttttttttgtctatgaagttgctgtttatttttttggcctgtttgatgtatgtgtgaaacaatgtccaacaataaaccggaattttattttgctgagttgttccaaaaaaaaaaaaaggaatcc

SEQ ID NO: 3141 - DNA, 2413 bp, Rattus norvegicus
  Genbank Accession No. NM_021750
cttccgggctcgggagccgcgacaggagggggcctctgaaaagggtcctgttctgagaagtccattgtgtaccttgtcaccagcgcgtctgaaccctctctgaaccttcctgaagctggaagatttcaccctgatggctgactcaaaaccactcagaaccctggatggggaccctgtggctgtggaggctttgctccgggacgtgtttgggattgtcgtagatgaggccattcggaaggggaccaatgcctctgagaaggtctgcgaatggaaggagcctgaagagctcaagcagctgctggacttggagctgcagagccagggcgagtctagggagcggatcctggagcgctgccgggctgtgattcattacagtgtcaagactggtcacccccggttcttcaaccagctcttctcaggattagatccccatgctctggccgggcgcatcattacggagagcctcaataccagccagtacacatatgagattgcccccgtgtttgtgctcatggaagaggaggtgctgaagaaactccgtgcccttgtgggctggaacactggggatggggtcttctgtcctggtggttccatctctaacatgtacgccataaacctggcccgctttcagcgctacccagactgcaagcagaggggcctccgggccctgccacccttggccctcttcacttcaaaggagtgccactactccatcaccaagggagctgcttttctgggacttggcaccgacagtgtccgagtggtcaaggctgatgagagagggaagatgatccctgaggatctggagaggcagatcagtctggcagaggctgagggctcggtgccatttctggtcagtgccacctctggtaccaccgtgctaggggcctttgaccccctggatgcaattgccgatgtttgccagcgtcacgggctgtggttacacgtggatgccgcctggggtgggagcgtcctgctgtcccggacacacaggcatctcctggatgggatccagagggctgactccgtggcctggaaccctcacaagcttctcgccgcggggctgcagtgctctgctcttcttctccgggacacctcgaacctgctcaagcgctgccacgggtcccaggccagctacctcttccagcaagacaagttctacaacgtggctctggacaccggagacaaggtggtgcagtgtggccgccgcgtggactgtctgaagctgtggctcatgtggaaggcgcagggtgggcaagggctggagtggcgcatcgaccaggcctttgctctcactcggtacttggtggaggagataaaaaagcgggaaggatttgagttggtcatggagcccgagttcgtcaacgtgtgcttctggtttgtgcctcccagcctgcgggggaagaaggagagcccagattacagccagaggctgtctcaggtggcccctgtgctcaaggagcgcatggtgaagaagggaaccatgatgatcggctaccagccccatgggacccgggccaacttcttccgaatggtggtggccaaccccatactggtccaggccgatatagacttccttctgggcgagctggagcgtctgggccaggacctgtgagctgcttcctctctctgccccacccaagctctgcataagctcctgggttcccaaaagcgacctttctaggaaacagtggccttgactgtgtgagcccccacacactaactctcctagctaagtattggctgccaggacggtgtctaagcacactacagtctgttcttacgaaatgtgcttcttttaagtcggtcatagtggtacacaccgttaataccagcactggggaggcagaggcagacacaagcagatctcttgagtttgacgccagcccggtctacagagctggcctacacagaaaaaaaacctgtcccaaaaaaaaagaaaggaaggaagtaagaaaggaaaagaaagaaatatttttcattaagattatgtctataaaaaattgttattaatatgagagatatggtacgatgtattaagaaagctagatatgggggttggggatttagctcagtggtagagcccttgcctaggaagcgcaaggccctgggttcagtccccagctccgaaaaaaagaaccacaaaaaaaaaaaaaaaaaaaaaaaaaagaaagctagatatgagtttatatatcatggtatctgagttagactaaaaaaaaaaaatacataggaaaaggcggtgagtggaactgtgccaaaggtcagcagttttccctggaggaggataacaggctgttcctaagtcagcctctcagaccttccctgcttccccactttattatgtaaccacatcacctacttctgagatataacaataaagctttgtcactataaaaaaaaaaaaaaaaaa

SEQ ID NO: 3142 - DNA, 2573 bp, Rattus norvegicus
  Genbank Accession No. NM_021835
gacgactggtctgcgccgccggagaacctctgtcgctggggctggtccgcgggctccgaggaaccgctgcttcctgagagcgctccgtgagtgaccgcgacttttcaaagctccggatcgcgcgggaccaaccaacgtgagtgcaagcggtgtcttaaccctgcgctccctggagcgaactggggaggagggcgcaggggggagcactgcggtctggagcgcacgctcctaaacaaactttgttactgaagcggggacgcgcgggtatcccccgcttcccggcgcgctgttgcggccccgaaacttctgcgcacagcccaggctaaccccgcgtgaagtgaccgactgttctatgactgcaaagatggaaacgaccttctacgacgatgccctcaacgcctcgttcctccagtccgagagtggcgcctacggctacagtaaccctaagattctgaagcagagcatgaccttgaacctggccgacccggtgggcaatctgaagccgcacctccgagccaagaactcggaccttctcacgtcgcccgacgtcgggctgctcaagctggcgtcgccggagctggagcgcctgatcatccagtccagcaatgggcacatcaccactacaccgacccccactcagttcttgtgccccaagaacgtgaccgacgagcaggagggcttcgccgaaggcttcgtgcgcgccctagctgaactgcatagccagaatacgctgcccagtgtcacctccgcggcacaacctgtcagtggggcgggcatggtcgctcccgctgtggcctcagtagctggcgctggcggcggcggcggctacagcgccagcctgcacagtgagcctccggtctacgccaacctcagcaacttcaacccgggtgcgctgagcagcggcggtggggcgccctcctatggcgcgaccgggctggcctttccatcgcagccccagcagcagcagcagccgcctcagccgccgcaccacttgccccaacagatcccggtgcagcacccgcggctgcaggcgctgaaggaagagccgcagacggtgccggagatgccgggagagacgccgcccttgtcccccatcgacatggagtctcaggagcggatcaaggcggagaggaagcgcatgagaaaccgcatcgctgcctccaagtgccggaaaaggaagctggagcggatcgcccggctagaggaaaaagtgaaaaccttgaaagcgcaaaactccgagctggcgtccacggccaacatgctcagggaacaggtggcacagcttaaacagaaagtcatgaaccacgttaacagtgggtgccaactcatgctaacgcagcagttgcaaacgttttgaggacagactgtcagggctgaggggcagtggaagaaaaaaataacagagataaacttgagaacttgactggttgcgacagagaaaaaaaagtgtccgagtactgaagccaagggtacacaagatggactgggttgcgacctgacggcgcccccaatgtgctggagtgggaaggacgtggcgcgcctggctttggcgaggagccagagagcagcggcctgttcgcgacgctttgcgaacgggctgtgccgcgaccagaacgatggacttttcgttaacattgaccaagaactgcatggacctaacattcgatctcattcagtattaaggggggtgggtgggggcttacaaactgcaatagagactgtagattgcttctctagtgctccgtaagaacacaaagcagggagggctgggaaggggagggaggcttgtgagtaccaggctagattgcggatgaactcccctggcctgcctctctcaactgtgtatgtacatatatttttttttaatttgatgaaagctgattactgtctataataaacagcttcctgcctttgtaagttatttcatgtttgtttgtttgggtgtcctacccagtgtttgtaaataagagatttgaagcattctgagtttaccatttgtaataaagtatataatttttttatgttttgtttctgaaaatttccagaaaggatatttaagaaaacacaataaaccattgagaagtagcccccaacctctctgctgcattatcgatagataatgagagctaggtgaaatgacagctgagtgtctgtatgctggggtgagagcctgtagtccctcccgtctggttgtaggaatagacaccctgcatgctatcattgactcatactctctccccagcaacccacaagtccagactgttgaccagaagatggtgcagtgtttcttaaggctggaagaagagggtgttgcaaggggagagggacagcccactgggaaagcagatgcttgagttgagagccatatcaagtagcatgcgctgtgatcgtttataataataataaagacttcagcaattagatgtttatctcaaagcagggacccatggaaggttttacaaaaggtgtctccttccaacttggattctgacgactcctagaaaaagatgacctttgcttgtgcatatttataatagttcgtatcacaataaatgtattcaaataatggtttt

SEQ ID NO: 3143 - DNA, 1035 bp, Rattus norvegicus
  Genbank Accession No. NM_021836
atgtgcacgaaaatggaacaggctttctatcacgacgactcttacgcagcggcaggatacggtcggagccctggcagtctttctcttcacgactacaaactcctgaaacccaccttagcgctcaacctggcagatccttatcggggtctcaagggtcctggggcgcggggtccaggcccagagggcagtggggcaggcagctacttttcgggtcagggatcagacacaggcgcatctctgaagctagcctccacggaactggagcgcttgatcgtccccaacagcaacggcgtgatcacgacgacgcccacgcctccgggacagtacttttacccccgtgggggcggcagcggcggaggtacagggggcggcgtcaccgaggagcaggagggctttgcggacggttttgtcaaagccctggacgacctgcagaagatgaaccacgtgacgccccccaacgtgtctctgggcgccagcgggggtccccaggccgggccagggggcgtctatgctggtccggagccgcctccggtctacaccaacctcagcagttactccccagcctctgcaccctctggaggttccgggaccgccgtcgggactgggagctcatacccgacggccaccatcagctacctcccacatgcaccaccctttgcgggcggccacccggcacagctgggcttgagccgtggcgcttccgcctttaaagaggaaccgcagaccgtaccggaggcacgcagccgcgacgccacgccgcctgtgtcccccatcaacatggaagaccaggagcgcatcaaagtggagcgaaagcggctgcggaacaggctggcggccaccaaatgccggaagcggaagctggagcgcatcgcgcgcctggaggacaaggtgaagacactcaaggctgagaacgcggggctgtcaagtgctgccggcctcctacgggagcaagtggcgcagctcaagcagaaggtcatgacccacgtcagcaacggctgccagttgctgctaggggtcaagggacacgccttctga

SEQ ID NO: 3144 - DNA, 393 bp, Rattus norvegicus
  Genbank Accession No. NM_021840
atgtctggtcgcggcaagcagggaggcaaggctcgcgccaaggccaagacccgctcctcccgggccggcctgcagttccccgtgggccgcgtgcaccgtctgttgcgcaagggaaactactcggagcgcgtgggcgcgggcgccccggtgtacctggcggccgtactggagtacctgacggccgaaatcctggagcttgcggctaatgcggcgagggacaacaagaagacgcggatcatcccgcgccacctgcagctggccatccgcaacgatgaggagctcaacaagctgctgggccgcgtgaccatcgcgcagggcggcgttctgcccaacatccaggctgtgctgctgcccaagaagaccgagagccaccacaagcctaagggaaagtaa

SEQ ID NO: 3145 - DNA, 537 bp, Rattus norvegicus
  Genbank Accession No. NM_022194
atggaaatctgcaggggaccttacagtcacctaatctctctccttctcatccttctgtttcgttcagagtcagctggccaccctgctgggaaaagaccctgcaagatgcaagccttcagaatctgggatactaaccagaagaccttctacctgaggaacaaccagctcattgctgggtacttacaaggaccaaataccaaactagaagaaaagatagacatggtgcctattgactttcggaatgtgttcttgggcatccacgggggcaagctgtgcctgtcttgtgtcaagtctggagatgacaccaagctccagctggaggaggttaacatcactgatctgaacaagaacaaagaagaagacaagcgctttaccttcatccgctccgagacaggccctaccaccagcttcgaatcacttgcctgtccaggatggttcctctgcacaacactagaggctgatcatcccgtgagcctcaccaacacaccaaaagagccctgtacagtcacaaagttctacttccaggaagaccaatag

SEQ ID NO: 3146 - DNA, 2175 bp, Rattus norvegicus
  Genbank Accession No. NM_022229
gcagaaatgcttcgactacccacagtccttcgccagatgagaccagtgtctcgggcactggctcctcatctcactcgggcctatgccaaagatgtaaaatttggtgcggatgctcgagccttaatgcttcaaggtgtagaccttttagccgatgctgtagctgttacaatggggccaaagggaagaacagtgattattgaacagagttggggaagtcccaaagtaacaaaagatggggtcactgttgcaaagtcaattgatttaaaggataaatacaaaaatatcggagctaagcttgttcaggatgttgccaataacacaaatgaagaggctggggatggcaccaccactgccactgttctggcacggtctattgccaaggagggctttgagaagatcagcaaaggggctaatccagtggaaatccggagaggtgtgatgttggctgttgatgctgtaattgctgaacttaagaaacaatctaaacctgtgacaacccctgaagaaattgctcaggttgctacaatttctgcaaacggagacaaagacattgggaacatcatttctgatgcaatgaagaaggttggaagaaagggtgtcatcacagtgaaggatggaaaaaccctgaatgatgagctagaaattattgaaggcatgaagtttgatagaggatatatttccccatattttattaacacatcaaaaggtcaaaaatgtgaattccaagatgcctatgttttgttgagtgaaaagaaaatttctagtgttcagtccattgtacctgctcttgaaattgccaatgctcaccggaagcccttggtcataattgctgaagatgttgatggagaagctcttagcacactggttttgaacaggctaaaagttggtcttcaggttgtagcagtcaaagctccagggtttggggacaacaggaagaaccagcttaaagatatggctatcgctactggtggtgcggtgtttggagaagagggtttgaatctaaatcttgaagatgttcaagctcatgatttagggaaagttggagaggtcatcgtcaccaaagatgatgccatgcttttgaaaggaaaaggtgacaaagctcacattgaaaaacgtattcaagaaatcactgagcagctagacatcaccactagtgaatatgagaaggaaaagctgaacgagcgacttgctaaactctcagatggagtagccgtgttgaaggttggagggacaagtgatgttgaagtgaatgagaagaaagacagagttacagatgctctcaatgctacaagagcagctgttgaagaaggcattgttctaggagggggctgtgctctacttcggtgcatcccagccttggattcattaaagcctgctaatgaagatcagaagataggtatagaaattattaaaagagcacttaaaattcctgcaatgacgattgctaagaatgcaggtgttgaaggatctttgatagttgaaaaaattctgcagagttcctcagaggttggctatgatgccatgcttggagattttgtgaacatggtggaaaagggaatcattgatccaacaaaggttgtaagaactgctttactggatgctgctggggtggcccccctgctaactacagccgaagctgtagtgacagaaattcctaaagaagagaaggaccctggaatgggtgcaatgggtggaatgggagggggtatgggaggtggcatgttctaactcctagaatagtgctttgcccttatcaatgaactgtggcaggaagctcaaggcaggttcctcaccaataacttcagagaagtcacctgaagaaaatgactgaagagaaggctggctgatcactgtaaccatcagttactggtttcctttgacaatacataatggtttactgctgtcattgtccatgcctacagataatttattttgtatttttgaataaagacatttgtacattcctgatgctgggtgcaagagccagtgtcctgctttcaacttaaatcactgaggcatctctactgttctgttagcatcaggactgtagcgctgtgtcaccacatgagaagttcagaagcagcctttctgtggagggtgagaatgattgtgtacagagtagagaagtatccaattatgtgacaacctttgtgtaataaaattttgtttaaagtt

SEQ ID NO: 3147 - DNA, 1160 bp, Rattus norvegicus
  Genbank Accession No. NM_022381
ttgtcagcaagacctcgctccccttacagtaactctcatctagacgtcgcaactccgccaccatgtttgaggcacgcctgatccagggctccatcctgaagaaggtgctggaggccctcaaagacctcatcaatgaggcctgctgggacatcagttcgggcggcgtgaacctacagagcatggattcgtctcacgtctccttagtgcagcttactctgcgctccgaaggcttcgacacataccgctgcgatcgcaacctggccatgggcgtgaacctcaccagcatgtccaaaattctaaaatgtgctggtaatgaagacatcattacattaagggctgaagataatgctgataccttagcactagtatttgaagcaccaaatcaagagaaagtttcagactatgagatgaagttaatggacttagacgttgagcaacttggaatcccagaacaggagtacagctgcgtagtaaagatgccatctggtgaatttgcacgtatatgccgggaccttagccatattggagatgctgtggtgatctcctgtgcaaaggacggggtgaagttttctgcgagtggggagcttggcaatgggaacattaagttgtcccagacaagcaatgttgataaagaagaggaagctgtgtccatagagatgaatgagccagttcagctaacttttgctctgaggtacctgaactttttcacaaaagccactccactgtctcctacagtaacactcagtatgtctgcagatgtaccccttgttgtagagtataaaattgctgacatgggacacttaaagtattatttggctcccaagatcgaagatgaagaaggatcttaggcgttgctagaaattgagaaactaaacctttgacgatcgcttctgagatgccagcgtgttctgaggtcttttctgtcaccaagtttgtacctgagtattcttaaatattaaaataaaatgtagatatcttctgtaaataaccttttttttcctctccataatttgcttacagaataagctccaaagtaaaaactggttttgttaacataaatgtctctgccttacaaatactggtgattttcataaatgatcttgacgctaaatgcagttttaagaaatatttttcaatttaaataaagttaactgaatttg

SEQ ID NO: 3148 - DNA, 1307 bp, Rattus norvegicus
  Genbank Accession No. NM_022390
gtgcttttgggtttggcgatcagttccgcgggagtcttgtcaggagcaggatggcggcttcgggcgaggcgcgccgagtgctggtgtacggcggcaggggtgctctgggctcgcgctgcgtacaggccttccgggcccgcaactggtgggttgccagcattgatgtggtggagaatgaagaggccagtgccagcgtgattgttaagatgacagattcattcacggagcaggctgaccaggtcactgctgaggtcgggaagctcctaggtgaccagaaggtggatgccattctctgtgtggctggaggatgggccgggggcaatgccaaatccaagtcactctttaaaaactgtgacctgatgtggaagcagagtatttggacatccaccatctctagccacttggccacaaagcacctgaaggaaggaggcctcttgaccctggccggggccaaagctgcgttggatgggactcctgggatgattggctacggcatggccaagggagccgtccatcagctctgccagagccttgcagggaagaacagtggcatgccgtctggggctgccgccattgctgtgcttcccgtcaccctggatactccgatgaacaggaaatcaatgcccgaggcagacttcagctcctggacacccttagagttcctggtggagaccttccatgactggatcactgggaacaaacggccaaactcaggaagcctaatccaggtggtaaccacagacgggaagacagagcttactccagcctatttctaagttgcacctcagtgcccaggagaaccctcttgaaactctactaacctgtgtctgtattgccgcacctggccccatgttgtctgtattcctgtttgtggtacgagataactagtcccgtttgtctcttacgtagtgctccttttttgtcctgggctggtgaggtatgtttatggggaatgagtgggggcctgtaagtagcaccatcagtgctgaggcccagggaggtatgtgtgcaggccgtcatcccagcatcccagactgctttggagacccgtttgatagttcattttttagcatttggggcactttgaaatccaacttgtttttaaattccatgttagtgccatagatgtagtttttgctgcctgaaaattaactgccatgaaaattcattggtgatgtaagtaagcaaaacctaatggactctgttggatatcatttgtgttccagcctaggctaagtgtttatgagaactattcgtgagtgttcggagtgttcttcctaataaacacatttcatgtccccgaattc

SEQ ID NO: 3149 - DNA, 900 bp, Rattus norvegicus
  Genbank Accession No. NM_022518
gcggctgctaaggaccgagtctggtcgggcggcctgaggtctctggccagtatcgcttccacctgtccacaaacatggggaatatctttgcaaacctcttcaagggcctttttggcaaaaaagaaatgcgcattctcatggtgggcctggatgctgcagggaagacaacaattctatacaaactgaagctgggcgaaattgtgaccaccattcccaccattggtttcaacgtggagactgttgaatacaagaatatcagcttcaccgtgtgggatgtgggtggccaggacaagattcggccgctgtggcgccactacttccagaacacccaaggcttgatcttcgtagtggacagcaatgacagagagcgtgtgaacgaggcccgtgaagagcttatgaggatgctagctgaagatgagctccgagatgccgttctcttggtgtttgccaacaagcaggacctccccaatgccatgaatgcggccgaaatcacagacaagctggggctgcactctctacgccacaggaactggtacattcaggctacctgtgccaccagcggagacgggctctatgaaggactagattggctgtctaatcagctccggaaccagaagtgaaccagacccctccttccccctcacttcctcttctccgccctcagctttcctctcatgtggcaaacgtgcgactctgtggtcctgagtgccagaagctgtctccatgggttggtcacagtgtgcatcgcaccgtgctgtacatgtgcagacgcagcctgcagccaggtttttatttaatgtaaatagtttctgtttccactgaggcagtttctggtactcctatgcaatattacttagctttttttattgtaaaaagagaatcaactcactgtcagtacct

SEQ ID NO: 3150 - DNA, 840 bp, Rattus norvegicus
  Genbank Accession No. NM_022536
gctgcgcctctcggagcgcaatatgaaggtgctcttcgccgccgccctcatcgtgggctccgttgtcttccttttgctgcctggaccctccgtggccaacgataagaagaagggacctaaagtcacagtcaaggtatactttgatttccaaattggagacgaacctgtaggacgagtgacctttggactctttggaaagactgttccaaaaacagtggataattttgtagccttagctacaggagagaaaggatttggctataagaacagcaagttccatcgtgtcatcaaggacttcatgatccagggtggagacttcaccaggggagatggcacaggaggaaagagcatctatggtgagcgcttcccagatgagaacttcaagctgaagcactatgggcccggatgggtgagcatggccaatgcaggcaaagacaccaatggctcccagttcttcataactacagtcaagacctcctggctagacggcaagcacgtggttttcggcaaagttctggaaggcatggatgtggtacggaaggtggagaacaccaagacggacagccgggacaagcccctgaaggatgtgatcattgtagactgtggcaagatcgaagtggagaaaccctttgccattgccaaggagtagagagagcctcggggacctcatccctctaaacagctgtctgtgcgggtcctgtcgattccctcacaggtgaaagcagccagtcacaaggctctgtgcggctctggctccagtgcttccatccgacggggtggccacacccctcacattccacaggcctgatttttatataaaactcctaccaatgctgatat

SEQ ID NO: 3151 - DNA, 1514 bp, Rattus norvegicus
  Genbank Accession No. NM_022546
tgaacccgcaggtttgcaccggaggctctcgcgggggcctcgctggccctgggcggggactcgcgggctgaggacgctcctgtgtccccagaatcctgcagaaggacagcgccatgtccacgttcaggcaggaggacgttgaggaccattatgagatgggagaggagcttggcagcggccagttcgccatcgtgcgcaagtgccagcagaagggcaccggcatggagtacgcggccaagttcataaagaagcggcgcctgccgtccagccggcgcggtgtgagccgtgaggagatcgagcgcgaggtgagcatcctgcgcgagatccgccaccccaacatcatcacgctgcacgatgtgttcgagaacaagacagatgtggtgctgatcttggagctggtgtccggcggcgaacttttcgactttctggctgagaaggagtcactgacagaggatgaggccacgcagttcctcaagcagatcctggacggtgtccactacctgcactccaagcgcatcgcgcactttgacctgaagccggagaacatcatgttgctggacaagcatgcagccagcccacgcattaagctcatcgactttggcatcgcgcacaggatcgaggccggtagcgagttcaagaacatctttggcacgccagagttcgtcgcccctgagattgtaaactatgaaccacttggcttggaagctgatatgtggagcatcggcgtcatcacctacatcctcctgagcggggcttccccattcctgggggagaccaagcaggaaacgctgacaaacatctcggctgtgaactatgactttgatgaagagtacttcagcagcaccagtgaactggccaaggacttcatccgaaggctgctggtcaaagatcccaagaggaggatgaccatcgcacagagcctggagcattcctggatcaaggttcgccggcgtgaggacggcgcccggaagccagagcgacgccgactgcgcgcggcgcgcctgcgcgagtacagtctcaagtcgcactcaagcatgccgcgaaacacgagctacgccagcttcgagcgcttctcgcgcgtgctggaggacgtggcggcggcggagcaggggctgcgcgagctgcagcggggccggcggcagtgccgggagcgcgtgtgcgcgctgcgcgtggctgcggaacagcgggaggcgcgctgccgcgacgggagcgccgggctaggccgcgacctgcgacgcctgcgcacggagctgggtcgcaccgaggctctgcgcacgcgcgcgcaggaggaggcacgggcagcgctcttgggcgctggtggcctgaaacgtcgcctgtgtcgccttgagaaccgctacgacgcgctagccgcacaggtggctgctgaggtgcagttcgtgcgcgatctggtacgcgcgctggagcaggagcggctgcaggccgagtgcggcgtgcgctaggctgcgacacccccagatctccggccatccccagaataaagctactttccacgc

SEQ ID NO: 3152 - DNA, 1904 bp, Rattus norvegicus
  Genbank Accession No. NM_022597
gagcgactgcgggcccaggttgtcgcgctgcgctcggtgagtacaggatccagcttccaggatgtggtggtccttgatccctctctcttgtctgctggcactgaccagtgcccatgacaagccttcctcacacccactgtcggacgacatgattaactatatcaacaaacagaatacaacatggcaggctggacgcaacttctacaatgttgacataagctatctgaagaagctgtgtggaactgtcctgggtggacccaacctgccggaaagggttgggttcagcgaggacataaatctacctgaatcctttgatgcacgggaacagtggtccaattgcccgaccatcgcacagatcagagaccaggggtcctgtggctcttgttgggcatttggggcagtggaagccatgtctgaccgaatctgcattcacaccaatggccgagtcaatgtggaggtgtctgctgaggacctgcttacctgctgtggtatccagtgtggggatggctgtaatggtggctatccctctggagcatggaacttctggactagaaaaggcctggtttctggtggagtatacaattctcatataggctgcttaccctacaccatccctccctgtgaacaccatgtcaatggctcccgtcccccatgcactggagagggagatactcccaagtgcaacaagatgtgtgaggctggctactccacatcctacaaggaagataagcactatgggtacacttcctacagtgtgtctgacagcgagaaggagatcatggcggaaatctacaaaaatggcccagtggagggtgcttttactgtgttttctgacttcttgacttacaaatcaggcgtatacaagcatgaagccggtgatgtgatgggaggccatgccatccgcattctgggctggggaatagagaatggagtaccctactggctggtagcaaactcctggaacgttgactggggtgataatggtttctttaaaatcctcagaggagagaaccactgtggaattgaatcagaaatcgtggctggaatcccacgcactcagcagtactggggaagattctaatctgctgggacttgattgtatagtccttaggagactttttccaaaatttagcaatgcaggcagggagtgaggcagataggagtctttgattctttgagttcacctaacatgcatgaagctttcagcaaggtttgggtgactggaccagagctgccccccatcagagccaccctacctggctcccttctagcctatcccatgacagtgatcacagcctacatcctagcctctccctagactagtgctgtgtgtagcgcctgctgctgtggctctgtctgccatccctcccacccccacctcagcatccccagaccaagggctttggctgcaggatttccaaaggaatgaacaccaactacatgatgagaggacagatgccacccgccagctgcaccttgaagctagtcacttctaggactgtggcaggctttgatggcccaatgcagttctctggagaaaactacctttccccaaggcatctgcacccattgacaatggtaatgtgcccatctctccttggtcctgccctcaaccgatgcttttccagtcagggttttgttttttgttttgttttgtgtacctcaactgagttatgaagatttgtactggttttacagatcatctcatcgtatggaaaagaacaagcttcgtggtcagtttactgggtgaccggcagacaccacaatcaaactagtctggggaaaacctgcttttttgttgtaggtgccacgtaaccctgtcagtttgacaaggaatgaccgtgccaataaaccaattctccctctgcttggaaaaaaaaaaaaaaaaaaaaaaaaaaaaaaaa

SEQ ID NO: 3153 - DNA, 811 bp, Rattus norvegicus
  Genbank Accession No. NM_022674
gccttttctctgccttgcttgcttgagctccagcacagtccgagatggctggcggtaaggctggaaaggactccggaaaggccaagacaaaggcggtttcccgctcccagcgagcgggcttgcagttccctgtgggccgtattcatcgacacctgaaatctaggacaacaagccacggacgtgtgggcgcgaccgcagctgtgtacagcgcagccatcctggagtacctcaccgcagaggtacttgagttggcaggaaatgcatcaaaagacttgaaggtaaagcgtattacccctcgtcacttgcaacttgctatccgcggagatgaagagttggactctctgatcaaggctacgattgctggtggtggtgtcatcccacacatccacaaatcactgattgggaagaaaggacaacagaagactgtctaaggatgcctggattccttgttatctcaggactctaaatactcttaacagctgtccagtgttggtgattccagtggactgtatctctgtgaaaaacacaattttgcctttttgtaattctatttgagcaagttggaagtttaattagctttccaaccaaccaaatttctgcattcgagtcttaaccatatttaagtgttactgtggcttcaaagaagctattgaatctgaagtggtgggttttgattgagttgactgtttttaaaaaactgtttggattttaattgtgatgcagaagttatagtaacaaacatttggttttgtacagacattatttccactctggtggataagctcaataaaggtcagatcccaaactaaaa

SEQ ID NO: 3154 - DNA, 975 bp, Rattus norvegicus
  Genbank Accession No. NM_022706
cccgcctgccgagtagtcgtcgctgccgccgccgcctccgttgttgttgtggtcgcttcgccgaagtctgcggctcaaagagccggctccgtcgcttcccgccgccatgaagtggatgtttaaggaggaccactcgctggaacacagatgcgtggaatccgcgaagatcagagcgaaataccccgaccgggttccggtgatcgttgagaaagtctctggctctcagattgttgacattgacaagaggaagtacttggtcccatctgacatcactgtggctcagttcatgtggatcatcaggaaaaggatccagcttccttctgagaaggccatcttcttgtttgtggacaagacagtcccacagtccagcctaactatgggacagctttacgagaaggaaaaagatgaagatggattcttgtatgtggcctacagcggagagaacacttttggcttctgagcccttgctgggctaggtgcacccttcctgcttgtgtatcctgtaaataactggctgttctcagttactccgccggagcctccacacagacctactagtgcatttgtaactggatttatttcttaatatattggaaggttttgttttccttagattagtaaattatcatacagagttttattttcagttttcttttgtgcactgtcctcatggctatatgctccaaggaacctgtcctccggaatcacatttaatgaagatacttccgaaatgaagggcggtaggtgtggtattaaagtgacaaggagggatgacgcattgttctggattatgttcggagtgttagacggctaagtattaaaagcccccaaattaaatccttagcaatcagaacacttgcttcactagattttgccaactgcaaatcatgttggactgagctaatctgttctttctgagactataaggtaaatgattaacaataaagcctccatgtaaaaggcaaaaaaaaaaaa

SEQ ID NO: 3155 - DNA, 558 bp, Rattus norvegicus
  Genbank Accession No. NM_022708
tcctgatttcttcaccatgcaaggtctctcattcacatccactgctgccaccttcttcttggtcctctgtctgcaactggggatcaatgaaggccaggataatgaaactattccacagccacttttatttcaactaaatgttccaagtacacctgacgaaaatcaggaggttgatatgtcacttactcttcaaacacaatataaagaatgtctggtggtcaaagcttaccttataagtaatacaccggttgatggtggcttcaactatatacaaacacgctgcatctgcaatgatcatcctaccaccctttactggacttttgtagtcactcaaactttaacatttagaataatggttgacattgttaaggataaaggtatctgccctaataacgtcgcagtggtgcccatctcaggaaaccggtacttcacagaccgtactgtgtacgtgaattaacaaaggcttcttatgcatctttcaaaaccattatcattttctctaagtaaaattgactggaatacccattgtaatctgttaaatgaacttcttataagcgg

SEQ ID NO: 3156 - DNA, 861 bp, Rattus norvegicus
  Genbank Accession No. NM_022867
ggcacgagccaggacccccgcgcgccatgccgtccgagaagaccttcaaacagcgccggagcttcgaacaaagagtggaagatgtccggctcatccgggagcagcaccccaccaagatcccagtgattatagagcgatacaagggtgagaagcagctgcccgtcctggacaagaccaagttccttgtacctgatcacgtgaatatgagcgaactcatcaagataattagaaggcgcctgcagctcaatgctaaccaagccttcttcctcctggtgaatgggcacagcatggtgagtgtgtccacacccatctctgaagtgtacgagagcgagagagatgaagacggcttcctgtacatggtctatgcctcccaggagacgttcgggacagcactggctgttacatacatgtcagctctgaaggcaacagcaacaggaagagagccatgcttgtgacagacatacagccacttccaactaaagcaagcctctgcttcctgctacctgcatggagcccactgtgacactcagaccatccccggtcactcactcgtgtctgagaatctcagtgagagctgcctctgtcacggaccggaagccaacacagccacctctcgacctgctccccacagcacccaccctccctgcatgcaagctgtccctgctaacccccaatgttatgttacactgtgtaaatccccactgctgccgtgtgtgggttgtgtacgtcgtcatgtccctggtttataactatggtgcggtcgggaaggattcctgtaatgctgctctaaggatctggctcaggcagccattgtaggacacctgtactctgatgcactaagtccaataaaggcacaactgg

SEQ ID NO: 3157 - DNA, 715 bp, Rattus norvegicus
  Genbank Accession No. NM_022949
tctcgctgagcccgccaacatggtgttcaggcgtttcgtggaggttggccgagtggcctacatctcctttgggccccatgctggaaagctggtcgcaatcgtagatgttattgatcaaaacagggctttagtggatggaccctgcacccgggtgaggagacaggccatgcctttcaaatgcatgcagctcactgacttcatcctcaagttcccacacagtgcgcgccagaagtatgtacggaaagcttgggagaaggcagacatcaatacaaagtgggccgccacacgatgggccaagaaaattgatgccagagaaaggaaagccaagatgacagattttgatcggttcaaagtcatgaaggcaaagaaaatgaggaacagaataatcaagactgaagtgaagaaactccagagagctgctctcctgaaagcttctcctaaaaaagctgctgttgctaaggctgccattgcggccgctgcagcagctaaagccaaggtcccagccaagaaggcaacaggaccaggccagaaggccgcagcgcagaaggcctctgcacagaaggctgcaggccagaaggcagcgccccctgctaaaggtcagaagggtcagaagaccccggcccagaaggcacctgctccaaaggcagctggcaagaaagcatgaggaggctacacaaagaataaaggttctttttgactgaaaaaaaaaaaaaaa

SEQ ID NO: 3158 - DNA, 4131 bp, Rattus norvegicus
  Genbank Accession No. NM_022951
ctcggagaaagacaggccggccatcaggaaaacaaacaagcctcagcaacatctaaacccttgaaaggatcctgagagaggggggaaagggaaaacagcagccaccagcccaaccacttgtgtcttctgcccctccccacctatcttgcccaccccaccagcccacgctgcttgggacttgaaatctgtggccgaaggaccgtcaccacataacttcaaaaataatcaaccaccctccctacccaaacccacccaatctcactcatccagcatttcctttttggagtccactcagaatttttttcaacgaccccctctccctaatggagttgggtggggggaaaatgaaaactgagttggtctttacttttttaagagactttttgatccaatgaggccccacaagtaactgagtttgggtcctggttggttgttttattttttttcctccaaaattttacccctcccccctgagcccgaggtgctgacgtcgcaaaaaaattggataaagccaccatcatgggttcaggacccatagaccccaaagaacttctcaagggcctagatagcttccttactcgggatggagaagtgaagagtgtggatggaattgccaagatcttcagtctaatgaaggaggcacgaaagatggtgagtcgatgcacgtacttgaatattatcctgcagacccgggcgccggaggtgctagtcaagtttattgacgtcggcggctacaagcttctgaacagttggttaacgtattcaaagacgaccaacaacattcctctcctacagcagattctgctgactctgcagcacctcccactgactgtggaccacctcaagcagaacaacacagcgaagctagtgaagcagctcagcaagtcaagcgaggacgaagagctccggaaattggcatcagtccttgtcagtgactggatggctgtcatccgctcccagagtagcacccagcctgcagagaaagataagaagaaaaggaaggaagaggggaaaagtcgaaccacgcttcctgagcggcctttgactgaagtgaaggctgaaacccgggctgaggaagccccagagaagaagaaggagaagcccaagtcacttagaactacggcacccagtcatgccaagttccgttctactggactggagctggacaccccatctttggtgcctgtgaagaagaactccagcactgtggttgtgtcagacaagtacaacctgaagcccatccccctcaagcggcagagtgccacagctgctccaggcgatgctgccccgcctgcagagaagaagtacaagcccctcaacacaacccccaataccaccaaagaaattaaagtgaagatcatccccccacagcccatggagggcctcggttttctggatgctctcaattccgcccctgtcccaggcatcaaaattaagaagaagaagaaggttctatcacctactgctgccaagcccagcccttttgaagggaaaacaagcactgagccaagcacagccaaaccttcctccccagagcctgcagcccccgctgagcccatggacacagaccgtcctggcacccctgtccccgctgtggaagtcccggagctcatggatgcagcctcttcggagccaggagctctggatgcaaagcctgtggaaagccctggagatcccaaccagctgactcgaaagggcagaaagagaaaaactgtgacgtggcctgaggagggcaagctgagggagtatttctacttcgaactggatgaaactgagcgagtgaatgtgaacaagatcaaggactttggggaggctgctaagcgtgagatactgtcggaccgacatgcttttgagacagcccggcgactaagccatgacaatatggaggagaaagtgccctgggtatgtcccaggcctctggttctgccctcacctcttgtcatccctggaagcaacagccaggagcgatacatccaggctgagcgggagaagggcatccttcaggagctcttcctgaacaaggagagtcctcacgagcctgatcctgagccgtatgaacccattcctcccaaactcatccccttggatgaggagtgcgccatggatgagactccgtatgttgagaccctggagcctggagggtctggtggctcacctgatggagcaggaggctccaagctgcctccagttctggccaatcttatggggagcatgggagcagggaagagcccccagggccctggaggcggtggcatcaatgttcaggagatcctcacttccataatgggcagtccaaacaaccacccttcagaggagctgctgaaacagccagactactcagacaagctgaagcagatgctggtgccacatgggctcctaggtcctggtcctgtagccaatggcttcccaccaggaggccctgggggccccaagggtatgcagcatttcccccctggtcctggagggcccatgccaggtccccatggaggccctggtggaccagtgggtccacgtctcctgggtcccccaccaccttctcggggaggtgatccattctgggatggcccaggtgaccccatgcgaggtggcccaatgcgtgggggtccaggacctggtcctggaccataccacagaggccgagggggtcgtggaggaaatgaaccgccaccaccccctccattccgaggagccagaggaggtcgttctggaggaggccccccaaatggccgagggggtcctggtggaggtggcatggttggaggtggtgggcaccgcccccatgaaggccctggagggagcatgggcagtggacatcggtctcatgagggccctggagggagcatgggcagtggacatcggtctcatgaaggccctggacacgggggaccccatggccaccggccacatgacgtccctagccatcgaggccacgaccatcgagggccaccacctcatgaacaccgcggtcatgatggccatgggggaggcggccaccgagggcatgatggaggccacagtcacggaggagacatgtcaaaccgccctgtctgccgacacttcatgatgaagggcaactgccgctatgagaacaactgtgccttctaccacccaggggtcaacgggcccccactgccctaggcctgcctgccctacccgcacccctgtggactgcagctttgctccttccacttggttatggcttctgtgaggcccactttccttttccccagctgatgaggagccggccccctcagttcccacctggttgggtttctgggggtttctgattcctggtgtgcattgatgtacatattccctccagtctggagcggagaggagagagactggactgctgagacggctggcttcactttgtgaggagatttgccctgtgccccaaaccccttccagtattagccccgatgcctgagaacctgaagccggccaccctggagacctctgctctccacatgcacacggaactgagttggtcagctgcacttaggaaaccgtccaagctaagctcattatcttcacagggtgagggggtggtgaggggtaccatatatcccactgcactgagggctcaagctggctgaagctgagttctggaactaccccccacttgtgccccacatgggccagtcactgttgagtcctttctcaagaaggactgcaactgttacttcccaggtcatcgtgggtctgctaggttcagtgatggcacattcatatctgtgtccagtggaagttgtatctggcagaggggtggcctgtagtgttgggccactcttgcctacagccattttcgagactccgtgaggccagctttcattaactttagccgggtataccgggcctgacgcactacatgcactgcctttgggagtgggctggctccttaccccgtaaggagccctgtcagtgaggcttcctgggtagactcagcaggaggggcccttcccagtcctctcctccccctgtcttggcatcagttgttttctatgaaaacagtgggttggttttgtgcagggtcttgggttagaaccaatggatttgaggagttttttcttttggttttgtatattttgtacattaataataaacagtggaaagagaagcagctcattt

SEQ ID NO: 3159 - DNA, 1213 bp, Rattus norvegicus
  Genbank Accession No. NM_024148
agacagactccattctttgtgcagtgaggggctccctgcctcgttgggaggcagcgtagtaaacactgcttcggtgctccagacgcctaagggctttcgttacagcgatgccgaagcgggggaagagagcggcagcggaagacggggaagaacccaagtccgagccagagaccaagaagagtaagggggcagcaaagaaaactgagaaggaggccgcaggagagggccctgtcctgtatgaggaccctccagatcagaaaacgtcagccagtggcaaatctgccacactcaagatatgctcctggaatgtggatgggcttcgagcctggattaaaaagaaaggcttggattgggtaaaggaagaagcaccagacatcttgtgcctccaagagaccaaatgctcagagaacaaactcccggctgaactgcaagagctgcctggactcacccatcagtactggtcagctccatcagacaaagaaggatatagtggtgtgggcctactttcccgccaatgcccgctcaaagtctcttatggcattggtgaggaagaacatgatcaagaaggccgggtgattgtggctgaatttgagtcctttatcttggtaacagcctatgttccgaacgcaggaaggggtctggtaagactggagtaccgacagcgatgggatgaagccttcagaaagtttctaaaggacttggcttcccggaaacctcttgtgctgtgtggggatctcaatgtggctcatgaagaaatagaccttcgtaaccccaaaggaaacaaaaagaatgctggttttactccccaggagcgccaaggctttggggaaatgctacaggctgtaccactggctgacagcttccggcatctctaccccaacactgcctacgcttatactttctggacttacatgatgaatgcccgctctaagaatgttggttggcgccttgattactttttgctgtctcactctcttttacctgctttgtgcgacagcaagatccggtccaaggctcttggcagtgaccactgtcccatcaccctttacctagcactgtgacactcccctcaagtagcttcatgctgggaaatagcctcctctcctccaggagaccagtgcgttatctcttcttcaggtgtttactcccctctaaaccaaacttctggtttcctttaaacaatccaagtgaaataaaagtcctacttttcaac

SEQ ID NO: 3160 - DNA, 1058 bp, Rattus norvegicus
  Genbank Accession No. NM_024149
cctccttctgctgttgctccccatccccccgcggccggccggttccagccctcgccccgcgtcccctgcccgcgcccccgccccgggccccgccatgggcctcacggtgtccgcgctcttttcgcggatcttcgggaagaagcagatgcggatccttatggttggcttggatgcggctggcaagactaccatcctgtacaaactgaagttgggggagattgtcaccaccatccccaccataggcttcaatgtggaaacagtggaatataagaacatctgtttcacagtctgggatgtcggaggccaggataagattcggcctttgtggcggcactacttccagaacactcagggcctcatctttgtggtggacagcaatgaccgggagcgggtccaggagtctgctgatgaactccagaagatgctgcaggaggatgagcttcgggatgcggtgctgttggtgtttgccaacaagcaggacatgcccaatgccatgcctgtgagcgaactgactgacaagctggggcttcaacacttgcgtagccgcacgtggtacgtccaggccacctgtgccacccaaggcacaggcctgtatgatggtctggactggctgtcccatgagctatcaaagcgctagccagccaggggcaggcccctgctgcccggaagctcccgcgtgcatcccgggatggccagactcccgggactcctcaggcagtgcccttccttcccacttttcctccccacagacaggcctctgctcctgtgcctgcctgcatgctctctcttgttgttggagcctggagccttgctctctgggcacagagggttctgctctcctgcctgctgggacctgtggaagggcttcctggccaaggccccctcttccaggggaggagcagggatctggatttaatttcgttttggttttggtttttttggtttttttctgttttgggtgtacccttggggccaggtttggggggaggaaagtgagggctccgggtggtgctatgatgtgggactggatattgagtaataaatttgctgtggtttgt

SEQ ID NO: 3161 - DNA, 1608 bp, Rattus norvegicus
  Genbank Accession No. NM_024151
gacagccgaacacttaacgccgcgccggagccaccgcaccagtcgccgagcaggtcccggtcccgctacgtcgtgtcccgcggctctgccgacactccggcctgagagacgggtcttcagccttttctcttccgcccactcagttgtgagccggaaccgtgaaggcccgagggcggaccagaccctctctttttttgaccatcaagtgccaccaccgctatgggcctcaccatctcctctctcttctcgcgcctcttcggcaagaagcagatgcgcattttgatggttggattggatgctgcgggcaagacgacgattctgtataaactgaaactaggggagatagtcaccaccattcctaccattggttttaatgtggaaacagtagaatataagaacatttgtttcacagtttgggatgttggtggtcaagataaaattaggcctctctggaggcattacttccagaatacccagggtctcattttcgtggtagatagcaatgatcgtgaaagaattcaggaaggagcagccgtgctgcagaaaatgcttctggaagatgagctgcaggatgctgtgctgctgctttttgccaacaaacaggatttgccaaatgctatggccatcagtgagatgacagacaagttaggtcttcagtctctccggaacagaacatggtatgtccaagccacttgtgctacacaaggaactggtctgtacgaggggctggattggctgtcaaatgaactttcaaaacgctaaatgaaactggatatctaaccaaggacatgtttgatagaattggtctaggcttgttacaacaaaattagtttgcatcttggttattaaaggatatctgagacggtttgggcagaaattacagcatttaaaacttgttttgttgccaattattgtttaccaagaacaatgttgctgtttagcaatatgcttgggtttaagagaaattctccttgggggaaaaaagtgtccattattatacttcccctgaacctgaatgcctggatagatagcgattgtgacacccttaaataaatctgttttgagtgttttttgagcccacaccaataatgttttaaagttacccccttggaactcactgatacctatcattcctcgggcagtctgctgagttaaaaatgtagcattccatttgtatttatttcccccttgccaaaaagatttttctaataatgcttgtactggccagggatgagctccacaacactattcagttttcttgtactgaggattcccccacctccctcacattattgactcctggcttctatcagccaaactttgatgtagtttggatttgatagctaattctgggctggtttcaaagagttcatattgagataacttttaatactcagcaaattgtcttcctttatattatcttttttatgttgcatgttgccttttggaatcagcctgactctttgcccagcatatgatagttctgctggtattttactgtttactgatgaacatatcttcattaagaattttttgaaaactcatcaaattcaatgaataagttttcttcataacccatttggaattattcctaataaaatgattttt

SEQ ID NO: 3162 - DNA, 2073 bp, Rattus norvegicus
  Genbank Accession No. NM_024351
gtctctgtgtggtctcgtcatcagcacagctgggcctacacgcaagcaaccatgtctaagggacctgcggttggcattgatcttggcaccacctactcctgtgtgggtgtcttccagcatggaaaggtggaaataattgccaatgaccagggtaaccgcaccacgccgagctatgttgctttcaccgacacagaacgattaattggggatgcggccaagaatcaggttgcaatgaaccccaccaacacagtttttgatgccaaacgtctgatcggacgtaggttcgatgatgctgttgttcagtctgacatgaagcactggcccttcatggtggtgaacgatgcaggcaggcccaaggtccaagtcgaatacaaaggggagacaaaaagtttctatcctgaggaagtgtcttcaatggttctgacaaaaatgaaggaaattgcagaagcttaccttggaaagactgttaccaatgccgtggtcaccgtgccagcttacttcaatgactctcagcgacaggcaacaaaagatgctggaactattgctggcctcaacgtacttcgaattatcaatgagccaactgctgctgctattgcctatggcttagataagaaggtcggggctgaaaggaatgtgctcatttttgacttgggaggtggcacttttgatgtgtcaatcctcactatcgaggatggaatttttgaagtcaaatcaacagctggagacacccacttgggcggagaagactttgacaaccgaatggtcaaccatttcattgctgagtttaagcgaaagcacaagaaggacatcagtgagaacaagagagctgtcaggcgtctccgcactgcctgtgagcgggccaagcgcaccctctcctccagcacccaagccagtattgagattgattctctctatgagggaattgacttctacacctccattacccgtgctcgatttgaggagttgaatgctgacctgttccgtggcacactggaccctgtagagaaggcccttcgagatgccaaactagacaagtcacagatccatgatattgtcctggtgggtggttctaccagaatccccaagatccagaaacttctgcaagacttcttcaatggaaaagagctgaataagagcattaaccccgatgaagctgttgcctatggtgcagctgtccaggcagccattctatctggagacaagtctgagaatgttcaggatttgctgctcttggatgtcactcctctttcccttgggattgaaactgctggtggagtcatgactgtcctcatcaagcgcaataccaccattcccaccaagcagacccagactttcaccacctactctgacaaccagccaggtgtactcatccaggtgtatgaaggtgaaagggccatgaccaaggacaacaacctgcttgggaagtttgagctcacaggcatacctccagcaccccgtggggttcctcagattgaggttacttttgacattgatgccaatggcatcctcaatgtttctgctgtagataagagcacaggaaaggagaacaagatcaccatcaccaatgacaagggccgcttgagtaaggaggatattgagcgcatggtccaagaagctgagaagtacaaagctgaggatgagaagcagagagataaggtttcctctaagaactcgctggagtcttatgctttcaacatgaaagcaactgttgaggatgagaaacttcaaggcaagatcaatgatgaagacaaacagaagattcttgacaagtgcaacgaaatcatcagctggctggataagaaccagactgcggagaaggaagaatttgagcatcagcagaaagaactggagaaggtctgcaaccctatcatcaccaagctgtaccagagtgctggtggcatgcctggaggaatgcctggtggcttccctggtggaggagctcctccatctggtggtgcttcttcaggccccaccattgaagaggtcgattaagtcaaagtagagggtatagcattgttccacagggacccaaaacaagtaacatggaataataaaactatttaaattggcacc

SEQ ID NO: 3163 - DNA, 1016 bp, Rattus norvegicus
  Genbank Accession No. NM_024356
gacttcgaacctcattcggtgcagaactcctgtcccggtgacagccacaggtcacggccgccggctaagccgagccgcagcgcttggtagcaccttagggtgtctcgggagcaatcgcgccgggtccatggagaagccgcggggtgtaaggtgcaccaatgggttccccgagcgggagctgccgcggcccggggccagccgacctgccgagaagtcccggccgcccgaggccaagggcgcacagccagccgacgcctggaaggcagggcggccccgcagcgaggaggataacgagctgaacctccccaacctggcggccgcttactcgtccatcctgcgctcgctgggcgaggacccccagcggcaggggctgctcaagacgccctggagggcggccaccgccatgcagttcttcaccaagggataccaggagaccatctcagatgtcctgaacgatgctatatttgatgaggaccatgacgagatggtgattgtgaaggacattgacatgttttccatgtgtgagcatcacctggtcccatttgtgggaagggtccatattggttatcttcctaacaagcaagtccttggtctcagcaaacttgccaggattgtggaaatctacagtagaagactacaagttcaagaacgccttaccaaacagattgcagtggccatcacagaagccttgcagcctgctggcgtcggggtagtgattgaagcaacacacatgtgtatggtcatgcgaggtgtgcagaaaatgaacagcaagactgtcactagcaccatgctaggcgtgttccgggaagacccaaagactcgggaggagttcctcacactcatcaggagctgaacttccgtgtgcgagccccggtttgcagacccccgctgaggccagcgttatctgtctcgattgtacattccagttccagttggtatacttgtcaactttatttctcaccatgaattgtatttaataattatttatagagatgtcaaataaaggtgatcaactt

SEQ ID NO: 3164 - DNA, 1201 bp, Rattus norvegicus
  Genbank Accession No. NM_024363
agatggcggcagccgaggccgcgaactgcatcatggaggtttcctgtggccaagcagaaagtagtgagaagcccaatgctgaggacatgacatccaaagactactactttgactcctatgcccactttggcatccacgaggagatgctaaaggatgaggtgcgaaccctcacgtaccgcaactccatgtttcacaatcggcatctcttcaaagacaaggtggtgctggatgtgggctcgggcactggcatcctctgcatgttcgctgccaaggcaggggcccgcaaggtcattgggatcgagtgctccagtatctctgattatgctgtgaagattgtcaaagccaataagttagaccacgtggtgaccatcatcaagggcaaggtggaggaggtggagctgcctgtggagaaggtggacatcatcatcagcgagtggatgggttattgcctcttctatgagtccatgctcaacactgtgctgcacgctcgtgacaagtggctggcacctgatggcctcatcttcccagaccgagccaccctgtatgtgacagccattgaggaccgacagtataaagactacaagatccactggtgggagaatgtatatggctttgatatgtcctgcattaaagacgtggccatcaaggagcccctggtggacgtggtggacccaaagcagctggtcaccaacgcctgcctcataaaggaggtggacatctacacagtcaaggtggaggacctgaccttcacctccccgttttgtctgcaagtgaagaggaatgactatgtgcatgcactagtggcctacttcaacatcgagttcacccgatgccacaagaggaccggcttctctaccagtcctgagtctccatacacacattggaagcagactgtgttctacatggaggactacctaacagtgaagaccggcgaggagatttttggcactattggaatgaggcccaacgccaaaaacaatcgtgacttggactttaccatcgacctggacttcaagggtcagctgtgtgagctctcttgttccaccgactaccggatgcgctgaggaggtgccaggctggccctcctgcaaaagggggctcaggggctgggcttgggggatgggagggtacatcgtggcagtgtttttcataacttatgtttttatatggttgcgtttatgccaataaatcctcagctgac

SEQ ID NO: 3165 - DNA, 2535 bp, Rattus norvegicus
  Genbank Accession No. NM_024392
gagcagtaccccggccactgccagtgtgtgcgtggtgcaggatagactcatggcttcgcctctgaggttcgacgggcgtgtggtcctggtcaccggcgccgggggagggttgggcagagcttatgccctggcttttgcagaaagaggagcattagttgttgtgaatgacttaggaggggacttcaaaggcgttgggaaaggctcttctgccgcagacaaggtcgtggaagaaataagaaggagaggcgggaaagcggtggccaattacgattcaggcgaagcaggcgagaagcttgtgaagacagcactggacacattcggcagaatagatgttgtggtgaacaatgctgggatcctgagggaccgttccttctctaggataagtgatgaagactgggatataattcaaagagttcatttgcggggctccttccaagtgacccgggcagcatgggatcatatgaagaagcagaattatggaagaatcattatgacggcctcagcttctggaatatacagcaactttggccaggcaaattatagtgctgcaaagctgggccttctgggtctcgccaatactctcgtgattgaaggcaggaagaacaacattcattgtaacaccattgccccaaacgctgggtcacggatgacagagacggtgatgccagaagacctcgttgaagccctgaagccagagtatgtggcaccgctggtcctttggctttgccatgagagctgtgaggaaaatggtggcttgtttgaggttggagcaggatggattggaaaattgcgctgggagaggaccctgggagccattgtcaggaagcggaatcagcccatgactcccgaggcagtgagggacaactgggtgaagatctgtgacttcagcaatgccagcaagccgaagagcattcaagagtccacaggtggtataatcgaagttttacataaaatagattcagaaggaatctcacaaaatcacaccggtcaagtggcatctgcagatgcatcaggatttgctggcgtcgttggccacaaacttccttcattttcttcttcatatacggaactgcagtgcattatgtatgccctcggagtaggagcttcagtcaaaaatccaaaggacttgaagtttgtttatgaagggagtgctgacttctcctgtttgcctacatttggagtcattgtcgctcagaagtccttgacgagtggaggcttagcagaggttcctgggctgtcaatcaactttgcaaaggttcttcatggggagcagtacttggagttgtataagccacttccccgatcaggggaattaaaatgtgaagcagttattgctgacatcctggataaaggctctggcatagtgattgttatggacgtctattcttattctggcaaggaacttatatgctataatcagttctctgtcttcgttgttggctctggaggctttggtggaaaacggacatcagaaaaactcaaagcagctgtagccgtaccggatcggcctccagatgctgtactgagagataccacttcactgaatcaggccgctctgtaccgcctcagtggagactcgaatcctttacacattgacccgagctttgcgagcattgccggttttgagaaacccatattacacggattatgtacttttgggttttctgcaaggcatgttttacagcagtttgcggataatgatgtgtcaagattcaaggccattaaggttcgttttgccaaaccagtgtatccaggacaaactctacaaactgagatgtggaaggaaggaaacagaattcattttcaaaccaaggtccaagagactggagacattgtcatttccaatgcatatgtggatcttgttcctacatctggagtttccgctcagacaccttctgagggtggagcactgcagagtgctcttgtatttggggaaataggtcgacgcctcaaggatgttggacgtgaggtggtaaagaaagtaaatgctgtatttgaatggcatatcacgaaaaatgggaatgttgcagccaagtggaccattgacctgaagaacggctctggagaggtttaccaaggccctgccaaaggctctgctgacacgaccatcacaatttctgatgaggatttcatggaagtggtcctgggcaagcttaacccacagaatgccttcttcagtggcagactgaaggcccgaggaaacatcatgctgagccagaagctacagatgattctgaaagactatgccaagctctgaaggacccactgcgtgctttaataaaaccagaatcattacgttctgtctacgcagtcatgctccagccttctttgaaacgatccacggtaatgtgcagcagaaatcgcttaacattttcagattcagataactttcagattttcattttctactaatttttcacatattatttttataaggaactgtaatctagctagcaaataattgttctgttcatagatctgtatcttaataaaaaaaaagtcaaccgaaaaaaaaaaaaaaaaaaaaaaaaaaaa

SEQ ID NO: 3166 - DNA, 961 bp, Rattus norvegicus
  Genbank Accession No. NM_024487
acccgggggtagtcatggcggctcggtgcgtgaggctggcgcggcgcagcctcccggctttggcgctgtcgttcaggccttctcctcgcttgttgtgcacagctacaaaacaaaagaacaatggccagaacctggaagaggacttggggcattgtgagccaaagacagatccatcctctgcagacaagaccctcctggaagagaaggtgaagctggaagagcagctgaaggagaccatggaaaaatacaaacgtgctttggcagataccgagaatctacggcagagaagccagaagctggtagaagaggccaagttatatggcatccagggtttctgcaaggacttgctggaggttgcagacatcctagagaaggcaacccagagtgttccaaaggaggaggtcagcaacaacaaccctcacctgaagagtctttatgaagggctcgtgatgactgaagtccagattcagaaggtgttcacaaaacacggcttgctcaggcttgaccccattggggcaaagttcgacccttatgaacatgaggccttgttccacacccctgtggaggggaaagaaccaggcactgtggcactagttagtaaggtgggctacaagctgcatggacgcaccctgaggccagctttggtgggggtggtgaaggacgcttagctctctccctcaaggctctggactttgtaggtcacttgctagaactcaaagggtgggcgggcttgtaatttctcatctgtgaacacatctgacccttgcccagccttgttggaaatcttaagtaagctaagcagaacatgaagctgcttgcacactgtgtcagagactctgggagtctggtcattgagtttagcattacctacttcagaagagggccagcagggcctcaggagtagcatgctaacgttgtatctgttccaccttgtgattaagtactttacacaaataaaagg

SEQ ID NO: 3167 - DNA, 845 bp, Rattus norvegicus
  Genbank Accession No. NM_030586
aggaagttagccgcagaatcccagatagcggccgagagggactcggatccaatggcgaccccagaggccagcggcagcggcaggaatggccagggctccgaccccgccgtcacctactaccggctggaggaggtggcgaagcgaaataccgcggaggagacgtggatggtgatccacgggcgagtctacgatatcacccgcttcctcagcgagcatcctggtggagaagaggttctactggaacaagctggtgccgatgcaactgaaagctttgaagatgtcggccactcccctgatgccagggagatgctaaagcagtactacattggtgatgtccatccgaatgaccttaaacctaaagatggtgacaaggacccttcaaaaaacaattcatgccaaagttcctgggcatattggattgtccccatcgtgggtgctattcttataggtttcctgtatcgtcacttctgggctgacagcaaatcctcctgaggagtccacgttgaagtgtcggagcacatctcctgggagtgagagggtggagacttgtgtggaggaggctgcagggtgctccttccttggatcctgccagttgttttctttccccttggagccaagatggttgaccagatatctatcctccttcaatgcaggaccagaatctgtccatcagcctgagcctgacgcccaaagcacctgctcacgttgtgtccttgtcagggtttcttctcactggttcccagtcattcccttcatttcaacagttgatgccaatgacttagagttcctttgttgtagtgacatttcctttggggacagtacatgatttctgatactttgaattc

SEQ ID NO: 3168 - DNA, 2207 bp, Rattus norvegicus
  Genbank Accession No. NM_030872
gtctcccggctgtgcttggccgtgcggagggccggtgccagcacctccagctccgggacagcagcgggagccaagcccgagccgcaggcgtcgtcgccatgcgctggttccgggcgctgttgaagaatgcgtccctggcaggggcgcccaagtacatcgagcacttcagcaagttctccccgtccccgctgtccatgaagcagtttctagacttcggatccagcaatgcctgcgagaaaacttcattcaccttcctccggcaggagctgcccgtgcgcctggccaacatcatgaaagagatcaacctgcttcctgaccgggtgctgagcaccccctcagtgcaactggtgcagagctggtatgtccagagtctgctggacatcatggaattcctggacaaggaccccgaggaccaccggaccctaagccagttcactgatgccctggtcaccatccggaaccggcacaatgacgtagtgcccaccatggcacagggagtgttggagtacaaggacacctatggtgatgacccagtctccaaccagaacatccagtactttttggaccgcttctacctcagccgcatctctatccgcatgctcattaaccagcacaccctcatctttgatggcagcaccaacccagcccaccccaaacacattggcagcattgatcccaactgcagcgtgtctgatgtggtgaaagatgcctatgacatggctaagctcctgtgtgacaagtattacatggcttcccctgacctggagatccaggaagtcaatgccaccaacgccacccagcccattcacatggtctacgtcccctcccacctctaccacatgctctttgaactcttcaagaatgccatgcgggccacagtggaaagccacgagtccagcctcactctccctcccatcaaaatcatggtggccctcggtgaagaagatctgtccatcaaaatgagtgaccgaggcgggggtgtccccttgaggaagatcgagaggctcttcagctacatgtactctacagctcctacaccccagcctggcactgggggtaccccgctggctggctttgggtatggactccccatttcccgcctctacgccaagtacttccagggggacttgcagctcttctctatggagggctttgggacagatgctgtcatctatctgaaggccctgtccacggactcagtggagcgcctgcctgtctacaacaagtctgcctggcgccactaccagaccatccaggaggccggtgactggtgcgtgcccagcacagagcccaagaacacatcgacgtatcgggtcagctaggggccttctcttcctggcacctgggaggatgctgccacctctgaatccagccaccacagggacttccctatctatcccctggggtacgggggtgaaactgggtctccccgatggccagatctgtctttgtagaaatcgcagtggcccatctgtggcgatccctaagtgccaatctgtctctatggagaaacctagggggtttccctggagcctggtctccatggtgatgatgcttgagggttggggacggctctacctggtggggtggccccagagacacttctcccaagaccagagctgtctgttttctaccagaaaccctgggtccccctcactgcctgcatagtcctggtctcccacgtggctgcctcgcttgccttatgcccacaccctgtacaggcacattgggctggtttcttcgtcagtagtaagaaagatggagagagactggggaaacgggggccaaccttgtctctggtcctgcagcctctctccatctccactctggacactaaagttgccactgggaacttgagaatgggtggccgttctcacccaaggcccaccgagaaggcctaagagtaacctgtccccaaggcgatcttagcaatgtttctgccgcttcctggcctggcatgtcctcacgtgtatacctcccctgcccagtgtacgctcaccctatccctgcttgagctttagaccccagacttcctatgcccactatgtgtgcacagacgactcaaacccaggatgccccatgtacatagccagttttgtaatctcagatgcctcacccttgccctccgcacacaggggttaaagccgtgtgcccctcccagtggctgggatggtgacagtgacatccacagtaaatagatgaaatga

SEQ ID NO: 3169 - DNA, 1124 bp, Rattus norvegicus
  Genbank Accession No. NM_031000
gaattctggccactttgtcttctccacagcctgtgctcattgccaaggggacaatgacggcctccagtgtcctcctgcacactggacagaagatgcctctgattggtctggggacatggaagagtgagcctggtcaggtgaaagcagctattaaatatgcccttagcgtaggctaccgccacattgactgtgcttctgtatatggcaatgaaactgagattggagaggccctgaaggagagtgtgggagcaggcaaggcagtacctcgagaggagctgtttgtgacctccaagctgtggaatactaagcaccaccctgaggatgtagaacctgctgtccggaagacgctggctgatctgcagctggagtatttggacctctatttgatgcattggccttatgccttcgagcggggagacaatccctttcccaagaatgccgatggaactgtcaaatatgactccactcactataaggagacctggaaggctctggaggcactggtggcaaaggggctggtgaaagccttgggcttgtccaacttcagcagtcggcagatagatgatgtcctcagtgtggcctcggtgcgcccagctgtcttgcaggtggaatgccatccatacctggctcaaaatgagctcattgcccactgtcaagcacgaggcttggaggtgacagcttacagccccttgggttcatcggatcgtgcttggcgccaccctgatgagccagtcctgcttgaggaaccagttgtcttggcactagctgaaaaacatggccgatctccagctcagatcttgctcagatggcaggttcagcggaaagtaatctgcatccccaaaagcatcactccttcccgcatccttcagaacattcaggtatttgatttcacctttagtccagaggagatgaagcaattagatgctctgaacaaaaattggcggtatattgtgcccatgattacggtggatgggaagagagtccccagagatgctggacaccctctgtatccctttaatgacccatactgaggcccgtagtttctcagcttccctttcagttctcctgctaagcattgcctgctactcccaagaaagaaggactcaataaagccattgaagtgt

SEQ ID NO: 3170 - DNA, 4008 bp, Rattus norvegicus
  Genbank Accession No. NM_031007
cccgggcagcgcgctctgcggtcgcctaccgcctgccgcccccgcgccgccgcgacgtggcaggaggcgatgcggcggcgccgctacctgcgggaccgcgccgaggcggcggcggcagcggcggcgggaggcggagaggggctgcagcggtcccgggactggctctacgagtcctactactgcatgagccagcagcacccgctcatcgtcttcctgctgctcatcgtcatgggcgcctgcctcgccctgctagccgtcttcttcgcgctcgggctggaggtggaagaccatgtggcatttttaataacggttcccactgccctggccattttctttgccatattcattcttgtctgcatagagtctgtgttcaagaagctactccgtgtgttttcgctggtgatttggatatgtctggttgccatgggatacctgttcatgtgcttcggagggactgtgtctgcctgggaccaggtgtcattcttcctcttcatcatctttgtggtatataccatgcttcccttcaacatgcgagatgccatcattgccagcatcctcacatcttcatctcatacgatagtgctgagcgtctacctgtctgcaacaccaggggccaaggagcacctgttctggcagatactggccaatgtgatcattttcatttgtgggaacttggcgggagcctaccacaagcacctcatggagcttgccttgcagcaaacctatcgggacacgtgtaattgcatcaagtcccggatcaagctggaatttgaaaaacggcagcaggaacggctcctgctctccttgctgccagctcacatcgccatggagatgaaagctgaaatcattcagaggctgcagggccccaaagcaggacagatggaaaacacaaacaacttccacaatctgtatgtcaaacgacacaccaacgtgagcatattatacgctgacattgttggcttcacccgccttgcaagcgattgctcccctggcgaactggtccacatgctgaatgaactctttgggaagtttgatcaaatagcaaaggagaatgaatgcatgagaattaaaattttaggagactgctattactgtgtttccgggctccctatatcactccctaaccatgccaagaactgtgtgaaaatgggattggatatgtgcgaagccataaagaaagtgagggatgctaccggagttgatatcaacatgcgtgtaggagtgcattctgggaacgttctctgtggtgtgattggtctccagaagtggcagtatgatgtgtggtctcatgatgttactctggcaaaccacatggaagctggaggagtccctgggcgtgttcacatttcttcagtcactctggagcacttgaatggggcttataaagtggaggaaggagatggtgagataagagacccatatttaaagcagcacttggtgaaaacctactttgtaatcaatcccaagggagagcgacggagtcctcagcatctcttcagacctcgacacactctggacggagccaagatgagagcatctgtccgcatgacccggtacttggagtcctggggagcagccaagccattcgcacatctgcaccacagagatagcatgaccacagagaatgggaagattagtaccacggatgtgccaatgggtcaacataattttcaaaatcgcaccttaagaactaagtcacagaagaagagatttgaagaagaactgaatgaaaggatgatccaagcaattgatgggatcaatgcacagaagcaatggctcaagtcagaagacattcaaagaatctccctgcttttctataacaagaatatagagaaagaataccgagctactgcactgccagcattcaagtactacgtgacctgtgcctgcctcatctttctctgcatcttcattgtacagatacttgtattgccaaaaacgtccatccttggcttctcctttggagctgcatttctctccctcatcttcatcctctttgtctgcttcgctggacagcttttgcaatgcagcaaaaaggcctccacctctctcatgtggcttttgaaatcatcaggcatcatcgccaaccgcccatggccacggatctccctcacaatcgtcaccacggctatcatactaaccatggctgtgttcaacatgtttttcctgagcaactctgaggagacaacccttcccactgccaatacatcaaatgcaaacgtttctgtcccggataaccaggcgtcgattcttcatgctcgaaacttgtttttcctcccgtacttcatatacagctgcatcctgggcttgatctcctgctccgttttcctgagggtgaactatgagttaaaaatgttaatcatgatggtggcactcgtgggctacaacaccattctactccacacccatgcccatgttctggatgcgtacagccaggtcctgtttcagagaccaggcatttggaaagacctgaagaccatgggctccgtgtcactctccatattcttcatcacgctgctggttctgggcagacagagtgaatattactgtaggttagacttcttgtggaagaacaagttcaaaaaagagcgggaggagatagaaaccatggagaacctaaatcgagtgctgctggagaacgtgcttcctgcacacgtggctgaacacttcctggccaggagcctgaaaaatgaggagctgtaccaccagtcctacgactgtgtctgtgtcatgtttgcctccattccggacttcaaggagttctacacagagtcagatgtgaacaaggaaggcttggaatgcctgcggctcctgaatgagatcattgctgactttgatgatctgctttctaagccaaagttcagtggtgttgaaaagatcaagaccattgggagcacatacatggcagccacgggactgagtgccatacccagccaggagcacgcccaggaacctgagcgtcagtacatgcacataggcaccatggtggagtttgcatatgccctggtgggaaaactggatgccatcaataagcactccttcaacgacttcaaactgcgagtgggtatcaaccatgggcctgtaatagctggcgtcataggggctcaaaagccacagtatgacatctggggcaacactgtcaacgtggccagcagaatggacagcaccggggtcctggacaaaatacaggtgactgaggagacaagcctcatcttgcagacgcttggctacacgtgtacatgtcgaggtatcatcaatgtgaaggggaaaggggacctgaagacatattttgtaaacacagagatgtcaaggtccctttctcagagcaacttggcatcctgagaagctgtctcttcctgacaagaagaatgtacttgcaggaaggtaccacgcactttctgactgcaacccttccccttcgtcctgatgtacgtgctctgccccatcctctggagcccctgcagactagttcctgtgacccagtgacatactgtttggtgtctgcgcgtgcccaggttgtcctgccacttgcactgtgcttgctcctaagcaggaggggaaggaaccatgtcctggaaggagagcattggaagaagtgatgaagaggtgaagtgaacacacattcttaaggcaataaaaccggggggtgtatattatcttctggtgcatgttcttctctggaaaatacggtagctcgtaactgcatccctagtctgatattcaaacacacagtatttgtgaataagctgatcccgtcacccaacatggagtctgtgttcacctacccatgtgtctcattgccagtggtcgtccttgggggctcagctgagactctcagcttctgtcaccttgctgtcctgtcttgtggcagcagcacgttgccatccatcaccagaattagtcctcacagcctaggaccagttttgtaccaaactcatctgatgttttgatgccatttgtcaaaagtaaggttaattcattaaaagttttatgtactttgaaaaaaaa

SEQ ID NO: 3171 - DNA, 3102 bp, Rattus norvegicus
  Genbank Accession No. NM_031011
cggggaaagcagcggactacaagagactgaactgtatctgcctctatttccaacggactcacgttcaactttcgctcacgaaaatagccgggaaaattttattagtcctttttttaaaaaaagttaatataaaattatagcaaaaaaaaaaaaaggaacctgaactttagtaacacagctggaacaatccgcagcggcggcaggagcggcgggagaagagtttaatttagttgattttctgtggttgttggttgttcgctagtctcacggtgatggaagctgcacattttttcgaagggaccgagaaactgctggaggtctggttctccagacagcagtccgacgcaagccagggatctggggaccttcgtaccatcccaagatccgagtgggatgtccttctgaaggatgtgcagtgctcaatcataagtgtgacaaagactgacaagcaggaagcttatgtactcagtgagagtagcatgtttgtctccaagagacgtttcattttgaagacatgtggtaccaccctcttactgaaagcactggttcccctgttgaagcttgctagggactacagtgggtttgactcgattcaaagcttcttttattctcgtaagaatttcatgaagccttctcaccaagggtacccacaccggaatttccaggaagaaatcgagtttcttaatgcaattttcccaaacggagcaggatattgtatgggacgtatgaattctgactgttggtacctgtacactttggatctcccagagagccgagtaatcaatcagccagatcaaaccctggaaattctgatgagtgagcttgacccagcagttatggaccagttctacatgaaagatggtgttactgcaaaggatgtcactcgtgagagtggaattcgtgacctgataccaggttctgtcattgatgccacactgttcaatccttgtggctactcaatgaatggaatgaaatcggatggaacatattggactattcacatcactccagaaccagaattttcttatgttagctttgaaacaaacctaagtcagacctcctatgatgacctgatcaggaaagttgtggaagtcttcaagccaggaaaatttgtgaccaccttgtttgttaatcagagttctaagtgtcgcacagtgctttcttcgccccagaagattgacggtttcaaacgtcttgattgccagagcgctatgttcaacgattacaattttgtttttaccagttttgctaagaaacagcaacaacagagttgattaggaaaaatgaaaaagaaaaaacgcaaaaagagaagacacacaggaggtggtggctgctttctagatgttgatcctgggggccatgctgaccgtgaccaccaccttgtagctgcagaaagccctaggtgtaatgatagtgtaatcattttgaagtgtatgcattattatatcaaggagttagatatcttgcatgaatgctctcttctgtgtttaggtgttctatgccactcttgctgtggaactgaagtgcatgtagaaaagaactctgactgtatgaatctttacgacacttgtgaaaacgattcgacttggtttatgcacagcgtaatatttctgcaggcatcgtccaaaatcccccacagacaaggctttcgtccccattagatgcggcctcagctgaccattggcgactgttctatttgctgccagagtttttacatccagttacctccactttctagagcatattctctactaatgttcaaaaccgatttctacttcatacgggtgtcttatgcaatggcaattaaagttttcttccacaagttgagtctttgtaaggaaatgattccagttgcttgttttgtgttctactgttttagtaattgctcctgcatttatagtcctatggtttttcactacccctgatgaagcaatacacggtcacactgtgggcttacattgtaatcttcaccccagatgggagctcagagacggtcccttgctcatttttccctaagatgtagaatgtggccttgctattggcatgcccttctgtggaagataaatgatggaagtgaaagtatcccgggggtgagcaaggagaaccaccccatggcagtgatgggcttggcagtgcactccgagctctcacagtggagtgcccaccatgccttcactaactcactgagcagtgataggatgcccaccaagtcagagcagaaatctaaccctaaggattctcacctcggtaagtgccgccattgccaccactttactaaaggaagtttccgctcagaggagagtctgtacttcccgcctgtcctaatgtcagctgttctctctggtctttcaccatggcgttcagatgctcaaatgaatggctgatcggccgcagggaggactctccgggttactgggcctggagaatggagaaacaggcacggtattctgacagttaatggcaccagagatgcgggctttcaagagctggcctgttagtggcatttttaagcagaaaagagcaaactagacgaagttccctatttattgccctcccactgtttccttggcagtttctggactggcgcaatgatgccttgttccttccgtatttataacgaagctaaaaagcgtttctaagcatggagtctacttggtttgaaatcaagtggttggaacactgtctggatttttactttacgcagtgttgattgaacgcttcgttggggaagccttcagtccgcttcatcggtctgttctgtaatgagcacagcacacctagtttgaattgctgtttggagggccagtgcttatttgagctgggtcttgtaacccagtagattttggcttgaggtctgactcccccatcttacgaaattaagaattctaatgttggaaattgcatagggtttgcgtggaaaaaagcccagggaaaaaaaaaaaaaaacagaaggcggactagtgatctagtgtgattacaggcggggaagttttggtgccataatttctttgttggtgttggacttttaatcagctgaaatgtatttctgtaccacaatgtaagcttcaataaaagtttgcttaattgtctagtaacatccag

SEQ ID NO: 3172 - DNA, 3132 bp, Rattus norvegicus
  Genbank Accession No. NM_031020
gccgctggaaaatgtcgcaggaaaggcccacgttctaccggcaggagctgaacaagaccgtctgggaggtgcccgagcgataccagaacctgtccccggtgggctcgggagcctacggctcggtgtgtgctgcttttgatacaaagacgggacatcgtgtggcagtgaagaagctgtcgagaccgtttcagtccatcattcacgccaaaaggacctacagggagctgcggctgctgaagcacatgaagcacgagaatgtgattggtctgttggatgtgtttacacctgcaaggtccctggaagaattcaacgatgtgtacctggtgacccatctcatgggggcagacctgaacaacatcgtgaagtgtcagaagcttaccgatgaccacgttcagtttcttatctaccagatcctgcgagggctgaagtatatacactcggctgacataatccacagggacctaaagcccagcaacctcgctgtgaatgaagactgtgagctgaagattctggattttgggctggctcggcacactgatgacgaaatgaccggctacgtggctacccggtggtacagagcccccgagattatgctgaattggatgcactacaaccagacagtggatatttggtccgtgggctgcatcatggctgagctgttgaccggaagaacgttgtttcctggtacagaccatattgatcagttgaagctcattttaagactcgttggaaccccaggggctgagcttctgaagaaaatctcctcagagtctgcaagaaactacattcagtctctggcccagatgccgaagatgaacttcgcaaatgtatttattggtgccaatcccctggctgtcgacctgctggaaaagatgctggttttggactcggataagaggatcacagcagcccaagctcttgcgcatgcctactttgctcagtaccacgaccctgatgatgagccagtggctgaaccttatgaccagtcctttgaaagcagggacttccttatagacgaatggaagagcctgacctacgatgaagtcattagctttgtgccaccgccccttgaccaagaagaaatggagtcctgagcaccttgcttctgttctgtccatcccacttcactgtgaggggaaggcctgttcatgggaactctccaaataccattcaagtgcctcttgttgaaagattccttcatggtggaagggggtgcatgtatgtgcgtagtgtttgtgtgtgtctgtctgtctgtccgtttgtccatgtatctttgtggaagtcattgtgatggcagtgacttcatgagtggtagatgctccttggcagtctgcctgctctctcagagtccgggcaggccgatgggaactgccgtctccttagggatgtgtgtgtgtatgttaagtgcaaagtaagaatattaaaatatccctgttcctagttaccttgccacttcggcttctcctgtggccctgcctttaccatatcacagtgacagagagaggctgcttcaggtctgaggctatccctcagccatgcataaagcccaagagaaccaactggctcctgggctctagcctgtgatcggcttgctcatgtcctcagaacctgtcagtctgtttgtgccttaaaaggagagaagggcgcgttgtggtagttacagaatctcagttgctggcgttctgagccaggcaaggcacagggctgttggatggccagtggggagctggacaaaacaaggcagccttcaaggaggccatgggtgcatgtttgcatgagtgtatgtgcaaccgccctccctcacctccaggagcaagctgttttctatgcttacctaagttcacctcagtgcagaggtctccagtgccaggcacaggctcctgccatcagtagcttcctatgtcatcttcacgtcatgcgggtgtttgcatgctgtgctctggagcttgtcctgtcttctggaagccctgggccgggcgtgtgaagacttcccagcagtcctatccacgcacctcagctgaggccacgggcacactgctgcttcctcactccagctacgttgtgttgaacacaactgatcctccaggtgcttgtggtgcaggaaacgggacgaacagagcacctgaacccttgccatctgacatcaccgacacaggagaacagtcctctcctctcctctcctctcctctcctaggacagtccccggctctggaatcatgttcttctcactcatggtagccagctaagaaagctgcaaaccgaacaaagggagaaccgagctcctgaagccaggagctccttttactgtccttctcaaaatagggtcattagacacagccaagtcgtcaaaggcccctttccttgtacggggcccccccgcccccggcagcttgacactgatttcagtgtctatttggggagaaagcaattttgtcttggaattttgtatgttgtaggaatccttagagagtgtggttccttctgatggggagaaagggcaaattattttaatattttgtatttcacctttataaacatgaatcctcaggggtgaagaacagtttgcataattttctgaatttcaggcactttgtgctatatgaggacccatatatttaagctttttgtgcagtaagaaagtgtaaagccaattccagtgttggacgaaacaggtctcgtatttaggtcaaggtgtctccattctctatcagtgcagggacatgcagtttctgtggggcagggtaggaccctgcatcatttggagcccagaaggaggccgactggccaggcctcaccgcctcagtatgcagtccagctccacgtcatcccctcacaatggttagtagcaacgtctgggtttgaacgccaggcgtggttatattattgaggatgcctttgcacatgtggccatgctgtgttaggactgtgccccagggcccggacttgaagctagagctggcagaagagctcctggcatccatggtgcgatgctgccgccacccagtttctccattggaagacaagggaatgagaagactgctgtgtatgtgtatttgtgaacttggttgtgatctggtatgccataggatgtcagacaatatcactggttaaagtaaagcctatttttcagat

SEQ ID NO: 3173 - DNA, 1616 bp, Rattus norvegicus
  Genbank Accession No. NM_031023
atggcgctgagtgacctcctggaactcactctgctgctgctgctgcccctgctggagcggctctcggccgaggactgcccgtgctccgaggcttctctctgccgaccgatccgccaccaccgcgacttcgaggtctttgtgtttgatgttggacagaaaacctggaaatcttatgactggtcgcagattacgactgtggcagtttttggaaaatatgactcagaacttatgtgctatgctcattcgaaaggagccagggtagtgctaaaaggtgatgtggccctgaaggacatcattaatcctaccttcagagcgtcatggatagcgcaaaaagttgccttagccaaagcacaacacatggatggaattaatatagacatagaacaggaagttgattgctcgtcacctgaatatgaagcattgacagctttggtcagagaaaccacagagggtttccatcgtgagattgagggatcacaggtaacttttgatgtagcttggtcaccaaagggcatagacaaaaggtgctataattatactgggattgcggatgcctgcgactttctttttgtgatgtcttacgatgagcaaagtcagatctggtcagaatgtattgcagccgccaatgctccctacaatcagacattaactggatatggtgactacctcaggatgggcatcagccccaggaaacttgtaatgggtattccctggtatggctatgattacatttgcctaaacctctcaaaggatgatgtctgcgccattgcaaaggtccctttcagaggggctccttgcagtgatgctgcagggcatcaggtgccctacagggtcatcatgaagcaagtaaacagttctgtttctggaagccagtggaaccaagaccagcaagctccgtactataattacaaggatcccactggccgtttgcatcaggtgtggtacgataacccccggagcatctcactaaaggcagcattcgtcaaacactacggcttgcggggcattggcatgtggaacgcgaactgtctggactactcagatgacgctctagccagagagcaaacggaggaaatgtggggagccctgagaccacggctgtgatacatacagaggaatgtcttttgtcagacggttagatttgcaggactggcctgtgtaagcagatctacctcttcaagagataaaaatatatattttgtcatgttaccctaacttacttattggtctactcaatacacaggaaagaaataaagaaactattcatttgtacttggaaaatacatacatatcttaaatatccaggaatgtaaaagcaaaaacaagtcaacttactctattaaatattcctctgtttcagtattataattatattatattataattagaaaagttgcttttagaattccatgctgaatttttcctcctgttattaaaatatactgttaaaaaccaatagggatttttaaaaatgtataactagtagacaagtgaagatactggagaagggagtgcacatgaccatagtgtgttacacacatgtatagactatcatagtaaagcccattatttttataattaatatatgctaataaaagatgtgtaacttgaaatgg

SEQ ID NO: 3174 - DNA, 1624 bp, Rattus norvegicus
  Genbank Accession No. NM_031043
cagcaccatgacagatcaggcttttgtgacgctcaccacaaacgatgcctatgccaaaggggcgctggtcctgggctcatctttgaaacagcacaggactactaggaggacggttgtactcgccagcccacaggtttcagactccatgagaaaagttttagagactgtctttgatgaagtcatcatggtagatgtcttggacagtggtgattctgctcatctaaccttaatgaagaggcctgagttgggcatcacgttgactaaactccactgctggtcactcactcagtattccaaatgtgtgttcatggatgcagatactctggttctctcaaatattgatgatctttttgaaagagaagaattgtcagcagcaccagacccagggtggcctgactgtttcaattctggagtctttgtctatcaaccctcaattgaaacgtataaccagctgttgcatcttgcttctgagcaaggtagttttgatggtggggaccagggcctactgaatacatattttagtggctgggcaacgacagatatcacaaaacacttgccatttgtgtataacctgagcagcctctcaatatactcctacctcccggcatttaaagcgtttggtaaaaatgccaaagttgtgcacttcctgggacgaaccaagccatggaattacacgtacaatccccaaacaaaaagtgtcaaatgtgaatcccaggacccaattgtgagtcacccagagtttctgaacctgtggtgggacaccttcaccaccaatgtcttacccctgctccaacaccatggccttgtcaaagatgccggttcctatctaatgatggaacatgtcacaggagccttgtcagacctgtcctttggggaggccccacctgcatcacagccttctttgtcctcagaagaaaggaaggaacggtgggaacagggccaggctgattatatgggagcagattcttttgataacatcaagagaaaacttgacacttacctacagtagaagcactgccattttcttgtggacacatccatgtcttaggcacgtttcgatacatagtatgtgaagtctgttacaattgttagaggctttcactaaacctcagcagatgaggggtttgggcaggacaacaggtgagaactgggcaaatgttattaagtaataattctattatgtggacaagtgttgtgtttaaccctagactttttcaaaaactctaaattcttaaattgccaatgtgtgataaagaaaagccaacattgagctactaaattaggctctttcaaatggtgcagaacttgactctccatcttcaaaacaaggtatgagattctccaatatttgcttgttgtatccttcactagacctgcaatgtagaattgttcaaagcctgtcagagaagtagccttctagactaaagtggcctttattaacactgcggagtgattcataagcctaccagctagtgttagttcaccagttttctatgcaccatgaaggcggcatgcagacctgctctttctcagttatctacttgaaaattgcagtgtgctctctgatggtagctgtggaagcactgtgtataacaaataaagacttattgacataaaaaaaaaa

SEQ ID NO: 3175 - DNA, 710 bp, Rattus norvegicus
  Genbank Accession No. NM_031065
cttttccggttcccgcagccgcagccatgagcagcaaagtttcacgcgacaccctctacgaggcggtgcgggaagtcctgcacgggaaccagcgtaagcgccgcaagtttctggagacggtggagctgcagatcagcctgaagaactacgaccctcagaaggacaaacgcttctcgggcaccgtcaggcttaagtccacccctcgccccaagttctccgtgtgcgtcctgggggaccagcagcactgtgatgaagccaaggccgtggatatcccccacatggacatcgaggcgctcaagaagcttaacaagaacaagaagttggtcaaaaagctggccaagaagtatgatgcctttttggcctccgagtctctgatcaagcaaatcccacgtatcctgggcccaggcctaaacaaggcgggcaagttcccctccctgctgacacacaatgaaaacatggtggccaaagtggatgaggtgaaatccacaatcaagttccagatgaagaaggtgctgtgtctggccgttgccgtcggccacgtgaagatgaccgatgacgagctagtctacaacatccacctggctgtcaacttcttggtgtccttactcaagaaaaactggcagaacgtccgggctctgtacatcaagagcaccatgggcaagccccagcgtctgtattaggacgctccaataaacctcgttgctgccttc

SEQ ID NO: 3176 - DNA, 722 bp, Rattus norvegicus
  Genbank Accession No. NM_031101
tcctttccgctcggccgttctcctgtacaggaggcagccatggcgcccagccggaatggcatgatcctgaagccccacttccacaaggactggcagcagcgagtggacacgtggttcaaccagccggcccgcaagatccgcagacgcaaggcccggcaggcgaaagcgcgccgcatcgcccctcgccccgcgtccggtcccatcagccccatcgtgaggtgccctacagttagataccacaccaaggtccgggctggcaggggcttcagcctggaggagctcagggtggctggtatccacaagaaaatggcacgcaccatcggcatctccgtggacccaaggaggcgaaacaaatccacggagtcactgcaggccaacgtgcagcgcctgaaggagtaccgctccaagctcatacttttccccaggaagccttctgctccgaagaagggagacagttctgctgaagaacttaaattggccacgcagctaacaggacctgtgatgcccatccggaatgtgtacaaaaaggagaaggccagagccatcacggaagaggagaagaactttaaggctttcgccagccttcgcatggcccgagccaatgcccggctcttcggcatccgagcaaagagggcgaaagaagccgcagagcaagacgttgagaagaagaaataatgcgcggctggagagttgtaataaattttccataaagcaaaaaaaaa

SEQ ID NO: 3177 - DNA, 688 bp, Rattus norvegicus
  Genbank Accession No. NM_031108
ggcgcagcgggcctagcctagtcaacatgccggtcgccagaagctgggtttgtcgcaaaacctatgtgaccccacggagacccttcgagaaatcgcgtctcgaccaggagctaaagttgattggagagtatggactccggaacaaacgtgaggtgtggagggtcaaatttaccctggcgaagattcgtaaggctgcccgggagctgttgacgctggacgagaaggatcctcggcgtctgtttgaaggcaacgctctgctgagacgacttgttcgaattggggtgctggatgagggcaagatgaagctggattacattctgggcctgaagattgaggatttcttggagagaaggctgcagacccaggtctttaagctgggcctggccaaatctattcaccatgcccgtgtgctcatccgccaacgtcacatcagggtcctcaagcaggtggtgaacatcccatctttcattgttcgcctggactctcagaagcacattgacttttccctcctttctccttatggtggtggccgcccaggacgagtgaagaggaagaatgccaagaaaggccagggtggtgctggagctggtgatgatgaggaagaggattaattaattaattaataccttgttgcactggaggattgtctagttttcccgttgacaaataaaacagaattgatacttga

SEQ ID NO: 3178 - DNA, 610 bp, Rattus norvegicus
  Genbank Accession No. NM_031109
ggggggggggggggggagcctccgcctcggaccctgtagccgccgcgatgttgatgcccaagaagaaccggattgccatctatgaactcctttttaaggaaggggtgatggttgccaaaaaagacgtccacatgcccaaacaccccgagctggcagacaagaacgttcccaaccttcacgtcatgaaggccatgcagtctctcaagtctcgaggctacgtgaaggagcagtttgcttggagacatttctactggtacctcacgaatgagggcatccagtacctccgagattacctgcacctacctccggagatcgtgcccgccaccctgcgccgcagccgtcccgagactggcaggcctcggcccaaaggtccagagggtgagcggcctgcaagattcacaagaggggaggcagacagagacacctacagaaggagcgctgtgccccctggagctgacaagaaagctgaggctggggctggctcggcaacggagttccagtttagagggggtttcggtcgtggacgtggtcagccacctcagtgaagttggagattatgttgtgttgaataaactttaaaaaaaaaaaaaaaaaaccccccccccccccc

SEQ ID NO: 3179 - DNA, 1694 bp, Rattus norvegicus
  Genbank Accession No. NM_031122
gcgtcgacgggcttggcatcgggcctccgcagccgcccaccgccagaagcttccagcctcaccactatggatccccgcaaagtgagcgagcttcgggccttcgtgaagatgtgtaggcaggacccgagcgtcctgcacaccgaggaaatgcgtttcctgagggagtgggtggagagcatggggggtaaagtaccacctgctactcataaagcgaagtcagaagaaaacactaaggaagaaaaaagagacaagacgacagaggacaacataaagacagaggagccatcgagtgaggagagcgatctagaaattgacaatgaaggtgtaattgaagcagacactgatgctcctcaggaaatgggagatgaaaatgcagagataactgaggcgatgatggatgaagcaaatgaaaagaagggggctgccatcgacgctctaaatgatggtgagctccagaaagccattgacttgttcacagacgccatcaagctaaaccctcgcttggccattctgtatgccaagagagccagtgttttcgtcaaattacagaagccaaatgctgccatccgagactgtgacagagctattgaaataaaccctgattcagctcagccatacaaatggagagggaaagcgcacagactcctgggtcactgggaagaagcagctcgcgatcttgccctggcctgtaaattggactatgatgaggacgccagtgcaatgctgagagaagtccagcctcgggctcaaaaaattgctgaacatcggagaaagtatgagcgaaaacgtgaagagcgagagataaaagaacgaatagaaagggtgaagaaggctcgagaagagcatgaaaaagcccaaagggaagaagaagccagaagacaatctggatctcagtttggctcttttccaggtggttttcctgggggaatgcctggtaattttcctggaggaatgcctggaatgggaggggccatgccaggaatggcaggaatgcctggactcaacgaaatcctcagtgacccagaggttcttgcagccatgcaggatccagaagtcatggtggctttccaggatgtggcccagaacccatcaaatatgtcaaaatatcagaacaacccaaaggttatgaatctcatcagtaaattgtcagccaagtttggaggtcactcataatgtcaaagcccttgctgaatgaagaacagcttagctcacttactggatgttgcaataatacaaaccagtgtacctctgacctcaccagagagctggggcgcttcgaagataatccctaccctctgcatcatatgcggctgaggcatattacagtggtttgccattagagtgttcattcagataatgttttcctattaggaattacaaacttaaaacatttttcaaccttaaacatattttttaaaaatttaggggatgtcaattcctacatttttcgttactaatctttttgggtttttccttttgaattactgggcaaggaaggtgaatgtggatgatttactgctttcatgaatgaaataaagatttgttagtgggaagcaaataaaacacatttaagttgattgagtcggacatacggttactgcaacatcttgaattgtctttaatgttttacttcacaatgatctatttcagtaaatcttttgggaccaccaaaaaaaaaaaaaaaaaaaaaaaaa

SEQ ID NO: 3180 - DNA, 1128 bp, Rattus norvegicus
  Genbank Accession No. NM_031144
atggatgacgatatcgctgcgctcgtcgtcgacaacggctccggcatgtgcaaggccggcttcgcgggcgacgatgctccccgggccgtcttcccctccatcgtgggccgccctaggcaccagggtgtgatggtgggtatgggtcagaaggactcctacgtgggcgacgaggcccagagcaagagaggcatcctgaccctgaagtaccccattgaacacggcattgtaaccaactgggacgatatggagaagatttggcaccacactttctacaatgagctgcgtgtggcccctgaggagcaccctgtgctgctcaccgaggcccctctgaaccctaaggccaaccgtgaaaagatgacccagatcatgtttgagaccttcaacaccccagccatgtacgtagccatccaggctgtgttgtccctgtatgcctctggtcgtaccactggcattgtgatggactccggagacggggtcacccacactgtgcccatctatgagggttacgcgctccctcatgccatcctgcgtctggacctggctggccgggacctgacagactacctcatgaagatcctgaccgagcgtggctacagcttcaccaccacagctgagagggaaatcgtgcgtgacattaaagagaagctgtgctatgttgccctagacttcgagcaagagatggccactgccgcatcctcttcctccctggagaagagctatgagctgcctgacggtcaggtcatcactatcggcaatgagcggttccgatgccccgaggctctcttccagccttccttcctgggtatggaatcctgtggcatccatgaaactacattcaattccatcatgaagtgtgacgttgacatccgtaaagacctctatgccaacacagtgctgtctggtggcaccaccatgtacccaggcatcgctgacaggatgcagaaggagattactgccctggctcctagcaccatgaagatcaagatcattgctcctcctgagcgcaagtactctgtgtggattggtggctctatcctggcctcactgtccaccttccagcagatgtggatcagcaagcaggagtacgatgagtccggcccctccatcgtgcaccgcaaatgcttctag

SEQ ID NO: 3181 - DNA, 1288 bp, Rattus norvegicus
  Genbank Accession No. NM_031149
gccgaaagagggaagatggcgcttgatgggccagagcagatggaactggaagaggggaaggcaggcagtggactccgtcaatattatctgtccaagattgaagaactccagttgattgtgaatgacaagagtcagaacctccggagactgcaggcccagaggaatgagctcaatgcaaaagttcgtctgttgcgggaggaactgcagctgctgcaggaacagggctcctacgttggagaagtcgtgagggccatggataagaaaaaagtgttggtcaaggtccatcctgagggcaaatttgttgttgatgtggacaagaacattgatatcaatgatgtgacacccaattgtcgggtggctctaagaaatgacagctacactctgcataagatcctgcctaacaaagtggaccctttggtatcactaatgatggtggaaaaggtgccagactcaacctacgagatgattggcgggctagacaagcagatcaaggagatcaaagaagtgattgagctgcctgtgaagcaccctgagctctttgaagccctgggcattgcacagccaaagggagtcctgctatatggacccccgggcactgggaagacgttgttggcccgggctgtggctcatcatacggactgtacctttattcgtgtctctggctctgaactggtacagaaattcattggggaaggggcaagaatggtgagggagctgtttgtcatggcccgagaacatgctccctccatcatcttcatggacgagatcgactctatcggttcttcacggctggagggaggctctggaggcgacagtgaggtacagcgcacaatgctggaactgctcaaccagctggatggctttgaggccactaagaatatcaaggttatcatggctactaataggattgatatcctggactctgccctgcttcgtcctgggaggattgacaggaaaattgaattcccacctcccaatgaggaggcccggctggacattttgaaaatccactctcggaaaatgaacttgaccagggggatcaacctgaggaaaattgctgagttgatgccaggagcttcaggggctgaagtgaagggcgtgtgcacagaggccggcatgtatgctctgcgggaacggcgtgtccacgttactcaggaggactttgagatggcagtagccaaggtcatgcaaaaggatagtgagaaaaacatgtccatcaagaagctttggaagtgagggtgtgtcctttgtgtggatccctcaaataaaggtctgtgcgataaactcc

SEQ ID NO: 3182 - DNA, 2318 bp, Rattus norvegicus
  Genbank Accession No. NM_031325
ggagcggcgggcggagaggtgtgtggagcttgtggcttgggaggaaggcgctgtccgagagaacgtgatctgcgcggccgctgtgtcctggccttggaagtggttcagtcatggttgagatcaagaagatctgttgcattggtgcgggctacgtcggcggacccacatgcagtgtcattgctcgcatgtgccctgaaatcagggtaacggttgtggatgtcaatgaggccaggatcaatgcatggaattctccaacgcttcctatttatgagcctggactaaaagaagtagtcgaatcctgtcgagggaaaaacctctttttttctaccaatattgatgatgccatcagagaagccgatctagtgtttatttctgtgaacacaccaacaaaaacatatggaatgggaaaaggccgggcggcagatctgaagtatatcgaagcttgtgctcgccgcattgtgcagaactcaaatgggtacaaaattgtgactgagaaaagcacagtccctgtgcgggcagcggaaagcatccgccgcatatttgatgccaacacaaagcccaacttgaatctacaggttctgtccaatcctgagttcttggcagagggaacagccatcaaggacctaaagaacccagacagagtcctgattggaggggatgagaccccagagggccagagagctgttcaggcactctgtgctgtgtacgagcactgggttcccaaggaaaagatcctcaccaccaacacttggtcctcagagctttccaaactggcagccaatgcttttcttgcccagaggatcagcagcattaactccataagtgctctgtgtgaaagcacaggcgccgatgtggaagaggtggcaacggctatcgggatggaccaaagaattggaaataagtttctaaaagccagcgttggttttggtgggggctgcttccaaaaagatgttctgaatttggtttatctctgtgaggctctgaatctgcccgaagtagctcgttactggcagcaggtcatagacatgaatgactaccagaggaggaggtttgcatcacggatcatagacagcctgtttaatacagtgactgataagaagatagctatcttggggtttgcgttcaaaaaggatactggtgataccagggagtcctccagtatctacattagcaaatacctgatggacgagggtgcgcacctccacatctacgaccccaaagtacccagggagcagatagtggtggatctttctcatccaggcgtctcagcggatgaccaagtgtccagactggtgaccatttccaaggatccatatgaagcatgtgatggcgcccatgccctcgttatctgcacagagtgggacatgtttaaggaactggattatgaacggattcataaaagaatgctgaagccagccttcatatttgatggccggcgtgtcctggatgggctccacaatgagctacagaccattggcttccagattgaaacaattggcaaaaaggtatcttccaagagaattccatacactcctggtgaaattccaaagtttagtcttcaggatccacctaacaagaagcccaaagtctagacgtcgcccttttgcctgtgatgatttggtactgcagggtagccagcgtctgtctgatactaagtggtaaatgaactacgtgtttttatggaaacaaaaatatttttgtaatcatcaaatttatactagctatctgggtgttagcatatctagtaattatgagtctagaataatttttatatatttttatattattgtactctcagttactgaatggatggaaaacaatcatgttggtttaaatgtcagtttttataaataaaaatgaaaccttgaattttttagcattacaggttgttacagactgcactgtaataacacaagggaaaggcagtctcatttccctacctgttgtctctgcttatcactaaatgggacttcgaagccgtgaaatcactgtgctaggatggctgatgaaggtctctggacttttgttttaatgagattatgtcattagtggttttagttgtctttgtgtctcccaaaaccactctgtctttctctccatgcgtaactcgggcagtgctttcttttttgaaaattcagcctgaggaggaaatcagtctatggtctagttcgtcctgcctcttagcttctgtacctgcttgtcacatttgcacctatgagtcaagatatgtttgttacctttattttgatttatttctattacaattcaatttttttcctttaattaagaaaaccaataaagtctcatgtgtaaactgg

SEQ ID NO: 3183 - DNA, 3061 bp, Rattus norvegicus
  Genbank Accession No. NM_031330
tgtgaccgcggccaagcccgctcgccttctgcggcgagtagggcctcgcggcgtcatcggcggcgaggagccgctgcggcctggccgaccatgtcggacgcggctgaggagcagcccatggagacgacgggcgccaccgagaacggacacgaggccgcccccgaaggcgaggccccggtcgagcctagccctggcagcggccccgcgactccggcggggtctgtgggcgggaccacggccgccccgagcgggaaccagaacggcgccgaaggcgaccagatcaacgccagcaagaacgaggaggacgcgggaaaaatgttcgttggtggtctgagctgggataccagcaaaaaagatctaaaggattattttactaagtttggagaggtcgttgactgtacaataaaaatggatccgaacactggtcgatcaagagggtttgggtttattctcttcaaagattcttctagtgtggagaaggtcttagatcagaaggagcacagactggatggtcgtgtcattgaccctaaaaaggctatggctatgaagaaggaccctgtgaagaaaatctttgtgggaggtctaaaccctgaagccacagaggaaaagatcagagaatactttggccagtttggggagattgaggccattgaacttccaatagatcccaagttgaacaaaagacggggttttgtttttattacatttaaagaggaagaccctgtgaagaaagttctggagaaaaaattccatactgtcagtggtagcaagtgtgaaatcaaggttgcccagcccaaagaggtgtaccagcaacagcagtatggctctgggggccgaggaaatcgcaatcgagggaaccgaggcagtggtggaggtcagagtcagagttggaatcagggctacggcaactactggaaccagggctacggctaccagcagggctacgggccgggctatggcggctacgactactcgccctatggctattacggctacggccccggctacgactacagtcagggtagtacaaattacgggaagagccagcgacgtggtggtcatcagaataactacaagccatactgagaggcagcaggagcggccgagtgacgacgcacacgctttgtttggacgcggagtgaacacaattatgtaccaaatttaacttggcaaacttttatggcctgtcccatgtgcatcttatttaaaatttcccccggaaatcactctcctgtttactattccagagctctagttgttgtaggcagcgtgtggcgtctcagaggtcagagcggcattagggggctgattttattaccaggttaccctgttctagattggagggtctgcttcctgctgccgctctgcagcctggacctgtggaccctggttgtaaagagtaaactgtatcttaggaaaccagtgtcacctttttcaccttttaattttatattatttgtgtcatacatttccagtaatggaagtgttaattttactgtactttttggtaccttttgggaatctaatgtattgtaaggtattttacacgtgtcctgattttgccacgacctggatattgaagctatccaagcttttgaaataaaaatccctgagagtctggtccactaactccagggactgtgggacagaggaacaaacaagaaagaactcgaggcctcgctgagtggcacgcttgctgagtgctgccacatcccgcaagctgagcaggtatcccaactctgttcctgcccggtagaccacccgaggtgtgagtgtggtcttgtcttccagattcgtaggacagaagctccaggaggaggacccgcccaacatggcatcggagagcgggaagctatggggtggccgatttgcaggctcggtcgaccccaccatggacaagttcaactcatctatcgcctatgaccggcatctgtggaatgtggacctgcagggaagcaaggcctacagcaggggcctggagaaggcagggcttcttcaccaaagctgagatgcagcagatactgcaaggcctggacaaggtggctgaagagtgggcccaaggcatcttcaaattgtaccctaatgatgaagacatccaccttcctcaaggtgctcattgaagccatggtagaccgggcagaggcggagtgtgaagtcctcttccctgggtacacacacttgcagagagctcagcccatccgctggagccactggatcctgagtcacgccgttgcgctgacacgagatttagagagactgaaggaggtgcagaagcggatcaatgtcctgccactgggcagtggggccattgcaggcaaccctctaggtgtggaccgggagttcctctgtgcagaactgaactttggagccattacgctcaacagtatggatgccaccagcgagagagacttcgtggctgagttcctgttttgggcttctctgtgcatgacccatctcagcaggatggcagaagacctgattctctacggtaccaaggaattcaactttgtgcagctctccgatgcctacagcaccggaagcagcttgatgccccagaagaaaaacccagacagcttggagctgatccggagcaaggcgggccgagtgtttgaagtgtctgataccatgacagctgtcctccaagtagccactggagtcatctctacactgcagattcatcgtgagaacatggcacaggcactcagccctgacatgctggctaccgaccttgcctactacctggtccgcaaagggatgccattccgccagcccacgaggcctcagggaaagctgtggtcgtggcagagatgaaaggggtggctctcaaccagctgtcacttcaggagatgcagaccgtcagtcccctgttctcgagtgacgtgaatctcgtgtgggactacagccacagcgtggagcagtacacagccttgggtggcacagcacagtccagtgttgagtggcagatcagccaggtgcgggccctgctgcagatgtagcagccctagattccacccagtcaaagctgcgccccaataaagtggagccctggagaggccgccat

SEQ ID NO: 3184 - DNA, 1334 bp, Rattus norvegicus
  Genbank Accession No. NM_031331
gagcgccaggccaatcggaggtgctgttgtttgtcagtcccggagccggtccgcaaaggaaaggtggcaagatggtgttggagagcactatggtttgtgtggacaacagtgagtacatgcggaatggagacttccttcccacccggctgcaggcccagcaggatgctgtcaacattgtatgtcactcaaagacccgaagcaaccctgagaataacgtgggcttgatcacgctggccaatgactgtgaggtgctgaccacactcacccctgacactggccgaatcctctccaagctccacactgtccagcccaaaggcaagatcaccttctgcactggcatccgcgtggcccatctggctctgaagcaccggcagggcaagaatcacaagatgcgcatcatcgccttcgtgggtagccctgtggaggacaacgagaaggatctggtgaaactagctaaacgccttaagaaagaaaaagtgaatgttgacatcatcaattttggggaagaggaggtgaacacagagaagctgacagcctttgtgaacacattaaacggcaaggacggaactggatcacatctagtgacagtgcctcctgggcccagcctggccgatgctctcatcagttctcctattctagctggggaaggcggcgccatgctgggtcttggtgccagtgactttgagtttggagtagatcccagtgctgatcctgaattggccctggcccttcgtgtctctatggaagagcagcggcagcggcaggaggaggaggcacgacgggctgctgcagcctctgcagctgaggctggaattgccacacctgggactgaaggtgaacgagactcagatgatgccctactgaagatgaccatcagccagcaggagtttggccgtgcggggcttcctgacctaagcagcatgacagaggaagagcagattgcctatgccatgcagatgtccctgcagggagcagagtttggccaagcagaatcaggggacatcgatgccagctcagccatggacacatctgagccagtcaaggaggaggatgactatgacgtgatgcaggacccagagttccttcagagcgtcctagagaaccttcccggtgtggatcccaacaatgaagccattcgaaatgcaatgggctctctggcctcccaggccaccaaggatggcaagaaggacaagaaagaggaagagaagaagtgaggccggagggaggggtagccgagtctgccctggggactgtaaggatggggttggataaagacttagatgtgctctgcggccttgacaacggaataaagcttggagttttccctttgcttc

SEQ ID NO: 3185 - DNA, 780 bp, Rattus norvegicus
  Genbank Accession No. NM_031530
gcagagacacagacagaggccagcccagaaaccagccaactctcactgaagccagatctctcttcctccaccactatgcaggtctctgtcacgcttctgggcctgttgttcacagttgctgcctgtagcatccacgtgctgtctcagccagatgcagttaatgccccactcacctgctgctactcattcactggcaagatgatcccaatgagtcggctggagaactacaagagaatcaccagcagcaggtgtcccaaagaagctgtagtatttgtcaccaagctcaagagagagatctgtgctgaccccaataaggaatgggtccagaagtacattagaaaactggaccagaaccaagtgagatcagaaactacagtcttctataaaattgcatcaaccctaaggacttcagcacctttgaatgtgaacttgacccataaatctgaagctaatgcatccactctcttttccacaaccacctcaagcacttctgtagaagtgaccagtatgacagagaactagtgtgatttggaatgtgatgccttaagtaatgttaaacttatttaacttattgatattacactattcccttccatgaatactagaaatccttaaatgcaagatgtagatccatttttttatttctctgtgaatcctggttcaacactttcaatgtatgagagatgaatgggtaaactttgtgtttgagagtccaaggtattgtttaaaatattattatggatattcctaattattaaaagaaatatattatttttgtac

SEQ ID NO: 3186 - DNA, 1624 bp, Rattus norvegicus
  Genbank Accession No. NM_031543
gccctagcgcacatggcggttcttggcatcaccattgccttgctggtgtgggtggccaccctcctcgtcatatccatctggaagaagatctataacagttggaacctgcccccaggacctttccctcttcccatccttgggaacatttttcagctggatttgaaggatatccccaagtctttcaccaagttggcaaagcgcttcgggccagtgttcacactgcaccttggctcaaggcgcatcgtggtcctgcatggctacaaggctgtcaaggaggtgctactgaaccacaagaatgagttttctggacggggggacattcctgtgttccaggagtacaagaacaaggggattattttcaataatgggcccacatggaaggatgtgcggaggttttccctaagcattctccgagactggggaatggggaaacagggtaatgaggcccgcatccaaagggaggcgcaattcctggtggaggagctcaaaaagaccaaaggccagccttttgaccccacatttctgattggctgcgcaccctgcaatgtcattgcggatatcctcttcaacaaacgtttcgactacaatgacaagaagtgtctgaggctcatgagtttgttcaatgaaaacttctacctgctgagcaccccctggatccagctttacaataactttgcggattatctacgatacctacctggaagccatagaaaaatcatgaaaaatgtgtctgaaataaaacagtacacacttgaaaaagccaaggaacaccttcagtcactggacatcaactgcgcccgggatgtgactgactgtctcctcatagagatggagaaggaaaaacacagccaagaacccatgtacacaatggaaaatgtttctgtgactttggccgacctgttctttgcaggaactgagaccaccagcacaactctgagatatgggctcctgatcctcatgaaatacccagaaattgaagagaaacttcatgaagaaattgacagggttattgggccaagccgcgtccctgctgtcagagacagactggatatgccctacatggatgctgtggtgcatgagatccagagattcatcaatcttgtcccttccaacctaccccatgaagcaaccagagatactgtgttccaaggatatgtcatccccaagggtacagttgtgattccaactctggactccctcttatatgacagccatgagtttccagatccagagaagtttaaacctgagcatttcctgaatgaaaatgggaagttcaagtacagtgactatttcaaggcattttctgcaggaaagcgtgtgtgtgttggagaaggcctggcccgcatggaattgtttctgctcctgtctgctattctgcagcattttaacctgaagtctctggttgaccctaaggatatcgacctcagtcctgtcacagttggctttggcagtatcccaccccaatttaaactctgtgtcattccccgttcatgagacctgaaaacttcctgatatcccttccattgttatcccttaaactatgactgtttttaaaaaacccaagcatatagagttcctatcataaaatgaaaccgaaaaaataaataaaaccttgatgaattgt

SEQ ID NO: 3187 - DNA, 1489 bp, Rattus norvegicus
  Genbank Accession No. NM_031563
gaattccgagagccccaccgccgccgccggcctagtcaccatcacacccgggaggagccgcagccgtcgccgccggccccagtcaccatcaccgcaaccatgagcagcgaggccgagacccagcagccgcccgccgcccccgccgccgccctcagcgccgccgacaccaagcccggctccacgggcagcggcgcgggtagtggcggcccgggcggcctcacatcggcggcgcccgccggcggggacaagaaggtcatcgcaacgaaggttttgggaacagtaaaatggttcaatgtaaggaacggatacggtttcatcaacaggaatgacaccaaggaagacgtatttgtacaccagacggccataaagaagaataaccccaggaagtaccttcgcagtgtaggagatggagagactgtggagtttgatgttgttgaaggagaaaagggtgcggaggcagctaatgttacaggccctggtggagttccagttcaaggcagtaaatacgcagcagaccgtaaccattataggcgctatccacgtcgtaggggtcctccacgcaattaccagcaaaattaccagaatagtgagagtggggaaaagaatgaaggatcggaaagcgctcctgaaggccaggcccaacaacgccggccctatcgcaggcgaaggttcccaccttactacatgcggagaccctatgcgcgtcgaccacagtattccaacccccctgtgcaaggagaagtgatggagggtgctgacaaccagggtgcaggagagcaaggtagaccagtgagacagaatatgtatcggggttacagaccacgattccgcaggggccctcctcgccaaagacagcctagagaggatggcaatgaagaggacaaagaaaatcaaggagatgagacccaaggtcagcagccacctcaacgtcggtatcgccgcaacttcaattaccgacgcagacgcccagagaaccctaaaccacaagatggcaaagagacaaaagcagccgattcaccagctgagaattcgtccgctcccgaggctgagcagggcggggctgagtaaatgccggcttaccatctctaccatcatccggtttggtcatccaacaagaagaaatgaatatgaaattccagcaataagaaatgaacaaagattggagctgaagaccttaagtgcttgctttttgcccgttgaccagatccactagaactgtctgcattatctatgcagcatggggtttttattatttttacctaaagatgtctctttttggtaatgacaaacgtgttttttaagaaaaaaaaaaaaaaggcctggtttttctcaatacacctttaacggtttttaaattgtttcatatctggtcaagttgagatttttaagaacgttcgatttttaatttgtaataaagtttacaacttgattttttcaaaaaagtcaacaaactgcaagcacctgttaataaaggtcttaaatggaattc

SEQ ID NO: 3188 - DNA, 2441 bp, Rattus norvegicus
  Genbank Accession No. NM_031576
gatctggtcggtaccggagagcgcaggttgtatcaccaacatgggggactctcacgaagacaccagtgccaccatgcctgaggccgtggctgaagaagtgtctctattcagcacgacggacatggttctgttttctctcatcgtgggggtcctgacctactggttcatctttagaaagaagaaagaagagataccggagttcagcaagatccaaacaacggccccacccgtcaaagagagcagcttcgtggaaaagatgaagaaaacgggaaggaacattatcgtattctatggctcccagacgggaaccgctgaggagtttgccaaccggctgtccaaggatgcccaccgctacgggatgcggggcatgtccgcagaccctgaagagtatgacttggccgacctgagcagcctgcctgagatcgacaagtccctggtagtcttctgcatggccacatacggagagggcgaccccacggacaatgcgcaggacttctatgactggctgcaggagactgacgtggacctcactggggtcaagtttgctgtatttggtcttgggaacaagacctatgagcacttcaatgccatgggcaagtatgtggaccagcggctggagcagcttggcgcccagcgcatctttgagttgggccttggtgatgatgacgggaacttggaagaggatttcatcacgtggagggagcagttctggccagctgtgtgcgagttctttggggtagaagccactggggaggagtcgagcattcgccagtatgagctcgtggtccacgaagacatggacgtagccaaggtgtacacgggtgagatgggccgtctgaagagctacgagaaccagaaaccccccttcgatgctaagaatccattcctggctgctgtcaccgccaaccggaagctgaaccaaggcactgagcggcatctaatgcacctggagttggacatctcagactccaagatcaggtatgaatctggagatcacgtggctgtgtacccagccaatgactcagccctggtcaaccagattggggagatcctgggagctgacctggatgtcatcatgtctctaaacaatctcgatgaggagtcaaacaagaagcatccgttcccctgccccaccacctaccgcacggccctcacctactacctggacatcactaacccgccacgcaccaatgtgctctacgaactggcacagtacgcctcagagccctcggagcaggagcacctgcacaagatggcgtcatcctcaggcgagggcaaggagctgtacctgagctgggtggtggaagcccggaggcacatcctagccatcctccaagactacccatcactgcggccacccatcgaccacctgtgtgagctgctgccacgcctgcaggcccgatactactccattgcctcatcctccaaggtccaccccaactccgtgcacatctgtgccgtggccgtggagtacgaagcgaagtctggccgagtgaacaagggggtggccactagctggcttcgggccaaggaaccagcaggcgagaatggcggccgcgccctggtacccatgttcgtgcgcaaatctcagttccgcttgcctttcaagtccaccacacctgtcatcatggtgggccccggcactgggattgcccctttcatgggcttcatccaggaacgagcttggcttcgagagcaaggcaaggaggtgggagagacgctgctatactatggctgccggcgctcggatgaggactatctgtaccgtgaagagctagcccgcttccacaaggacggtgccctcacgcagcttaatgtggccttttcccgggagcaggcccacaaggtctatgtccagcaccttctgaagagagacagggaacacctgtggaagctgatccacgagggcggtgcccacatctatgtgtgcggggatgctcgaaatatggccaaagatgtgcaaaacacattctatgacattgtggctgagttcgggcccatggagcacacccaggctgtggactatgttaagaagctgatgaccaagggccgctactcactagatgtgtggagctaggagctaccagcctcccacccctcgctccctgtaatcacctaacttctgccgacctcacctctggtggttcctgcctggcctggacacagggaggcccagggactgactcctcctggcctgagtggtgccctcctgggcccctaggcagagcccggtccattgtatcaggcagcccagccccagggcacatggcaagagggactggacccacctttgggtgatgggtgccttaggtcctctgcagctgtacagaaggggctcttctctccacagagctggggtgcagcccccacacgtgattttgaatgagtgtaaataattttaaataacctggcccttggaataaagttgttttcagtaaatt

SEQ ID NO: 3189 - DNA, 3272 bp, Rattus norvegicus
  Genbank Accession No. NM_031588
gcggccgcagctgccgggagatgcgagcgcagaccggattgtgatcacctttccctcttcgggctgtaagagagcgagacaagccaccgaagcgaggccactccagagccggcagcggagggacccgggacactagagcagctccgagccactccagactgagcggacgctccaggtgatcgagtccacgctgcttcctgcaggcgacaggcgacgcctcccgagcagcccggccactggctcttcccctcctgggacaaacttttctgcaagcccttggaccaaacttgtcgcgcgtcaccgtcacccaaccgggtccgcgtagagcgctcatcttcggcgagatgtctgagcgcaaagaaggcagaggcaaggggaagggcaagaagaaggaccggggatcccgcgggaagcccgggcccgccgagggcgacccgagcccagcactgcctcccagattgaaagaaatgaagagccaggagtcagctgcaggctccaagctagtgctccggtgcgaaaccagctccgagtactcctcactcagattcaaatggttcaagaatgggaacgagctgaaccgcaaaaataaaccagaaaacatcaagatacagaagaagccagggaagtcagagcttcgaattaacaaagcatccctggctgactctggagagtatatgtgcaaagtgatcagcaagttaggaaatgacagtgcctctgccaacatcaccattgttgagtcaaacgagttcatcactggcatgccagcctcgactgagacagcctatgtgtcctcagagtctcccattagaatctcagtttcaacagaaggcgcaaacacttcttcatccacatcaacatccacgactgggaccagccatctcataaagtgtgcggagaaggagaaaactttctgtgtgaatgggggcgagtgcttcacggtgaaggacctgtcaaacccgtcaagatacttgtgcaagtgcccaaatgagtttactggtgatcgttgccaaaactacgtaatggccagcttctacaaagcggaggaactctaccagaagagggtgctgacaattactggcatctgtatcgccctgctggtggtcggcatcatgtgtgtggtggcctactgcaaaaccaagaagcagcggcagaagcttcatgatcggcttcggcagagtcttcggtcagaacggagcaacctggtgaacatagcgaatgggcctcaccacccaaacccaccgccagagaacgtgcagctggtgaatcaatacgtatctaaaaacgtcatctccagtgagcatattgttgagagagaagtggagacttccttttccaccagtcattacacttccacagcccatcactccacgactgtcacccagactcctagtcacagctggagtaatgggcacacggagagcgtcatttcagaaagcaactccgtaatcatgatgtcttcggtagagaacagcaggcacagcagtcccgccgggggcccacgaggacgtcttcatggcctgggaggccctcgtgataacagcttcctcaggcatgccagagaaacccctgactcctacagagactctcctcatagcgaaaggtatgtatcagccatgaccaccccggctcgtatgtcacctgtagatttccacacgccaagctcccctaaatcgcccccttcggaaatgtctccacccgtgtccagcatgacggtgtccatgccctctgtggcagtcagcccctttgtggaagaagagaggcctctgctgcttgtgacgccaccaaggctacgggagaagaaatatgatcatcacccccagcaactcaactcctttcatcacaaccctgcacatcagagtaccagcctcccccctagcccactgaggatagtggaggatgaggagtacgagacgacccaggagtatgagtcagttcaagagcccgttaagaaagtcaccaatagccggcgggccaaaagaaccaagcccaatggccacattgccaataggttggaaatggacagcaacacaagttctgtgagcagtaactcagaaagtgagacagaagacgaaagagtaggtgaagacacaccattcctgggcatacagaaccccctggcagccagccttgaggtggcccctgccttccgtctggctgagagcaggactaacccagcaggccgcttctccacacaggaggaattacaggccaggctgtctagtgtaatcgctaaccaagaccctattgctgtataaaacctaaataaacacatagattcacctgtaaaactttattttatataataaagtatttcaccttaaattaaacaatttattttattttagcagttctgcaaatagaaaacaggaagaaaaaaaaacttttataaattaaatatatgtatgtaaaaatgtgttatgtgccatatgtagcaatttttttacagtatttcaaaaacgagaaagatatcaatggtgcctttatgttctgttatgtcgagagcaagttttataaagttatggtgatttctttttcacagtatttcagcaaaacctcccatatattcagtttctgctggctttttgtgcattgcattatgatgttgactggatgtatggtttgcaaggctagcagctcgctcgtgttctctctctctctctctctctctctctctctgtctctctctctgtctctctctctctctctctctctctctctctctctctctctctctctctctctctgtctctctctctgcttcccgtagctcccaaccagtactgtcttggactggcacatccatccaaatacctttctactttgtatgaagttttctttgctttcccaatatgaaatgagttctctctactctgtcagccaaaggtttgcttcactggactctgagataatagtagacccagcagcatgctactattacgtatagcaggaaactgcaccaagtaatgtccaataataggaagaaagtaatactgtgatttaaaaaaaaaaacaaactatattattaatcagaagacagcttgctcttggtaaaaggagctaccattgactctaattttgactttttagttattgttcttgacaaagagtaacagcttcaagtacagcctagaaaaaaaaatgggttctggcctgctatcaggataaatctatcgacgtagatagattcaactcagtttcactttctgtcttgggggaaatgatccagccactcatatgacgaccaaccaaccacaggtgcctctgctccctgt

SEQ ID NO: 3190 - DNA, 1930 bp, Rattus norvegicus
  Genbank Accession No. NM_031589
aaaaacacagctcagcagatccgggcactggagagggagctgcaagcaggagcagtcaagagtgtggtcagaagcaccgtgagtggaccagcagggccggctttttctaccatggcggcccaaggctatggctattaccgcactgtcatattcacagccatgttcggaggctacagcctttactacttcaaccgcaaaaccttctcttttgtcatgccctccttggtggatgagatcgctctggacaaggacgatttggggctcatcacgagcagccagtcggcagcctacgccatcagcaagtttgtgagcggggtgctgtctgatcagatgagtgcccgttggctcttctcctctgggctgctcctggttggtctggtcaacgtagtcttctcgtggagctctacagtaccggcttttgctgctctctggtttcttaatggtctggcacaggggctaggctggcccccctgtgggaagatcctgaggaagtggtttgagccatcccagtttggtacttggtgggctgtgttgtcaaccagcatgaacctggctggaagcctgggacctatcttggcgacaatccttgctcagagctacagctggcgcagcaccctggccctgtctgggtcactgtgtgtggttgtctccttcttctgtctcctgctcatccacaacgaacctgctgatgttggactccgaaatctggaccctcgcccctccaagggcaaaaagggctcgtcaaaggaggagagcaccctacaggacctgctgctgtccccctatctctgggtgctctccactggctacctcgtggtctttggggtaaagacttgctgtacagactggggccagttcttccttatccaggagagagggcagtcggcccttgtgggtagttcctacatcagtgccctagaggttggaggccttgtaggcagcattgcagctggctatctgtcagacagggctatggcaaaggcagggctgtctgtgtatgggaaccctcgccacagcctgttgctgctcatgatggctggcatggcagcatccatgttcctcttccgggtaacagtgaccagcgactctcccaagatctggatcctggtattgggagctgtatttggtttctcttcttatggtcccattgccttgtttggagtcatagctaatgagagtgcacctcccaacttgtgtggtacctctcatgctattgtggggctcatggccaatgtgggtggatttctggctgggttacccttcagtaccatcgccaagcactatagctggagcacagccttctgggtggcagaagtgatctgtatagccagcacagttgtcttcttcttgcttcgaaatatccgcaccaagatgggccgagtatccaagaaggcagagtgaaaagagcactcactatagagcatccccaactgcaacctcattggcaggacacagaaaggaagagaggctgctctggctagaacagagcctttacatatctgtgtctacactgtctctctggacctccgtggtgctgcaagttaccagtggctaatgaggtcctatgctctatttaaatgatgtttggttttaggctccattggcttctgtttctaccttctagcagacagacaactcctaaattcagggtgtctcctatacccctcttcctctcctgagtccccatctcctagtgaggtggttctatctctgcagctgcagaatattaatggcctgtggtttctgctgtaccccaaggcttcttgttaggggtcaacactgttgccaatacctcagtccctaagggaggagaggaggccaccactctcatcagttacctggggacaaaagggaggaatgtagagagcaaactgtcttgtatagactaataaaactagatttgatactaaaaaaaaaaaaaaaaaaaaaa

SEQ ID NO: 3191 - DNA, 1356 bp, Rattus norvegicus
  Genbank Accession No. NM_031642
ggagactgtcttttccaacccgacatggatgtgctcccaatgtgtagcatcttccaggaactacagattgtgcacgaaacgggctacttctcggctctgccgtccctggaggaatattggcaacagacctgcctggagttggaacgctatcttcagagtgagccctgctacgtgtcagcctctgagataaaatttgacaaccaggaagacctgtggaccaaaatcattctagcacgggagaggaaggaggaatcagaactgaagatttcttctagtcccccagaggactctctgatcagctccggctttaattataacttagagaccaatagcctgaactctgatgtcagcagcgaatcttcagacagttcggaggaactttcgcccacgaccaagtttacctctgaccccattggtgaagtcttagtcaattcaggaaatctgagttcctcggtcatttccacacctccttcttctcccgaagtaaatagggaatcttctcaactatggggctgtgggccaggagacctgccctcacctgggaaggttcgaagtgggacctcggggaagtctggcgacaagggtagtggcgacgcctccccagatggcagaagaagggtacatcggtgccattttaacggctgcaggaaagtttacactaaaagctcccacttgaaagcacatcagcgcactcacacaggagaaaagccttacagatgctcttgggaaggttgtgagtggcgttttgcaagaagtgatgagttgaccagacacttccgaaagcatactggtgccaagccctttaaatgctctcactgtgacaggtgtttctccaggtctgaccacctggccctgcacatgaagaggcatctctgagggagcagaggatgaatcctgtaggctaaaagaggcttccaggctaagaggcggccatggaaggagggatacctgtaccagccaaagcatgccattgcttcctacccagttacctccagaggcctctctttggaaggtcttttgagggctacaaaagtcatgtcagaagcggcatagcacccacggtgcatggtgtttgggtgaccccggactcaccactggtttctaaccttctgagaggctctaagcttttcgccgtgagcatgcgcactgagaatgttaatgggtgggaatgactgactgtatgttgaggatctattactgactgtatggcgaggcagactttttttttccccccttgtggtagcaaatacctgcaagagacagaaaaaaaaagcagtttgaatgttttgtgtgtgaggagtattccaagggatgagttgaccaccaatcatttcctgaagggtgtctgcaccttag

SEQ ID NO: 3192 - DNA, 1766 bp, Rattus norvegicus
  Genbank Accession No. NM_031684
caccatgacaaccagtcaccagcctcaggacaggtataaggctgtctggctcatcttctttgtcctgggtctggggacactgctcccctggaatttttttataacagcaacccagtatttcacaagccgcctgaacacgtcccagaatatatccttggtcaccaaccaatcatgcgaaagcaccgaggccttggctgacccctcagtgtccttgccagcccggagttctctcagtgccatcttcaacaatgtcatgaccctgtgtgccatgttgcccttgctgatcttcacctgcctcaactctttcctgcatcagaaggtgtctcagtcccttcggatcttgggcagcctgctggctatcctgttggtgttcctcgtcactgccaccctggtgaaggtgcagatggatgccctgtccttcttcatcatcaccatgatcaagattgtgctcattaactcatttggtgccattttgcaagccagccttttcggtctggcaggcgtcctgccggccaactacacagcccccatcatgagtggccagggcctggctggcttcttcacctctgttgccatgatctgtgccgtcgccagtggctctaagctgtcagaaagtgcttttggttacttcatcacggcctgtgcagttgtcattctggccatactgtgttacctggccctgccttggatggaattctaccgacattacctgcagctcaaccttgcggggcctgcagagcaggagaccaagttggatctcatcagtgaaggagaggagccaagaggaggaagagaggaatctggggtgccaggccccaactctctacccgccaacagaaaccaatccatcaaagccatactgaagagtatctgggtcctggctctgtctgtctgtttcatcttcacagtcaccattgggttgttccctgctgtgactgctgaggtggaatccagcatcgcaggcacaagtccctggaaaaactgctacttcatccctgtggcctgcttcctgaatttcaatgtctttgactggctaggccggagcctcacagctatttgcatgtggcctggtcaggacagccgctggttgccggtcctggtcgcctgcagggttgtgtttatccccctgctgatgctctgcaatgtgaagcagcaccactacctgccctccctctttaagcatgatgtctggttcatcaccttcatggccgcctttgccttctccaatggctacctcgccagcctctgcatgtgcttcgggcccaagaaagtcaaaccggctgaggcagagactgccggaaacatcatgtccttctttctgtgtctgggcctggctctgggagctgtgttgtccttcttgttaagggcacttgtgtgagcgaccctgtgtggacagaggaactacactgcctgcttcctgctcacttccttcgctgttagggacgagcaggggtccagagggctgctcttctgctttcctccggtgctgggcccagatgtccaggaacaaaggagggagcctctgaggatggacttgggattgggggtcagagtggtagggggacaatggtctctgacggacagctctgactgatccctgcctaagccaagcacaagagactccacaaggatggggtggagacagatggctgactgtgtatcatgatctgatgtcccttgcccttctttcttctgtgcctgttccaggtccccgatccttgtcattttactgccttttttatactgacagaaaccaggtgccttca

SEQ ID NO: 3193 - DNA, 2234 bp, Rattus norvegicus
  Genbank Accession No. NM_031698
ctcggaggaatggcgccgccgggttcaagtgctgtcttcctgttggccctgacaatcacagccagcacccaggctctgacccccacccactacctcaccaagcatgatgtggaaagactgaaagcctcactggatcgccctttcacgagcttggagtctgccttctactccattgtgggactcaacagccttggggcacaggtgccagatgtcaagaaagcgtgtgccttcatcaagtcaaaccttgatcccagcaacgtggattctctcttctatgctgcccaatccagccaagtcctctcaggttgtgagatatctgtttcgaatgagaccagagatctgcttctggcagcagtcagcgaggactcctccgttgcccaaatctaccatgcagttgccgccctcagtggctttggtcttcccttggcatcccatgaagcccttggtgcccttaccgctcgcctcagcaaggaggagactgtgctggcaaccgtccaggctctgcacacagcatcccacctatcccagcaggctgacctgaggaacattgtagaagagatcgaggaccttgttgctcgcctggacgaactagggggtgtgtatctccagtttgaggaaggcctggaacttacagcattgtttgttgctgccacctacaagctcatggaccatgtggggactgaaccgtccatcaaggaggatcaggtcatccagctcatgaacacaatcttcagcaagaagaactttgagtccctctcagaagccttcagtgtggcctctgctgctgctgcattgtcccagaatcgctatcacgtaccagtggtggttgttcctgagggctctgcttctgacactcaagaacaggctatcctgcggttgcaagtcagcagtgttttgtctcacgctctggctcaagccgcagttaagctggaacatgctaagtccgtggcttccagagctactgtcctgcagaagatgcccttttcacttgtaggggatgtttttgagctaaacttcaagaatgttaaacttcccagtggctactatgacttctctgtcagagttgaaggtgacaaccgttacattgcaaacactgtagagcttagagtcaagatctccactgaagttggcatcaccaatgctgatctttccactgtggacaaggatcagagcatcccacccaaaactacccgggtgacctacccagccaaagccaagggcacattcatcgcagacagccatcagaacttcgccctgtttttccagctggtagatgtgaacaccggtgcggagctcacccctcaccagacatttgttcgacttcataaccagaagactggccaggaagtggtgtttgttgctgagccggataacaagaatgtgcataagtttgaactggacacctctgaaaggaagattgagttcgactctgcctctggcacttacacactctacctaatcatcggggacgccactttgaagaaccccatcctctggaacgtggctgatgtggttatcaagttccctgaagaagaagctccctccactgtgctgtcccagaacctttttaccccaaaacaggaaattcagcacctgttccgagagcctgagaagaggccccccactgtggtgtccaatacattcacggccctcatcctctcgcccttgctcctgctctttgcactgtggatccggattggagccaatgtctccaacttcacctttgctcctaccacgattatctttcacctgggacatgctgcaatgctggggctcatgtatgtctactggactcagctcaacatgttccagaccctgaagtacctggccgtcctgggcactgtgacatttctggctggcaaccgaatgctggcccagcaggcagttaagagaacagcacattagttccagaagaagtttgaagaccctgaactcggaaatgaccgtttaacaaagagtggagacagttcagagtgtggaaagaatcgggggacagaataggagaagaggaaatacctgttatttaaagagagaaaagtcgagctatgcttacacgtttacttgtttctcactttttgcttcactgaacagatatgtttggacccagattgtctgtccctttgttgtgatgcctggccagattctgtgaatatcccaggttacccagaggttgtatttgaaaagttgaaatctgtaattcatcagctttggaataaagagaatggtggactccc

SEQ ID NO: 3194 - DNA, 1608 bp, Rattus norvegicus
  Genbank Accession No. NM_031704
acggatcagggtgtctacctgggtctctcaaagacacaggttctgtcccctgcaactgctatcaatagcagcagtgacatcgctcctttgcccaccccggtggccctggtcccctcccctcccgacactatgtcctgccgggatcggacccaggagttcctgtctgcctgcaagtcgctgcagagccgtcagaatggaatccaaacaaataaaccagctctgcacgctacccggcagtgcagcgagtttaccctcatggccaggcgcattgggaaagatctcagcaatacatttgccaagctggagaagctaacaatcctggcaaagcgcaagtccctctttgatgataaagcagtagaaattgaggaactaacatacatcatcaaacaggacatcaatagcctcaacaaacaaattgctcagcttcaagattttgtgagggccaagggcagccagagtggccggcatctgcagacccattccaacaccattgtagtttcattgcagtcaaaactggcttccatgtccaatgacttcaagtctgttttggaagtgaggactgaaaatctgaaacagcagaggaaccgtcgggaacagttctccagggcgccagtgtcggcactgcctctggcccccaacaaccttggaggtggtcccatagttctgggaggagagtcccgagcctccagggacgtggccatcgacatgatggaccctagaacaagccagcagcttcagctcattgatgagcaggattcctacatccagagtcgggcagacaccatgcagaacattgagtctacaattgttgagctgggctccatttttcaacaattggcacacatggttaaagaacaggaggaaacaattcagaggattgacgagaatgtgcttggagcccagctggatgttgaggccgcccattcagagatcctcaagtacttccagtcagtcacctccaatcggtggctcatggtcaaaatcttcctcatcctcattgtcttcttcatcatctttgtggtcttccttgcctgaaccctcctccctcattctgagccactccatggagggcctggaacccttctggaaggacaggtggccactattgccactgagcctgtgcagggtagttgggagaaaggccatttccttggaactgctaagaatggccagtgtccctgattccccacccttgtctctggccactctgtcctaccctcaggcccatgaaacacactggttctggatttggcctctgctgtgaagtggcagggaacagaagccagctagggccagtggggaggttgtctctaccatgagatttttataaacccagaccagcctcccctaaaggtaactggcagcaagaggaaacaatgccctccttgccttctggagagtgaggtgaggaagtaaaactatcccagggaccaacttaatcatctgggtcatctagaacttgactgccaccttctcctcaccatgtgaggtgggggggctctgagccctacagttgcacaaacctgactttggctactggtgactctcaatctgccaaacatgctgcagcctgtttcctcccaattacagcaagactgtcagccttca

SEQ ID NO: 3195 - DNA, 696 bp, Rattus norvegicus
  Genbank Accession No. NM_031706
ctctttccagccagcgccgagcgatgggcatctctcgggacaactggcacaagcgccgcaagaccgggggtaagagaaaaccctaccacaagaagcggaagtatgagctgggacggccggccgccaacactaagattggccctcgccgcatacatacagtccgagttcgaggaggcaataagaagtatcgtgctctgagattggatgtggggaacttttcctggggctcagagtgttgtactcgcaaaacaaggatcattgatgttgtctacaatgcatccaataacgagcttgtccgcaccaagaccctggtgaagaactgcattgtgcttattgacagcacaccgtaccgacagtggtacgagtcccactatgcactgcccctgggccgcaagaagggggccaagctgactcctgaggaggaagagattttaaacaaaaaacgatcaaagaaaattcagaagaaatatgatgaaaggaaaaagaatgccaaaatcagcagtcttctggaggagcagttccagcagggcaagcttctcgcctgtattgcctcaagaccaggccagtgtggcagagcagatggctatgtgctcgaaggcaaggagctggagttctatctgcggaagatcaaagcccggaaaggcaaataaactgtcatagctcgtgtaataaaggtgtttgctgttctgtatatgt

SEQ ID NO: 3196 - DNA, 917 bp, Rattus norvegicus
  Genbank Accession No. NM_031714
cacgaggttgttactgccgtttcttctctggaggatcttcaagagggaaggattagcatgtcgtcaataatcagaaaagtgatcagcacttcaaaagccccggcggccattggtgcctacagccaagctgtgctagtggacaggaccatttacgtttctggacagataggcatggatccttccagtggacaacttgtgccaggaggggtagcagaagaagctaatcaagctcttaaaaacctgggtgagattctgaaggctgcaggctgtgacttcactaatgtggtgaagacaactgttttactggctgacataaatgactttggcactgtcaatgagatctacaaaacatatttccagggtaaccttcctgccagggctgcttaccaagtcgccgctttacccaaaggaagtcgaattgaaatcgaagccatcgctgtccaggggcctttcaccacagcaggactgtaaggagccatgctgatgctgactctggagtctttacaatgtctctcacactttaaatttaacaaatgattgctgggaagtgcacacatgaccgtgtgaagtgatcgtgggaatgatcatacatgtggagatttgacattaattggggattattcagtacagtggctagtgctgtaatttcacttatgtggctgggtgtgagagaaaggcacatagctgctaacatgcagagcagaatcatagacgaaacagtaaagagcacacctaattaaatcatatcaatttgcttgtgtggaatacttagttctcatgttagatatcagaaactaaattaaaatattcaaactttaatagtaccaggagaaaaaagtggacccaaatcttataagataatactgccttaatggaataaaaaacagatgtgtaaaaaaaaaaaaaaaaaactcgag

SEQ ID NO: 3197 - DNA, 716 bp, Rattus norvegicus
  Genbank Accession No. NM_031722
agcggcttcgcctcgtccgcaccatggtgactctcgcagaactgctggtgctgctggccgcgctgctggccacggcctcgggctacttcgtcagcatcgacgcgcacgccgaggagtgcttcttcgagcgggtcacctcgggcaccaagatgggcctcatcttcgaggtggcggagggcggcttcctggacatcgacgtggagatcacaggaccagataataaaggaatctataaaggagaccgggagtccagcgggaagtacacgtttgcagcccacatggatgggacatacaagttctgctttagtaataggatgtccactatgactccaaagatagtgatgttcaccattgacattggggaggctcctaaaggacaagacatggagacagaagctcatcaaaacaagctagaagaaatgattaatgagctggcagtggccatgacagccgtaaagcacgaacaggagtacatggaagtccgggagagaatacacagagccatcaacgacaacacaaacagcagagtggtcctttggtccttcttcgaagctcttgttcttgttgccatgacattgggacagatctactacctgaagagattttttgaagtccggagggttgtttaaaaggccttttcctattgatcccaaattcatgatttacttgtttaccaaacaccttggtcataataatgtcattagtttatacatttt

SEQ ID NO: 3198 - DNA, 2754 bp, Rattus norvegicus
  Genbank Accession No. NM_031756
agacagcaagtctaagtctggaggttccactgattcggacctggctgcagagaggttcacctattccctgcagtcatggctgtccaccgtggctctgcacgagctgctcccgcctcagataaagtacagaaaaacaagcctgcacagacatcggggctggaacagggcagccgaatggcgagaatttttgggtttgaatgggcagatttatccagctggcagagtgtcgtgaccctacttaaccgaccaacggaccctgcaaacctggctgtcttccgttttctctttgcattcttgatgctgctggacatcccccaggaacggggccttagctccctggaccgaaaatacttggatgggctggatgtgtgccgcttccccttgctggatgccttgcgcccactgccacttgactggatgtatctcgtctacaccatcatgtttctgggggcactgggcatgatgctgggcctgtggtaccggctaagctgtatgttattcctgctaccatactggtacgtgtttctcctggacaagacatcgtggaacaatcactcctatctgtatggtttgttggcctttcagttgacattcatggatgcaaaccactactggtctgtggatggcctgctgagtgcccaaaagaagaatgctcacgtgcccctttggaactacacagtcctgcgtggccagatcttcattgtgtatttcattgcgggtgtgaaaaagctggatgctgactgggttgagggctactccatggagcatttgtcccggcactggctttttagtcccttcaagctagtgttgtcggaggagctgacaagcctgctggtggtacactggtgtgggcttctccttgacctctcggctggcttcctgctcttcttcgatgcctccagacccattggcctcgtcttcgtgtcctactttcactgcatgaactcgcagctcttcagtataggtatgttcccctatgtcatgctggccagcagccctctcttctgctcagctgaatggcctcggaagctggtagcccgatgcccgaaaaggctgcaagagctgctgcctgccaaagctgctcctcggcctagtgcttcctgtgtgtataagagggcccgggcgaaagctggtcaaaagccaggcctacgccaccatctgggaactgtcttcaccctgctctaccttctggagcagctcttcctgccctattcccatttcctcacgcagggttacaacaactggacgaatgggctgtatggctattcctgggacatgatggtgcactcccgctcccaccagcatgtaaagatcacctaccgtgatggcctcactggagagctgggctaccttaaccctggggtattcacacagagccggcgctggaaggaccatgcagacatgctgaagcaatatgccacttgcctgagcctcctgcttcccaagtacaatgtcactgagccccagatctactttgatatctgggtctccatcaatgaccgcttccagcagaggctttttgaccctcgcgtggacatcgtgcaggccgtgtggtcccccttccggcgcacgccttgggtgcagccactcttgatggacttatctccctggaggaccaagttacaagacattaagagcagtctggacaaccacactgaggtggtcttcattgcagatttccctgggcttcacttggagaattttgtgagtgaagacctgggcaacaccagcatccagctgctgcagggagaagtcactgtggaattggtggcagaacagaaaaaccagactcttcgagaaggagagaaaatgcagttgcctgctggagagtaccataaagtctatactgtatcatctagtccttcctgctacatgtacatctatgtcaacactacagaggtcgcactggagcaagacctagcatatctgcaagaattaaaggagaaggtggagaacggaagtgaaacagggcccctgcctccagaacttcagcctcttttggaaggggaagtaaaagggggccctgagccaacacctctggtccaaacctttctgagacggcagaggaagctccaagaaattgaacgaaggcgaaatagccctttgcatgagcgcttcctccgctttgtgctgcggaagctgtatgtctttcgacgcagcttcctgatgactcgaatttcacttcgaaacctgctatttggccgcccttccctagagcaattagcccaagaggtgacatatgcaaacttgcgaccatttgaaccagttgatgagtcaagtgcttcaaacacagattcttccgatcctcatccttcagagccagattctgagcatgttcactctgagctctgaggagtccagatgctgtgcagctacgggggaaggctgttacaggcttattgtctgtgcaaaggacagtttttgggagagaaatgattttgagagaggctttcacagtacagcccaggctggcctcaagctcatggtggtccctgtttcagcctgttttgtcattacatatatatctccagacttagttgtttttccctttacattttacccccttttaagttctttaaaattatagcttacaggatccaaggtaaaagagaagaatttgaatcccaagatttgaggtgcttttagtttttatacaggatttctctgtgtagacaagactggccttgctgacagatttaccagcctctgcctcctgggattaaaggaatgggacatcaaaaaaaaaaaaaaaaa

SEQ ID NO: 3199 - DNA, 861 bp, Rattus norvegicus
  Genbank Accession No. NM_031774
gaattcggcacgagcgcgctcgggtggggccgcctaggtgctgctgggctcggggatatttacagcggttctattcactgcagcgcgaacatggcggcccagaaggaccagcagaaggatgccgaagtggaagggctgagcgccacgaccctgctacccaagctgattccctctggcgcaggtcgagagtggctggagcggcgccgtgctaccatccggccctggggcaccttcgtggaccagcaacgtttctcgcgaccccgcaacgtaggcgagctttgccagcgcctggttcgcaacgtggagtattatcaaagcaactacgtgtttgtgtttctgggcctcatcctgtactgcgtggtgacatcccccatgctgctggtggctctggctgtcttctttggcgcctgttacattctctatctgcgcacgttgcagtctaagcttgtgctctttggccgtgaggtgagcccagcacatcagtacgccctggctggtggtgtctctttccctttcttctggctggccggtgctggctccgctgtcttctgggtcctgggagccaccctggtacttataggctctcacgctgccttccaccagatagagcctgcagatggtgaggaactgcagatggaacctgtgtaaagtgtcctccaggacctgccagcctctcctgccggcctctcctgcccgtggctgtcccctctctgtctgttcttgccctacctgacctagacactcagctcaactcagagcctaactctgagccttccaccctagacctcaaacccggggagaggcttttatcttcggaaataaaacagttacaattgaaaaaaaaaaaaaaaaaaactcgag

SEQ ID NO: 3200 - DNA, 1446 bp, Rattus norvegicus
  Genbank Accession No. NM_031775
ttccggcaggaaacgggacctggagagcggaggcctcaggacgagcgcggacacccggagctcgtgggcagcctgaaaagtggggagaagtggcagaccagagctcggggcacaggcctgcaggagcccagctcaagacccctaaccaaggccagaccaaggccagacctgggcaggcacctccatcacagcgccttctgcagtcagaacttgttgctgtccacaggggaaagtaaaacatgacggagacagatggcttctacagaagtagggaagtgttggatccagccgagcagtacaagatggaccacaagaggagaggaactgccctaatcttcaatcacgagaggttcttctggcacctagcactcccagagaggcggggcaccaacgcagacagggacaacccgactcgaaggttctcagagctaggatttgaagtgaaatgctttaacgacctccgggcagaagaactactgctcaagattcacgaggtgtcgacttccagccacgtagatgccgattgcttcctgtgtgtcttcctgagccacggggaaggcaaccacatttacgcatacgatgccaaaattgaaattcagaccttgactggcttgttcaaaggagacaagtgtcagagcctggttggaaaacccaagatattcatcatccaggcctgtcggggcagccagcatgacgtgcccttggttcctctggacgtggtggatcatcagacagacaagctggacgacaacgtgacccaggtggatgctgcctcggtgtacactctgcctgcgggggcggacttcctcatgtgttactctgttgcagaagggtattactctcaccgagagactgtgaacggctcctggtacattcaggatttgtccgagatgctggccaggcacggcagttccctggagttcaccgagctgctcacgctggtgaacaggaaggtctctcagcgccgtgtggatttctgcaaagacccaggtgcaattggcaagaagcaggttccctgctttgcctcaatgctgaccaaaaagctgcatttctgtcccaaacctagtaagtagggccgtccgacttgctacaaatgtttcacacacatttcccttctacacagaggccagctggccaaagactccgcccaccaacggacactgtttgaatttttaaggtgctacagaaaagtaatgttttgcctttgttattattttcaatcatgttggggatggggaaggctaaagaaatctaggaaattactgtgcgcaaatgcccaatacatttattatgtttctggtaaatggcaagattactaagaataccaactactttgccttaccttttgtgacactatttatataggctcattgtataatgtttttaaagatctttgaaactcaagaatgagatcgttttctcctaataaaaatgtctaaaacccgg

SEQ ID NO: 3201 - DNA, 1939 bp, Rattus norvegicus
  Genbank Accession No. NM_031781
accatggcttgtctacgagttccgcactcagagccctcgtcttccagcttggtgacaatgccggcctgaacctggatcccagacatggagttcctgccagaaccccagcatcccccagggcccccgaccatggacttggaggagcccaaaggccccgaggttccctctgaggaccatccctctaacacgcagggggccttagggcccagaggccccgataccctgagcgagatggagctggacacatccagtgtgcgggcgctggttcagcagttggaagctttgcccagcgacctgggtggccagttcccagatggagccccctgtcccctgcacattgccactggccaaggcctagccacccaggagaatttggatgctggtgggctcctgtcagccgaggcaggtggggacaaccttctgggtctgctgaggtgtgaggcctctttgcctgctcaatccgttcccccagatcctgcacaggctgcaccccgccttctgcagccaccagaggaccccggtggggaccctggatggatggaagggacagagccagcagacaacaggagttccagcagctccccggagctgtggctagagacagcacccctggtgacacatcgagatccacccgtgggtacccagagccaggagaccctggcttcgtgccctgccgtctccgaggttccaggtccctgtggacaggaggagctcatggacggagtcctcttcggggcgaaatacctgggctccacccagctgctgtctgagcgcaacccgccgcccagcacacgcatggggcaggcgcaggaggccatggatcgggtcaaggcccctgaaggtgagagccagcccatgaccgaggtagacatctttatctccactaagcgcgtgaaagtgctggctgctgactcccaggatgccctgatggaccatgccctgcagaccatctcctacatcgcggacattgggcctgtgctggtcttgatggcgcgcaggcggctggccaagaggacaacttctcaggaccgccagcggcagctctacaagatgctatgccatgtcttccattcagaggatgcccagctcattgcgcaagccatcggtcaggccttcagtatcgcctacagccagttcctgcaggagaacggaatcgaccccagccaggtgggcatgcagccttcagcctctgccagtcacccacacaatggcgacctggaccacttctgcaacagccagaactgcagggaggtttgcatccagaagcggcctggggagggcctgggtgtcgcgctggttgagtcaggctggggctcgctgctgcccaccgcggtcattgccaacctcctccacgggggccctgccgagcgctgcggggccctgagcataggggaccgtgtcactgccatcaacggaaccagcctggtggggctgtcgctggccgcctgccaggccgctgtgcgcgaggtacggcgacactcatccgtgacgctgagtatcatccattgcccaccagtcaccacggccgtcatccaccggccccacgtgcgcgagcagctgggcttctgtgtggagaacggcattatttgcagcctgctgcgtgggagtgcggctgagcgtggtggagtccgcgttggacaccgcatcattgaggtcaatgggcagagtgtggtggccatgccccacgcgcgcattatccagctgctcacagagacaagagaaatccacatcaagaccatgccagctgccacctaccgactgctcacgggacaggaacagccagtatacctgtgatcgccccgcccacatgtgccttcgccccgcccacgtgtgccttcgccccgccaccgtcacccctcggccggcggggaccaaagaatcctcagtcttgtgctattttctaatgtaaaaaatacttttaaagatttattaaatggtc

SEQ ID NO: 3202 - DNA, 2089 bp, Rattus norvegicus
  Genbank Accession No. NM_031785
ctatgatggcggcaacagtggtatctcggatacgaaccgggacacggtgggctccagtcctgtggctgcttctgtcgttggtggcagtggcggcagcagtggctgcggagcagcaggtgccactggtactgtggtcgagtgaccgggacctctgggctcctgtggccgacacacatgagggtcatattaccagcgatatgcagctttctacctacttagaccctgccctggagctgggcccccgcaatgtattgctgttcctgcaggacaagctgagcattgaggatttcacagcatacggtggtgtgtttggaaataaacaggacagtgccttttctaacctggagaatgccctggacttggccccctcctcactggtacttcctgctgtggactggtatgcaatcagcactctgaccacctacctacaggagaagcttggagctagtcccttgcatgtggatctagctaccctaaaggagctgaagctcaatgccagccttcctgccctgctgctcatccgtctgccctacacagccagctccggtctgatggcgcccagggaggtccttacaggtaatgatgaggtcatcggacaggtactgagcacacttgagtctgaagatgttccttacaccgcggctcttactgcagtccgcccttctagagtggcccgtgatgtagccatggtggctgggggtctaggtcgccagctgcttcagactcaggtggcatcacctgcgatccatcctcctgtgagttacaatgacactgccccaaggatcctgttttgggcacaaaacttctctgtggcatacaaagacgaatggaaagacttgacctccctcacctttggtgtggagaatcttaacttgaccggctccttctggaatgactcctttgccatgctttcactgacctatgaaccactctttggtgcaacagtgacattcaagttcattctggctagtcgcttctacccagtatctgcccgatattggtttaccatggaacgacttgaaatccacagcaatggctcggttgcccatttcaatgtttcccaagtcacaggacctagtatctattctttccactgtgagtacgtcagcagtctgagcaagaaaggcagtctccttgtgaccaacgtgccctccctctggcagatgactcttcataacttccagatccaagccttcaatgtgactggtgaacagttctcctatgctagcgactgtgctggcttcttctctccgggcatctggatggggctgctcaccaccctcttcatgcttttcatattcacctatggtctgcacatgatactcagcctaaagaccatggatcgctttgatgaccgcaagggccccaccatcactttgacccagattgtgtgacatataccagagagggattgagggagtattggtgtctaggtttccattttgtgacacagtggatggaaaggtttgtcctcttcctactatagcatgaaccctacatacaccaccctcagcctgtcttgcttcctctttcctggacagggacttccctgaggctatcccccacttctaccaacaaagtgtattattcttcatagataaatcttccaggcttcatcaagaggggaagggaccttaattctagggtgcccccctttccctttctccttatttattcttgcccctctgctattatttcgtgctgtttatagtgcttttgtgtagtaaatactcactccccaagctttatggagctttccagcaatagccatgaacttgaggtcccttgaatttgagaggtgtggaaaggctagttaactgtccagcttagcctttatgggttttttttttttggcgggtgggggttaagaatgagcggtacactggggtttatttctgtgacctgagaaggaagaaatcaccacgagaactggagaaacaaagtgtactcattgggtttctggtttgttctcacaaggattgcctgtcaagaagccagaagtatgtgtgtgtgtgtgtggggggggtgtgctctgttgtttcattcctaataaaataaagacgtgttgccatgaaaaaaaaaaaaaaaa

SEQ ID NO: 3203 - DNA, 2307 bp, Rattus norvegicus
  Genbank Accession No. NM_031789
gccgccgcctcacctctgctgccagtagcctcgccgtcggggagccctagcgcagcgtccgccctcagcatgatggacttggaattgccaccgccaggactacagtcccagcaggacatggatttgattgacatcctttggaggcaagacatagatcttggggtaagtcgagaagtgtttgactttagtcagcgacagaaggattatgagctggaaaaacagaaaaaactcgaaaaggagagacaagagcaactccagaaggaacaggagaaggcctttttcgctcagttacaactggatgaagagaccggagaattcctcccaattcagccagcccagcacatccagacagacaccagtggatctgtcagctactcccaggttgcccacattcccaaacaagatgccttgtactttgaagactgtatgcagcttttggcagagacattcccatttgtagatgaccatgagtcgcttgccctggatattcccagccacgttgagagctcagtcttcaccacccctgatcaggctcagtcactcgatagctctctggagacggccatgactgatttaagcagcatacagcaggacatggagcaagtttggcaggagctattttccattcccgagttacagtgtcttaatacggaaaacaagcagcaggctgagactaccactgtccccagcccagaggccacactgacagagatggacagcaattaccatttttactcatcgatcccctcactggaaaaagaagtggacagctgtagtccacatttccttcatggttttgaggattcttttagcagcatcctctccacggatgatgccagccagctgaactccttagactcaaatcccaccttgaacacagatttcggtgatgaattttactctgctttcctagcagagcccagtggcggtggcagcatgccttcctctgctgccattagtcagtcgctctctgaacttctgggcgggcccattgagggctgtgatctgtccctgtgtaaagctttcaaccagaagcacactgaaggcacggtggagttcaatgactctgactccggcatttcactgaacacaagtcccagccgagcatccccagagcactctgtggagtcttccatttacggagacccaccgcctgggttcagtgactcggaaatggaagagctagacagtgcccctggaagtgtcaaacagaatggacctaaagcacagccaacacattcttctggggatacagtacagcctctgtcgccagctcaagggcacagtgctgctgtgcacgaatcccagtgtgaaaatacaacaaaaaaagaagtacctgtgagtcctggtcatcaaaaagtcccattcacaaaagacaaacattcaagccgattagaggctcatctcacaagagatgagcttagggcaaaagctctccatattccattccctgttgaaaaaatcattaatctccctgttgatgacttcaatgaaatgatgtccaaggagcaattcaacgaagctcagcttgcattaattcgagatatacgcaggagagggaagaataaagttgccgctcagaactgtaggaaaaggaagctggaaaacattgtagagctggagcaagacttgggccacttaaaagacgagagagaaaaactactcagagaaaagggagaaaacgacagaaacctccatcttctgaaaagaaaactcagcactttgtatctggaagtcttcagcatgttacgtgatgaggatgggaaaccttactctcccagtgagtactctctgcagcagaccagagatggcaacgtgttccttgttcccaagagcaagaagccagatacaaagaaaaactaggttcgggaggatggagccttttctgagctagtgtttgttttgtacggctaaaacttcctactgtgatgtgaaatgcagaaacactttataagtaactatgcagaattatagccaaagctagtgtagaaataatatgaaactttacaaagcattaaagtctcaatgttgaatcagtttcattttaactctcaagttaatttcttgggcaccatttgggctagtttctgtgtaagtgtaaatactacagaacttatttatactgttctcatttgttacagtcatagacttatatgacatctggctaaaagcaaactattgaaaactaaccaaaccactatacttttttatatactgtatgaacaagaaatgacatttttatattaaattgtttagctctgataaaaattaaaaggagctagcactaataaaggaatatcatgactt

SEQ ID NO: 3204 - DNA, 948 bp, Rattus norvegicus
  Genbank Accession No. NM_031832
aacagctagcggagcggcaggaggagcactaaccaggaaaatggcagacggcttctcacttaatgatgccttagctggctctggaaacccaaaccctcgaggatggcctggtgcatgggggaaccagcctggggcaggaggctacccaggggcctcctatcctggggcctacccaggacaggctcctccagggggttatcctggacaggctcctcctagtgcctatccgggcccaactggccctagtgcttatcctggcccaactgcccctggagcttatcctggcccaactgcccccggagccttcccagggcaacctgggggacctggagcctaccccagtgctcctggggcctaccccagtgctcctggggcctatcctgctactggcccctttggtgccccgactggaccactgacagtgccctacgatatgcccttgcctggaggagtcatgcctcgcatgctgatcacaatcataggcacagtgaagcccaacgcaaacagtatcactctgaatttcaagaaagggaacgacatcgccttccactttaacccccgcttcaatgagaacaacagaagagtcatcgtgtgcaacacgaagcaggacaataactggggaagggaagaaagacagtcagctttcccctttgagagcggcaaaccattcaaaatacaggtcctggttgaagccgaccacttcaaggttgcggtcaatgatgttcatctgttgcagtataaccatcggatgaagaacctcagggaaatcagccaactggggatcattggtgacataaccctcaccagcgcttcccacgccatgatctaagccagaaggggtgggccggcaccagaactgccctgtgtgttatgagcgggaaactttgcatttctctctccttatacttcttgtaagacatccatttaataaagtctcgtgctgagaga

SEQ ID NO: 3205 - DNA, 631 bp, Rattus norvegicus
  Genbank Accession No. NM_031833
cggttctcgtctctgctctcttcgctctccgctggcaccagccgacccaccagctttcggacatggccaacctcgagcgtaccttcattgccatcaagccagatggcgtgcagcgcggcctggtgggcgagatcatcaagcgattcgagcagaaggggttccgcctggtggccatgaagttccttcgggcttctgaggaacacctgaagcagcactatatagacctgaaagaccgtcctttcttcccggggctggtgaagtacatgaactcagggcctgtggtggccatggtctgggaggggctcaatgtggtgaaaacaggccgatggatgctgggggagaccaatccagctgattcgaagccaggcaccattcgtggggatttctgcattcaagttggcaggaacatcattcacggcagtgattcagtggagagtgccgagaaagagatcggtctatggtttaagcccgaagaactgattgactataagtcttgtgcccatgactgggtgtatgagtagacgcggagaaaccagagtccttttcagcactactgatggggttcctggacacagctcttcatcccactgactggatggaccatcttttctaaaacaataaagactttgcg

SEQ ID NO: 3206 - DNA, 1271 bp, Rattus norvegicus
  Genbank Accession No. NM_031840
ttatatttgggttctgcctactgagccgggagtctgggaactacaactcccagagtgctgagcggatgcacgctctgcttttaggtgtaagccgcaaacatcttggaccccgggagaatccgcgttgaagcacagagcatttagctcctctgtcagaatgaatggggaccagaaactggatgttcataaccaagaaaagcagaatttcatccagcacttctcccagattgtcaaggtgctgactgaggatgaactgggacacccagagaagggagatgctattacccggatcaaagaggtcctggagtacaacactgtaggaggcaagtacaatcggggtctgacggtggtacagaccttccaggaactggtggaaccaaggaaacaggatgctgagagcctacagcgggccctgacggtgggctggtgtgtagaactgctccaggctttcttcctcgtgttagatgacatcatggactcttcccacactcgccgggggcagatctgctggtatcagaagccgggcataggcttggatgccatcaacgatgctctgcttctggaagccgctatctaccgcctgcttaagttctactgcagggagcagccctactacctcaacctgctggagctctttctacagagttcctatcagactgagatcgggcagactctcgacctcatcacagcaccccagggccaagtggatcttggtagatacactgaaaagaggtacaaatctatcgtcaagtacaagacagctttctactctttctacctgcctatcgcggctgccatgtacatggctggaattgatggggagaaggaacacgctaatgccctgaagatcctgctggagatgggcgagttcttccagatccaggacgactaccttgatctctttggagaccccagtgtgaccggaaaggtcggcactgacatccaggacaacaaatgcagctggctggtggttcagtgtctgctacgagccactcctcagcagcgccagatcttagaggagaattatgggcagaaggacccagaaaaagtggcgcgggtgaaagcactgtacgaggagctggatctgcggagtgtgttcttcaagtacgaggaagacagttacaaccgcctcaagagtctcatagagcagtgctccgcgcccctgcccccatccatcttcctggaactagcaaacaagatctacaagcggagaaagtaacctcgaattgtagaggctgcgagggaggggtctcaataaattattgttcaac

SEQ ID NO: 3207 - DNA, 1124 bp, Rattus norvegicus
  Genbank Accession No. NM_031974
tctccgctcgtcctccggtagcagccgccagcacagtgtccgctgctgggcggggtgtcggcggatcggtcggttggtttcggcttcggtgtcgctgcgtttgagttgggccgtcatggctgagttggatccatttggcgctcccgccggtgcgcccggtggccccgcgctcgggaacggggtggcgggcgccggcgaggaagacccggccgcggccttcttggcgcagcaggagagtgagattgcgggcatagagaacgacgaggccttcgccatcctagacggcggcgcccccgggccgcaggcacacggcgagccgccggggggtcctgatgcggttgatggagtgatgaatggcgaatactaccaggagagcaatggtccaacagacagttacgcagccatttcagaagtggatcggttgcagtcagagcctgaaagtatccgtaagtggagagaagagcagacagagcgcctggaagccctcgatgccaattctcggaagcaggaagcagagtggaaagaaaaggcagtgaaggagctggaagagtggtacgcaaggcaggatgagcagctacagaagacaaaagccagcaacagggtggcagatgaagctttctacaaacaacccttcgctgacgtgattggttatgtcacaaacataaaccatccttgctacagcctagaacaggcagcagaagaagcctttgtaaacgacattgacgagtcatccccaggcactgagtgggagcgggtggcccgcctgtgtgactttaaccccaagtccagcaaacaggccaaagatgtctctcgcatgcgctcagtcctcatctccctgaagcaggcgcccctggtgcattgaagagccaccctgtggaaacactacgtctccgatcttaatcctactcagtgaagctgttcacgcaattggattaattatgccgagttcttttggaccaaaccttttgtctttagagttgatcattgtttgtgattgcatgtttccttcaactgtgttctccctggcattcagagaagagagaggaagaggaagggaggggagctcccaacagtagcctcaacctgtgcttttgtgcattattctgagaataaatttctgtttc

SEQ ID NO: 3208 - DNA, 1451 bp, Rattus norvegicus
  Genbank Accession No. NM_031981
gccaggcgccctgccgctggacactgtagaacggcgggcggaacgcagacctgggttcgggctgttgcagtgtccgccggagcggtttggggagtgcacggggtgaagatggcggaggagcggcaggacgcgttgagggagttcgtggcggtgacgggcgctgaggaggaccgggcccgtttcttcttggagtcagctggctgggacctgcagattgcacttgcaagcttttatgaggatggaggggatgaagacattgtgaccatttcacaggcaaccccaagttcagtgtccagaggcacagctcctagtgataatagagtaacatccttcagagacctcattcatgaccaagatgaagaggaagaggaagaagagggacagaggttttatgctgggggctcagagagaagtggacagcagattgttggtcctccccggaagaaaagtcccaacgagctggtggatgatctgtttaagggtgccaaagagcatggggctgtagctgtggaacgagtgaccaagagccctggagagaccagtaaaccgagaccatttgcaggagggggctaccgccttggagcagcaccagaagaggagtctgcctatgtggcaggagaaaggaggcggcattcaggccaggatgttcatgtagtgctaaagctctggaaaactggattcagcctagacaatggtgaccttagaagctaccaagacccatccaatgcccagtttctggagtctatccgtagaggggaggttcctgcagagcttcggaggttagctcacggtgggcaggtgaacttggatatggaggatcatcgggacgaggacttcgtgaagcccaagggagctttcaaagccttcactggcgagggccagaaactaggcagcacggccccgcaggttttaaacaccagctctccagcccagcaagcagaaaatgaagccaaagctagctcgtccatcttaatcaatgaggcagaacctaccacgaacatccaaatccgactggcagatggcgggagactggtgcagaaattcaaccacagccacaggatcagcgacatccggctcttcatcgtggatgcacggccggctatggctgccaccagttttgtccttatgactaccttccctaacaaagagctggctgatgagaaccaaaccctgaaggaagccaatcttctcaacgctgtcatcgtgcagcggttaacataaccgcccagctgctgcctcacctccctatgtgtcccccatgactgtggccatgcccgtggggattacctcctgccccctgtacacctagctcttccagtgccacgtctcgtccgtagctctggattcttagacttcagttggacatttgttttctctttagttgtatttcctgggtttttgtgatgatcaatggactttaaagaaaaaaaataaaaaacacaaaaaattgg

SEQ ID NO: 3209 - DNA, 1266 bp, Rattus norvegicus
  Genbank Accession No. NM_033235
ctttgctggtgcagagatcggccttgcagtttgcaataatgtctgagccaatcagagtcctcgtgacaggagcagccggtcagattgcatattcgctgctgtacagcattggaaatggatctgtctttgggaaagaccagcccatcattcttgtgctgttggacatcacccccatgatgggtgttctggacggtgtcctgatggagctgcaagactgtgcccttccccttctgcaggatgtcattgcaacagacaaagaagaggttgccttcaaagacctggacgtggctgtccttgtgggctccatgccaagaagggagggcatggagaggaaggacctactgaaagccaacgtgaagatcttcaaatcccagggcgcagccttggagaagtacgccaagaaatcagttaaggtcattgttgtggggaacccagccaatacaaactgcctgacggcctccaagtcagcaccatcgatccccaaggagaacttcagttgcctgactcgattggaccacaaccgagcaaaatctcaaattgctcttaaactcggtgtaaccgctgatgatgtaaaaaatgtcattatctggggaaatcattcatcaacccagtatccagatgtcaatcatgccaaggtgaaattgcaaggaaaagaagttggtgtgtatgaagccctcaaagacgacagctggctcaagggagagttcatcacgactgtgcagcagcgtggtgctgctgtcatcaaggctcggaagctgtccagtgccatgtctgctgcgaaggccatctcggaccacatcagagacatctggtttggaaccccggagggcgagttcgtgtcgatgggcgtaatctctgatggcaactcctatggtgtccctgatgacctgctctactcgttccctgtcgtgatcaagaataagacctggaagtttgttgaaggcctccccattaacgacttctcccgtgagaagatggacctgacagcaaaggagctgaccgaggaaaaggaaacggcttttgagtttctctcctccgcatgactacacagtcgtgttgacgtcagcagacatcccaaggctgaggaatcaaaatgtcgtctttgagcctagtaccaaacagtaataatggtacattcagattgtgaacagcaaaatattttaaatattatgtgctttgtgattcgtgaaagtctatcacgttgttagtgctgcgatctaaataaaagtatattcaagtgaaaaaaaaaaaaaaaaaaaaaaaaaa

SEQ ID NO: 3210 - DNA, 1458 bp, Rattus norvegicus
  Genbank Accession No. NM_052809
gagggtttaggctggtctccggtgacctcctagtcctaaatcttgatacccttgcaagagctttgagcgtgtggggtcccgggcgttcggggtcccgggtgtgtgcggtttgtatagcctgaagccggggtcctccgcgctcgcgtcctccgcagctggactgaagagacgcgtcccagccctgcggggatggaacggaccgagctgctgaagccccggaccctggccgacctcatccgaatcttgcatgagctcttcgccggggacgaagtcaatgtggaggaggtgcaggctgtgctggaagcctacgagagcaatcctgccgagtgggctttgtatgccaaattcgatcaatacaggtatacccgaaaccttgtggatcaaggaaatgggaagtttaatctgatgattctgtgctggggtgaagggcatggcagcagtattcacgatcacacggactcccactgctttttgaagctgctgcaaggaaatctaaaggagacattgtttgactggcctgacaagaaatccaacgagatgatcaagaagtctgaaagaactttgagggaaaatcagtgtgcctacattaatgattctattggcttacatcgagtagagaacgtcagccacacagagcctgctgtgagccttcacttgtacagtccacctttcgatacatgccatgcctttgaccaacgaacagggcataaaaacaaagtcaccatgacattccacagcaaatttggaatcagaactccatttacaacttcaggttcactggagaacaactaagacctgccaagcctttcaaagttttgcttctgggtcgttggaatgttttaccttggataagagaggccacccatcatttgctgtccagttatacattttaataagtccatgctcagtgtgtatactaaggaagcaaaccatcccctgagctatgcaggagaaaaatcccactaaagaaaaagtcacttgatttttaatagccaaatcaccttgctcccagttcttctgtcttctaactccatggaaattctattgggagttctcagtggggttttttttcaaccttaggaaagcacttctggtctctgaactctaataatcaataagtaaaaatgaagaaaccacaagctatcacatgtctgttttcatacctggaagtctaagtgtggaaatctttaatttactttgtatgttcttaatgtttgacaagaatttttttaaatcttggttttcagttttttcaaccctgtttgacaaattcctatgctgtggagactagggatgcagatagcagtttggtgtttggtagtgaacagcagtggggccagaaatgtgcatgtatccagacctcctgcaaataaaaactgaaactcatgtgtaatgtgtgccaccaccttaagctgccaccaaaattgccaaacgactttaataaaactggatttgaga

SEQ ID NO: 3211 - DNA, 1484 bp, Rattus norvegicus
  Genbank Accession No. NM_053318
tgtgtggtctttgcagctcgccatggctaggacagtagtagcactaaatatcctggtattgctgggcctgtgctggtccctggctgttgccaaccctcttcctgctgcccatgagactgttgctaaaggtgaaaatgggaccaagccagactcagatgtaatcgaacactgctcagatgcctggagctttgacgctaccaccatggatcacaatgggaccatgctgttctttaaaggggagtttgtgtggaggggtcactcagggatccgggagttaatctcagagaggtggaagaatcccgtcacctcagtggatgctgcattccgtggtcctgacagtgtcttcctgatcaaggaagacaaagtctgggtgtatcctcctgaaaagaaagagaacgggtatccaaagttgttccaagaagagtctcctggaatcccatacccaccagacgcagctgtggaatgccaccgtggagaatgccagagtgaaggtgtcctcttcttccaaggtaaccgcaagtggttctgggactttgccacaagaacccaaaaggaacgttcctggcctgctgttgggaattgcactgcggccttgaggtggcttgaacgctactactgcttccagggtaacaagttcctgagatttaaccccgtcacaggagaggtgcctcccagataccctctggatgcccgtgactacttcatatcctgccctggcagaggccatggtaaactaagaaatggaactgctcatgggaatagcacccatcctatgcattcgcgttgtaacgcagatcctggcctgtctgcactgctgtctgaccatcgaggtgccacctatgccttcagtggctcccactactggcgtctggactccagccgtgatgggtggcatagctggcccattgctcatcactggccccagggtccttcagcagtagatgctgccttttcctgggatgagaaagtctatctgatccagggcactcaagtatatgtcttcctgacgaaggggggcaataacctagtaagtggttatccaaagcggctggagaaggaacttgggagccctcccgggatcagccttgataccatagatgcagccttttcctgccctggttcttccaagctctacgtcacatcaggacggcggctttggtggctggacctgaagtcaggagcccaggcgacatgggcagagctttcctggccccatgagaaagttgatggtgccctgtgtttggaaaagtcccttggtccctactcatgctcttccaatggtcccaacttgttctttatccatgggcccaatttatactgctatagcagtatagacaaactgaatgcagccaagagtctgcctcagccccagaaagtgaacagcatccttggctgcagtcaataaaaagccctgatgggaattagcccagcccaccccacctctccatttccattctaataaaaccagatggtttcttcacatg

SEQ ID NO: 3212 - DNA, 1314 bp, Rattus norvegicus
  Genbank Accession No. NM_053467
atgtctggtttgtctggcccactatcctggcctggccctctcctatccgccttgctctttctgttccttctcggccccagctcggtcctcggcatctccttccatctacccgtgaactctcgcaagtgtctccgcgaggagatccacaaagacttgctggttacgggcgcgtacgagatcaccgaccagtctgggggcgctggcggcctgcgcacccacctcaagatcacagattctgctggccatattctgtatgccaaagaggatgcaactaaagggaagtttgcctttaccacagaagactatgacatgtttgaagtatgctttgagagcaagggaacagggcggatacctgaccaactagtgattctagacatgaagcatggagtagaggcgaaaaattatgaagagatcgcaaaagttgagaaactcaaaccactggaggtggagctacggcgcctcgaggacctttcagagtctattgttaacgactttgcctacatgaagaagcgggaagaggagatgagggacaccaacgagtccacaaacacccgcgtcctgtacttcagcatcttttccatgttctgcctcattggactagccacctggcaggtcttctacctgcgtcgcttcttcaaggccaagaagttgatagagtaatgaggctcagtcttctgtcccctggagccagcagaacatcgctgggacgtgcctggcctagcccaaggccaagttactaacagtatatcaaggcgcacgtgagcatcttgccagaactgatccttctggtgtgggagagcatgggcaccacccacacccagcaagtcagagaggactttttaatgcagtaggatttggactggtttgcaacaagattattaaagtcgcctatggaaaaacaaaacaaaacaaaacaacaaacaggggttacctagataacgccaaagccagcattcgtcctgggtcgcctcacaggatcggtttgagctgtttgctttttctctcccacttgctcaccgccttggtcctccactctagttctcctccaagatttctctgacctcggtcagctccttcatatcagttgtctctttggtttccttgtgaaacaccttgaacttctcttggtccttagatgaaatgtttacagagcttctggtgatatccttcataattttatgtcttctaaaagggtcatgggtgggacacaaaacaaagtgagctttgaactgtagataatctcttaaaagaaaatctcattttagaccattaaaatgtttgtgctcaaaaaaaaaaaaaaaaaaaaaaaaaaaa

SEQ ID NO: 3213 - DNA, 1095 bp, Rattus norvegicus
  Genbank Accession No. NM_053475
aaattgcaagcgtattcttttaatgactccagtaaaattaagcatcaagtaaacaaaagtggaaaagaacctacacttttaacttgtctcactagtgcctaaatgtagtttaaaggctgcttaaattttgtgtgtagttggattttttggaagctgaaggtatccatctgcagacattgaggcccaagttgaatttggattcgagtggattcttaacacttctgcctgtgctgaagagaagcttcataaggaacaagcaagttgaatagagaagatagtgatcaataagaggcatttagtggtctttttaatgttttctgctgcgaaacatttcaagatttattgatttttttttttcattttccccaccacactcacacacgcacgctcacactttttatttgccataatgaaccgtccagcccctgtggagatctcgtacgagaacatgcgttttctgataactcacaacccagccaatgcgactctcaacaagttcaccgaggaactcaagaagtacggagtgacaactttggtccgagtttgtgatgctacctatgacaaagctccagttgaaaaagaagggatccacgttctagactggccatttgatgacggagctccgccccctaatcagatagtagatgattggctaaacctgttaaagaccaaattccgggaagaaccaggctgctgtgtcgcagtgcattgtgttgcaggattgggaagggctcctgtgctagttgcacttgcactgattgaatgcggaatgaagtatgaagatgctgttcagtttataagacaaaaaagaagaggagcattcaattccaaacagctgctttacttggagaaataccgacctaagatgcgattacgctccagagataccaacgggcactgctgtgttcagtagaagcagaggaaggccggctggatcgtggcattagagggaactctgggtacctggaaatgtgaatctggattcttacctgtgtcatcaaagtagtgatggattccgtactcctcgactcctcatgattgagaagaaggcaaacgataaagaaatccctctataacacgaataaaatgtttaag

SEQ ID NO: 3214 - DNA, 1182 bp, Rattus norvegicus
  Genbank Accession No. NM_053539
ggaagcttccccaccgcaaagcagctagacgtgcgggcagtctcagctgtccactgggagtcgccaacaccatctcttgggctccagggtcgcaatcactaccggggatctccagcaagtcttccggacccacgcgtagaggaggtggtgccaccgcgcgcaaacctggcgcggtcgtgacgtcaggactacgctagattggcaattggctggaggcatgtggcgcggacgggcactggcaggagtgattggatcagctcttaaggggcggggtctggaggcggagcatgctgccgagagcgttgaagtacggcgctccgcacagcttctcgacactcctgtctggaatcgctgtgttctaggtcagatcagacattctgtcacaatgcctgaaatcaatgccagcaatcttgatgaaaaacaggttcagcttctagcagagatgtgtattcttattgatgaaaatgacaataaaattggggctgacaccaagaaaaattgtcacctgaatgaaaacattgacaaaggactaatacatcgagctttcagtgtcttcttgtttaatactgaaaacaagctcctgttacagcagagatcggatgctaaaattacctttccaggttgtttcaccaatagttgctgtagtcatccattaaataaccccggggagctggaagaaaatgatgccatgggtgtcaaacgagcagcacagaagcgcttaaaggcggagctggggatacccttggaagaggttgatctaaatgaaatgaattatctaacaagaatttactacaaggcccaatctgatggtatctggggtgaacatgaaattgattacattttgtttctgaggaagaatgtaaccctgaatccggatcccaacgagattaaaagctattgctatgtatcaaaggaagaactcaaagaaattttgaagaaggaagccaggggcgaaattaagtttactccatggtttaagattattgcagacgcttttctctttaaatggtgggataacttaaaccatttgagtccttttgttgaccatgagaaaatacatagaatgtgaatgtgtaaatgatttgagatttttttctacctactaagaatggtttgattttgttttaaattgggctcccttgtatgacacatagatattttacaaccagaatttgttttgag

SEQ ID NO: 3215 - DNA, 816 bp, Rattus norvegicus
  Genbank Accession No. NM_053556
cggcacgagcttgagtttccgatgagacacaagactgaagaggaaaactgatctcccccaaagacatagaataattggtaaatctggacgagaacacaggctcataactgcgaagagcaaggatttttatattactcttataggaaagagaccgaaagatctttacaagctatcttgctaggagatgcccaaagtcaaaagaagccggaaagcacctccagatggctgggagctgatcgagccaacgttggatgaactagatcaaaagatgagagaagctgaaactgaaccccatgaggggaagaggaaggtggagtctctgtggcccatcttcaggatccatcaccagaaaacccgctacatcttcgacctcttttacaagaggaaagccataagcagagaactctatgaatactgcattaaagaaggctatgcagacaaaaacctgattgcgaagtggaagaagcagggctatgagaatctatgctgtctacgctgcatccagactcgagacaccaacttcggcaccaactgcatttgccgggttcccaagagcaagctggaagtgggtcgcatcatcgattgcacgcactgtggctgccggggttggtctggttgactgacgcccctgactcctctgcatcttggactttggaccttgggctcctgcttattgggccactgcctcctgaagcaactcttctcagattggcactcagagaaaagacccaggggaagcatgagctctacaggtgacagctttagtgttcaccagctgagatctgtaaaaataaaacctttagacctcttaaaaaa

SEQ ID NO: 3216 - DNA, 1511 bp, Rattus norvegicus
  Genbank Accession No. NM_053563
tgggctcaaggaaggaagcgttgtagctcgcgtccaggggcgcggcgtgtacgggtggctctcttcgcagctcgcggaggcgaaccgggcaacagtgacatggcagaacaggatgtggaaaatgagcttttggattatgatgaagatgaagagccccaggtaccccaggagagcactccagctcccccgaagaaagatgtcaaaggatcttatgtctccatccacagttctggcttccgggactttctgctgaagccggagctcctgagagctatagttgactgtggctttgaacatccttcagaggtccagcatgaatgtattccccaggccattctgggtatggatgtcctgtgccaagccaagtctgggatgggcaagacagctgtgtttgtgctggccaccctgcagcagattgaacccatcaatggccaggtatcagtactggtcatgtgccacacaagggagctggccttccagatcagcacggagtatgagcgcttctcgaagtacatgcccagtgtcaaggtatctgtgttctttggaggcctctccattaagaaagatgaagatgtgttaaagaagaactgtccccatgttgtggtggggacaccaggccggatcctggccctcgtgcggagcaggagcctcaacctgaggaatgtgaagcactttgtgctagatgaatgtgacaagatgctggaacagctggacatgcgccgggatgtacaggagatctttcgtctgacaccccatgagaagcaatgtatgatgttcagcgccaccctgagcaaggagatccggccagtctgcaggaagttcatgcaggatcctatggaggtgtttgtggacgacgagaccaagctcacactgcatgggctgcagcagtattacgtcaaactcaaggacagtgagaagaatcgtaaactcttcgacctccttgacgtgctagagtttaaccaggtggtgatctttgtcaagtctgtgcagcgctgcatggccctggcccagctcctagtggaacagaattttccggctatcgctattcacagaggcatggcccaggaggagcgcctgtcccgataccagcagttcaaggacttccagcgtcgcatcctagtggctactaatctgtttggcagaggcatggacattgagagagtcaacatcgtcttcaactatgacatgccagaggactcggatacctacctgcaccgagtggctcgtgctggtcgctttggtaccaagggtctggcagtcacttttgtgtcagatgagaatgatgccaaaatccttaatgacgttcaggaccggtttgaagtgaatgtggctgagcttccagaagaaatagatatctccacatacattgagcagagccggtaaccatgtgtgtagccaggcacatggctttctctcctgctgcttcagatcctcctcctaggtggcaatcggcggcctctctttttattgttccaaagctttagctatgttaagaataaacttttattgtg

SEQ ID NO: 3217 - DNA, 1846 bp, Rattus norvegicus
  Genbank Accession No. NM_053568
tgtgtcgcgggagctgccaggacttgcggggggcctctggtgccatgatccggaacgggcacggggctggcggcgctgctgggctgaagggtccgggcggccagcgcaccgtgcgggtgtggtgcgatggctgctatgacatggtgcattacggccactccaaccagctacgccaggcgcgggccatgggggactacctcattgtgggcgtgcatactgacgaggagattgccaagcataaggggcccccggtgtttacccaggaggagcggtacaagatggtacaggccatcaagtgggtggatgaagtggtaccggctgctccctacgtcaccacactggagacactggacaagcacaactgtgacttctgcgttcatggcaatgacatcacgctgacagtagatggccgagatacctacgaggaagtgaagcaggctgggaggtacagagagtgcaaacgcacccagggtgtgtccaccacagacctcgtgggtcgcatgctgctggtgaccaaggcccaccatagcagccaggagatgtcctctgagtaccgggaatatgctgacagttttggcaagccccctcacccgacacctgccggggacacactttcctcagaagtctcctcccagtgccctggggggcagagcccctggacaggggtgtcccagttcctacagacatcccagaagatcatccagtttgcttctgggaaggagccccagcccggggagacagtcatctatgtggctggtgcctttgacctgttccacatcgggcacgtggacttcctacaggaggtgcacaagctagccaagaggccctacgtcatcgcgggcctacactttgaccaggaagtaaaccggtacaagggcaagaactaccccatcatgaacctgcatgagcggactctcagtgtgctggcctgccggtatgtttcagaagtggtgattggggcaccgtactccgtcacagcagagctcctgaatcatttcaaggtggacctggtgtgtcatgggaagacagaaattgtacccgacagggatgggtctgacccctacgaggagcccaagagaagaggcattttctgtcagattgacagtggcagtgacctcactacagacctgattgtgcaaaggatcatcaagaacaggttggagtacgaagcacggaatcagaagaaggaagccaaggaattagcctttttggaggccctgaggcagcaggaggcacagcccagaggggagactgactagcttctgacccggagacgtcattcacgccgttgccctgtgcccacctcatctctccctgccctgctctgcttctgtgtcttggtgtcagctcacacaattccaaaggaaactggccttgctgagggtgctgtccctgcctgcctgcagcaggctctcagtcctttccactgagctgctcagagagggtagctagcccagtggggcagccccgtggacaggataagcagacggcacctgtgactggaggattgttgctgtgtatccttggcatccacgggttccaactgcccactgtcccagtttggctggggatacccctcctgcctgactggaagctgcacttctgcccaccgagctttggtgaaaggtacagaggctttggggacctctgttcctgggccaccctgcacgtgggcaccctctaccttggggcacgttctagcaccccattcctgactcctagaagatgcacttgccccgggtggctgggccagcgtggctgccctccgcacagacttcctggtcctcgtttgtacctcagtggctgatgtaaacctctttggctcaactgaataaagcctagtggg

SEQ ID NO: 3218 - DNA, 952 bp, Rattus norvegicus
  Genbank Accession No. NM_053592
ggcctccagcgccatgccgctcttgtgcgcgctgctgcgcagccgactccaaccttctctgctccgctcgcttacgctcacgtccgcgcaaagcctaagctgcggcggaagcagaggagtccggacctggagcgcgcggaccggacccggagcgtgcgctgaccctgcggtctctgtctctaagagggctcgagcggaagatgacgcttctctgcgtttcgtgcggctctcggagcacgctacggctcccacccgcgggtccgcgcgcgctgcaggctacgacctgtacagtgcctatgattatacaattccatccatggagaaagcccttgtgaagacagacattcagatagctgttccttctgggtgctatggaagagtggctccacgttctggcttggctgtaaagcacttcatagatgtaggagccggtgtcatagacgaagattatagaggaaatgtcggcgtcgtgctgttcaattttggaaaagagaagttcgaggtgaaaaaaggtgaccggatcgcgcagctcatttgtgagcggattctttatccagacttagaggaggtgcaaacactggataacactgagagaggttcaggaggcttcggctccacgggaaagaattaaaactttgcttgaagtactttgctgtttgaacactgtaaacgagctttaatttcagaagcattttgtgttctaggatgtaggaaaggatacctatcacggtggaactgctctgttctctagttgatggttgcctgtaaatctgtatcgtgagaactggcagtgacatgcagacttggttattagatattttttttaaatttggtattgtatttaaattatagtcctataagaactgattttgctctaattgctatattatttgtaattttttttttttatccaataagtccgaagtctttagcgaaaaaaaaaaaaaaaaaa

SEQ ID NO: 3219 - DNA, 2454 bp, Rattus norvegicus
  Genbank Accession No. NM_053607
gacggaggcagctgaatgtggtgctgaaccaacaacatctagctacaaggggagccactcctccacccagcgactgtgactgttctcacaggtctgaatttcctgttggtattcacaaagatgctttttatttttaacttcttgttttccccacttccgaccccggccctgatctgcctcctgacatttggaacggctatcttcctgtggctgatcaacagacctcagccagtcttacctctcattgacttggacaaccagtctgtagggattgagggaggagcacggagaggcgctttccagaagaacaatgacctaatcctttattacttctcagacgccaagacgttgtatgaagttttccaaagaggacttgctgtgtctgacaatggaccttgcttgggatacagaaagccgaaccagccctacaagtggatatcctacaagcaggtgtctgatcgagcagagtacctgggctcctgtcttttgcataaaggatacaagccatcgcaggaccaatttattggcatctttgctcaaaataggccagagtgggtcatctccgagttagcctgttacacatattccatggtagctgtccccctgtatgacacactgggagcagaagccatcatctatgtcatcaacagagctgatatctccgtggtgatctgtgatacaccccaaaaagcaacaatgctgatagaaaatgtggaaaaggaccttaccccaggcctgaagacagtcatcctcatggaccctttcgatgatgacctgatgaaacgaggagagaagtgtggcattgagatgttgtctctgcatgatgctgagaatctaggcaaagagaacttcaaaaaaccaatgcctccgaacccagaggatctaagtgttatctgtttcaccagtggaactacaggtgaccccaaaggagctatgctgacccatcaaaatatcgtttcaaacatggctgctttcctcaaatttctggagcctatcttccagcccacccccgaggatgtgaccatatcctaccttcccttggcccatatgtttgagaggcttgtccagggtgtcatattttcctgtggaggcaaaattgggttcttccaaggagatatccggttgctacctgatgacatgaaggctttgaaacccacagtgtttcccacagtgcctcgactccttaacagggtctatgataaggtacaaaatgaagccaagacacctttgaaaaagttcttattgaacttggctatcatcagcaaattcaacgaagtgagaaatggcatcattcggcggaacagtttgtgggacaagctcgtgttttcaaagatccaaagcagcctgggtgggaaggttcgtctcatgatcactggagccgcccctatctccactccagtcttgacgttcttcagggctgcaatgggatgctgggtgtttgaagcttacggccaaacagaatgcacagctgggtgttccattacatcacctggggactggacagcaggtcatgttgggactccggtgtcctgcaattttgtcaagctggaagatgtggctgacatgaactacttttcagtaaacaacgaaggcgagatctgcatcaaaggcaacaatgtgttcaaaggctacctaaaggacccagagaagacacaggaagtactggacaaggatggctggcttcacactggggacatcggtcgctggcttccaaatggaactctgaaaatcattgaccggaagaagaatattttcaaattggcacaaggagaatacatcgctccagagaagattgaaaatgtttattccaggagcagaccaatattgcaagtttttgtccatggggagagcttacggtcattcctgataggagtggtggttcctgacccagagtcacttccctcatttgcagccaagatcggggtaaagggatcctttgaagaactatgccaaaaccagtgtgtaaagaaagccattttagaagatttgcagaaagttgggaaagaaggtggccttaaatcctttgagcaggtcaagagcatctttgtgcatccggagccgttctcaattgaaaacgggcttctgacaccgacactgaaagccaaacgagtggagcttgccaagttcttccagacacaaatcaagagcctctatgagagcatcgaagagtaacttaaggttgctgagctggaagcggtgggggacgaagcggaaactatgtccagcgaacttttccagtaaatgaagcaatcactaaaggactgtcctgagttgggagcaaagcaacgtggacgagctcgatgtgacgcctgcactgcaggcgtcttctgtgatggaagctctggatctttctccttggacttcagtccctgcagtattttgctgccagatagcatgtggtgcctctacctgtaaatgtcagatctttgaaataaactattacagctcgtgccg

SEQ ID NO: 3220 - DNA, 602 bp, Rattus norvegicus
  Genbank Accession No. NM_053611
gagggcagacatttggaaaacaggcaagactttggagaaagcagaccaggtatgatggccaccttgccaccaacagcccacacttcccagcaacctgtaaacatagaggacgaagatgggatcctggatgagtatgaccagtacagcctggcccaatcttatgtcgtcggtggaggtcggaaaggacgtaccaagagagaagctgctgccaacaccaaccgccccagccctggtgggcatgagaggaagctgctgaccaagttccagaactctgaaaggaaaaaggcctggcgctgagacagagctggagatgaggccagaccacggacaccacacccagcaatggatacaggaccttggagaaattaggagttgtaagcaggacctaggcctgcttgattctttcccacctaagtgaggctctggagagggaacaccaaaaaaagcccttccggacccagctaaagggcaagttaggagcgagaagcagagggtagatgggcagagctaagaaggcacccccaaaaagaacagtgggaaaaactggatgcccttgggtggcagtaacaataaactgtacaacagtgacagcaaaaaaaaaa

SEQ ID NO: 3221 - DNA, 1604 bp, Rattus norvegicus
  Genbank Accession No. NM_053743
cgagcggactctctagcccttgtgggtccctgttcagcgcccggccgtgtggagacccgggagccagtccgggcctccgaggcgaagatggtggactacagcgtttgggatcacatcgaggtgtcggacgatgaggacgagacgcaccccaacatagacacggccagcctgttccgctggcggcaccaggcccgggtggaacgcatggaacagtttcagaaggagaaagaagaactggaccggggctgccgggaatgcaagcgcaaggtagccgagttccagcgcaagctgaaggaactggaagtggctgagggtggtggccaggtggagcttgagcggcttcgagcggaggcacagcagctgcgcaaggaggagcgaactgggagcagaagctggaggacatgcggcaaaaaggagaagaacatgccctggaatgtggacacactcagcaaagatggcttcagcaagagcatggtcaataccaagcctgagaaggcagaggaagactcagaggaggcaagggagcagaaacacaagaccttcgttgaaaaatacgagaaacagatcaaacatttcggcatgctccaccgctgggatgacagccagaagtacctgtcagacaatgtccacctggtgtgcgaggagacagccaactacctggttatctggtgcattgacctggaagtcgaggagaagtgtgccctgatggagcaggtggctcaccagaccatggtcatgcagttcatcctggagttggccaagagtctgaaggtcgacccccgggcctgcttccggcagtttttcaccaagatcaagactgctgaccagcagtacatggagggcttcaagtatgaactggaggcctttaaggagcgtgtgcggggccgcgccaagctgcgaatagagaaggccatgaaggagtacgaggaggaggagcgcaagaagaggctaggccctggtggcctggaccctgtggaggtctacgaatctctgcctgaggagctgcagaagtgctttgatgtgaaggatgtacagatgctgcaagacgccatcagcaagatggatcctactgatgccaagtatcacatgcagcgttgcatcgattctggcctctgggtccccaactccaagtctggtgaggccaaggagggggaggaggcgggccccggggacccattgctggaagccgtccccaaagcgggcttcgagaaagacatcagtgcgtgacccttctccagaaaaggaaacccagccaccatgtccctagctcccgacttcttcacttctgctgctcctcacgtcctggcccatggcctgccccatgtcccctctcctccggcctgtccccagcactcatcagattctctgcttcgggttgaggggctctgctgtctgcagcccccccacccccatcagcgttatgccaaagtcctgggggtctggggaggggcagcagctgccaggttggtccaccgggttggggatacacatgtccccatctgggcagggtctgtccctatgggtctatggtcactgtttctcttctgtctagctttctgtcctgcaactggcaacaatgtccaataaacagttccaggtgctgg

SEQ ID NO: 3222 - DNA, 2632 bp, Rattus norvegicus
  Genbank Accession No. NM_053748
ctgcagcagggctcatggcagatacccagtacatcctgcccaatgacatcggtgtgtctagcctggactgccgggaggcattccgcctgctgtcacccacagagcgcctctatgcccatcacctgtctagagccgcttggtatggaggcctggctgtgctgctccagacatctcctgaagccccctacatctatgccctgcttagccgcctcttccgtgcccaggaccctgaccagctacgccaacatgccctggctgagggcctgactgaagaagagtatcaggcattcctggtctacgctgcaggggtctactccaacatgggcaactataagtccttcggtgacaccaagtttgtccctaacctgcccaaggaaaagctggagcgtgtgatccttgggagtaaggctgcccaacagcatccagaagaagtcaggagcctttggcagacctgtggggagcttatgttctccctggaaccaaggcttcgacatcttgggctggggaaggagggagtcaccacctatttctctggggattgtgccatggaagatgccaagctggcccaggacttcctggactctcagaacctcagtgcatacaacacccggctcttcaaggtggtcggccaggaagggaagtaccactatgaggtgcgactggcttcagtactcaacacagaacctgctctcgactctgagttgacttccaagctgaagagctacgagttccaggggaatcatttccaggtcacccgtggggactatgcccccatcctccagaaggtggtagaacacttggagaaagctaaggcttatgcagccaatagccaccaggagcaaatgctggcccagtatgtggagagcttcacccagggttccattgaggcccataagaggggctcccgcttctggattcaggacaaaggtcccattgtagagagttacattggcttcattgagagctaccgtgacccctttggctcccgaggagaatttgaaggcttcgtggccatggtaaacaaagacatgagtgcaaagttcgagcggctggttgcaagtgctgagcagctgctgaaggagctgccttggcctcctgcctttgagaaggacaagttcctcacccctgacttcacttccctggatgtccttacctttgccggctctggcatccctgcaggcatcaacatccccaactatgatgacctgagacagacagagggctttaagaatgtgtctctggggaatgtgctggctgtggcctatgccacaaagcgggagaaactcaccttcatggaggaagaagacaaggacctgtacatccgctggaaggggccgtcctttgatgtgcaggtggggttacatgagctgttgggccatggcagcggcaagctctttgtacaggatgagaaaggtgctttcaactttgaccaggagacagtgatcaacccagagactggggagcagatccagagctggtaccggagtggagagacatgggatagcaaatttagcaccattgcctccagctacgaagagtgccgggctgagagcgtgggcctctacctctgtctcaacccccaagtacttcagatctttggctttgagggaactgacgcagaagatgtcatctatgtgaactggctcaacatggtccgggctgggctgttggctttggagttctacaccccagagacggccaactggcgacaggcccacatgcaggcccggtttgtgatcctgagggttttgctggaagctggcgaaggactcgttaccgtcacccccaccacaggctctgatgggcgcccagatgctcgtgtccacctggaccgcagcaagatccggtcagtgggcaaacctgctttggagcggttcctccggagactgcaggtgctgaagtccacaggggatgtggttgcagggcgcgccctgtacgagggctatgcggcggtcactgacgcacccccagagtgcttcctcactctaagggacacggtattgctgcgcaaggaatcccggaagcttattgtccagcccaacactcgcctggaaggctcagaagtgcaacttgtagagtatgaggcctcagcggctggtctcatccgatccttctgtgaacggtttccggaggatgggcctgagttggaggaggttcttacccagctggccacagcagatgctcaattctggagggatcaggtccaggaggccccatctggccaggcttgagaagatctgtgtggcatctcccctttcatcaaaccagggctgtctgtggccctgaattgtgtttaggaggtgggggaagggcaggagctcggactttggtgctacctcagctgagggtggtgatgctaaccccttccatttgtcagcactttccagtttaccattatgtcctcatttcctggatctgcactgccatctgtggtgggagctcaacagggtgcctagtctggttttccaaatgggaaggtggcagttctgagaagtaactgttctagatccagcaggtggcatgtgacagagccagggctcaaagcattctcaccaaatccagtgctcttcgtgtattaccttttatagccagaaaaataaatatgacaaccaccaaaaaaaaaaaaaaaaaa

SEQ ID NO: 3223 - DNA, 1684 bp, Rattus norvegicus
  Genbank Accession No. NM_053752
gctcctactgggcctgactttgctggtgagctccctgcaagctttggtgtgctttgagtgtggcaacctcaattctatggggatttgtaactttagaacagctgtatgttacgctcatcctggtgaggtttgtgcctcagttttaacctataaagatggaaaatttgtatatggaaaccagagctgtgctgagtgctccgggaggactgttgagcatggaagtctgatagtatcaacaaactgttgctcagccacctctttctgcaatatagtacgtccctgatacttaattgtatggaaggattttagtgctctttactgagtcttgacactggagcatgccagaaagaattatctactgaccgtgtctggagaacgcactaagatttctacatcatgttttctgactacgtgtacatcatatcatatgatcttcagtgatctgtaataaattgaaggccttacaaattttgcggctgccactgcaaccatggtctccggcagcagcggccttgccgccgcccgcctgctgtcgcgcaccttcctcctgcaacagaatggaatacggcacgggtcttacacagcctctcggaaaaatatctatattgataaaaatacgaaggttatttgccagggtttcacaggcaagcagggtacctttcacagccagcaggctttggagtacggcaccaaactcgtgggaggaaccactccagggaaagggggcaagaagcacctgggcttacctgtctttaatactgtgaaggaagccaaagagaaaacaggagcgacagcttctgtcatttatgtccctcctcctttcgctgctgccgccatcaatgaagcaattgacgcagagattcccttggttgtgtgcattactgaaggtattccgcagcaggacatgttgcgggtcaagcacaagctgacacgccaggggaagacgaggctaattgggccaaactgccccggtatcatcaaccctggagaatgcaaaatcggcatcatgcctggccacattcacaagaaaggaagaataggtatcgtgtccaggtccggtactctgacttatgaagcagttcaccaaacaacccaagttggattggggcagtccttgtgtattggcattggaggtgacccttttaatgggactaattttattgattgccttgacgtcttcctgaaggatccagctacagaaggcatcgtactgattggtgaaattggtggtcacgctgaagaaaatgccgcggagtttctgaaggagcataactcaggtccaaaggccaagcctgtagtgtccttcattgctggtataactgctcctcctggcagaaggatgggccacgcaggggcgattattgctggaggaaaaggtggcgccaaagagaagatctctgctcttcagagtgcgggtgtaattgtcagcatgtcccccgcacagctgggaacctgcatgtataaggaatttgaaaagaggaagatgctttgaaggacacgacatgaattttaaggctgtggaggaaatctcacagactggagagcccgtccagactgcagcccaggcacctgaccctggtctctcagtacaggggaagtccaggcatgttttagaatgtcctaaattgagctattttcacttactgtgtaacagagacagataataaatctatcatttgatttg

SEQ ID NO: 3224 - DNA, 1908 bp, Rattus norvegicus
  Genbank Accession No. NM_053769
gcgcggtgaagccagattaggatcagcgagcacttgaggatttagggccacaaaaaaccgcacaagatcgacagactatttctggagagctgcagaacgggcacgctggggtcgctggtgctggccatggtgatggaggtgggcatcctggacgccggggggctgcgcgcgctgctgcgagagcgcgccgctcagtgcctgcttctggattgtcgctccttcttcgccttcaacgccggccacatcgtgggctcagtgaacgtgcgcttcagcaccatcgtgcggcgccgcgccaagggcgccatgggcctggagcatatcgtgccgaacaccgaactgcgcggccgcctgctggccggagcctatacgcccgtagtgctgctggacgaacgcagcgccgccctggacggccgcaagcgcgacggcaccctggccctggccgcgggcgcgctctgccgagaagcgcgctccactcaagtcttcttcctccaaggaggatatgaagcgttttcggcttcctgccctgagctgtgcagcaaacagtccacccccatggggctcagcctcccgctgagtactagtgtgcctgacagtgcagaatccggatgcagctcctgtagcacccctctctacgaccaggggggcccagtggagatcctgtccttcctgtacctgggcagtgcttaccatgcttcccggaaagatatgctcgacgccttgggtatcactgctttgatcaacgtctcggccaattgtcctaaccactttgagggtcactaccagtacaagagcatccctgtggaggacaaccacaaggcagacattagctcctggttcaacgaggcgattgactttatagactccatcaaggatgctggaggaagggtgtttgtgcactgccaggccggcatctccaggtcagccaccatctgccttgcttacctcatgaggactaaccgagtgaagctggacgaggcctttgagttcgtgaagcagaggcggagtattatctcccccaacttcagcttcatgggccagctgctgcaatttgagtcccaagtactggcccctcactgttctgcagaagctgggagcccggccatggctgtccttgaccggggcacctctactacaacggtcttcaacttccctgtctccatccctgttcaccccacgaacagtgccctgaactaccttcaaagccccatcacaacctctccgagctgctgaagggccaggggaggtgtggagtttcacgtgccaccgggacgacactcctcccatgggaggagcaatgcaataactctgggagaggctcatgtgagctggtccttatttatttaacacccccccccccaaacacctcccgagttccactgagttcccaagcagtcataacaatgacttgaccgcaagacatttgctgaactcagcccgttcgggaccaatatattgtgggtacatcgagcccctctgacaaaacagggcagaagggaaaggactctgtttgagccagtttcttcccttgcctgttttttctagaaacttcgtgcttgacatacctaccagtattaaccattcccgatgacatacacgtttgagagttttaccttatttatttttgtgtgggtgggtggtctgccctcacaaatgtcattgtctactcatagaagaacgaaatacctcactttttgtgtttgcgtactgtactatcttgtaaatagacccagagcaggctttcagcactgatggacgaagccagtgttggtttgtttgtagcttttagctatcaacagttgtagtttgtttatttatgatctgaagtaatatatttcttcttctgtgaagacattttgttactgggatgactttttttatacaacagaataaattatgacgtttctattg

SEQ ID NO: 3225 - DNA, 982 bp, Rattus norvegicus
  Genbank Accession No. NM_053835
gggagctgacagcagccacgcggggaagatggctgaggacttcggcttcttctcgtcgtcggagagcggggcccccgaggccgccgaggaggacccggcggccgccttcctggcccagcaggagagcgagattgctggcatcgagaatgactcgggtttcggggcacctgccgccagccaggtggcctctgcgcagcccggactcgcgagcgggggtggttcggaggacatggggactacagtcaatggagatgtgtttcaggaggctaacgggcctgccgatggctacgctgcgattgcccaggcggacaggttgactcaggagcctgagagcatccgcaagtggagagaggagcagaagaaaaggctgcaggagttggatgctgcctcgaaggtgaccgaacaggagtggcgggagaaggccaaaaaagacctggaggagtggaaccagcgccaaagtgaacaggttgagaagaacaagatcaacaacaggatcgctgacaaagcgttctaccagcagccagatgctgataccattggctatgtggcatcggaagaggcttttgtgaaagaatccaaggaggagaccccaggcacagagtgggagaaggtggcccagctgtgtgacttcaaccctaagagcagcaagcaatgtaaagacgtgtcccgcctgcgctcggtgctcatgtccctgaagcagacgccactgtcccgctagtgcctgtcaccacgggccttggtggggcagagcagcagctgcttcagccagggtggaacttctctggcagctgccacacacgcctgttctgttcctctgagtctctgggagctgggaagcgggacccttacccctttcacccaccctgtccttcctggtcccctgttccagcccctcatgactcctgtcagtccacttgattgtgactgtccctcctgatgtatttttcttggcttaaagggtgtgttaactctttttacactt

SEQ ID NO: 3226 - DNA, 1420 bp, Rattus norvegicus
  Genbank Accession No. NM_053845
gtgggacttcagatcctgcaactgcctctggccatggcgggacctgagtggcagtccctggagcagtgcctggaaaagcatctgccgcctgacgatttgagccaggtgaagcgaattctctacggcaagcaaactaggaatcttgatctgcccagaaaagctttagaagctgcctcagaaagaaacttcgaactgaagggatacgccttcggggcagccaaggaacagcagagatgtccccagatcgtgcgcgtggggctcgttcagaacagaatcccgctccccacttccgcccctgtggcagaacaggtctctgccctccacaaacgcatagaggaaatagctgaggtggcagcaatgtgcggagtcaacatcatctgtttccaggaagcctggaatatgcccttcgctttttgtacacgagagaaacttccttggacagaatttgctgagtcagcagaggacgggctcaccaccaggttctgtcagaagctggcaaagaagcacaacatggtggtgatatctccaatcttggagcgtgacagagatcacgggggagttctatggaacacagctgtggtgatctccaactcgggactggtcatgggaaagaccagaaagaatcacatccccagagtgggcgacttcaatgagtccacttactacatggagggaaacctcggccaccccgtgttccagacccagtttggcaggattgccgtgaacatctgctatgggcggcaccaccccctcaactggctcatgtacagcgtcaacggagctgaaatcatcttcaacccttcagccaccattggagaactcagtgagtccatgtggccgatcgaagccagaaacgcagccatcgctaatcactgcttcacctgtgccctcaaccgtgtgggtcaggaacactaccccaatgagtttacttctggagatggaaagaaagctcaccatgacctcggctacttctacggttcgagctacgtggcagctcctgacggtagccggacccccggcctctcacgcaatcaggacgggctgctggtcactgagctcaacctcaacctatgccagcagattaatgatttctggactttcaagatgacgggccgacttgagatgtatgcccgggagcttgccgaagctgtcaaacccaactacagtcccaacattgtgaaggaagacctggttctagcccctagctcgggttaggttcgggggcagtggttaagttctaaacatgtgtgcgagagagttttcaatacccaggcaggaggagggtagactgggcaagcgtgtgtgtgataactgttgataagggatatgagatttttcttctggggatttggaaatgttttggggttcaaaaggtgatccgacagcattgaaacttcaataaacataactggatcgtaaa

SEQ ID NO: 3227 - DNA, 2104 bp, Rattus norvegicus
  Genbank Accession No. NM_053883
gcacgagacggggttggatctgaggtgcagcctcagagggattaggagctgctagacttttttcttttttcctttttctcctctcagtggcacggagtccgaattaattggatttcattcactgggtaggaacaaaactgggcactttcattcagagagattcattgactctgagagtgatctggtgcagagggaccaccggcttggcttctgtcgccttccctaaccgctagcttcggcttgggaaaggccgaatcaaacccggctccgagagccggagcttctcacggcttgcttggcctatgcctgcctcgaggggcgtctgctaggcaccccgccttctcctgcagctcgacccccatgatagatacgctcagacccgtgcccttcgcgtcggaaatggcgatcagcaagacggtggcgtggctcaacgagcagctggagctgggcaacgaacagctgctgctgatggactgccgaccgcaggagctgtacgagtcgtcgcacatcgaatctgccatcaacgtggccatcccgggcatcatgctgcggcgtctgcagaagggcaacctgccggtgcgcgcgctattcacgcgctgcgaggaccgggaccgctttaccaggcgctgcggcaccgacaccgtggtgctctacgacgagaacagcagcgactggaatgagaacacaggtggagagtcggtcctcgggctgctgctcaagaaactcaaagacgagggctgccgggcgttctaccttgaaggtggcttcagtaagttccaggccgagttcgccctgcactgcgagaccaatctagacggctcgtgcagcagcagctccccgcccttgccagtgctgggactcgggggcctgaggatcagctccgactcttcctcggacattgagtctgaccttgaccgagaccccaatagtgcaacggactccgatggcagcccgctgtccaacagccagccttccttcccggtggagattttgcccttcctttacctgggctgtgccaaggactctactaacttggacgtgttggaagagtttggcatcaagtacatcttgaacgtcacccccaatctgcccaatctgtttgagaatgcaggggagttcaagtacaagcaaattcctatctctgatcactggagccaaaacctgtcccagtttttccctgaggccatttctttcatagatgaagcccgaggcaaaaactgtggtgtcctggtgcattgcttggcgggcatcagccgctccgtcacggtgacagtggcttaccttatgcagaagctcaacttgtccatgaacgatgcttatgacattgtcaaaatgaagaagtccaacatctctcccaacttcaacttcatgggccagctgcttgactttgaaaggaccctgggactcagcagcccctgtgacaatcgtgtccccgcacagcagctctacttcaccgcgccctccaaccagaatgtctaccaagtggactccctgcaatctacgtgaaaggcacccacctttcctagccgggagtgtctcattccttcagtttctcttgggcagcatcgaccaggctgctttctttgtgtgtggccccaggtgtcaaaaatgtcaccagctgtctgtattagacaaggttgccaagtgcaaaattggttattacggagggagagatttgctccattcattgttttttggaaggacagggtatgctgtctagatccaggcaataggtttgcttttgtaccccagcctacccaagcagggactggacctccatccagatagagggtaggacaaaggagccggggataggagcatgtgttccttagggccacatatggctgtttcctgttgcatctggaaccaactatattgtcttcagtgaagactgattcaactttgcgtatagtggagccaaagagattttagctctgtatttgtggtatcggttttgaaaacaaaagaactgatcctttaatttgattattgtaaatatttgatcttcacttgagagtgtttgtttggcttgtgtttggtttttaatctttgggtttaaacgagatccaaagggagaaagagcagtatgcctcgtgccgaattc

SEQ ID NO: 3228 - DNA, 667 bp, Rattus norvegicus
  Genbank Accession No. NM_053884
ggcacgaggggcatcactgctgtttggggagccttctgccgggccgacaggatggcgggcaggggtaaactaatcgcagtgattggagacgaggacacggtgactggtttcctgttgggcggcataggggagcttaacaagaaccgccaccctaatttcctggtagtggagaaggataccaccatcaatgaaatcgaagacactttcaggcagtttctaaacagggatgacatcggcatcattctcatcaaccagtacatcgcagagatggttcggcacgccctcgatgcccaccagaggtccattccagccgtcctggagatcccgtccaaggagcatccctacgacgcagccaaagactccatcctgcgcagggccaagggcatgttcactgctgaagacctgcgctagggctgctcagcccttaaccctcctctcgcttccaggcctctcccagtttgccaccctctatttaagtttcaagccttggtttccagcccctcccttcctcttcactgagtggttcctaagctgttggggttctgatgttcaggtccaggctgggtagggaaagaaaggccaaccatctctccactacctatgccattgagcagtatcattgttaacattaaaggaatattctctccgaaaaaaaaaaaaaaaaaaa

SEQ ID NO: 3229 - DNA, 1265 bp, Rattus norvegicus
  Genbank Accession No. NM_053899
cctgggcgagtgaggacctacaaagtttgtccgctccggggcgccataccagctcggttcccggccggccggctggtccgggcttagccaggagaccccgatggccgcagtgttcctggttacgctctacgaatactcgccgctcttctacatcgcggtggtcttcacctgcttcatcgccaccaccggcctggtattaggatggcttggctgggacgttccagtaattctgagaaactcagaagaaacccagttcagcacaagagctttcaagaaacaaatgagacaagtgaagaatccgttcggcttagagatcactaactcatccgcagcttccctagcaacaggtgtaaccttgacgacagactgcctggaagacagtcgtcttacgtgctactgggggtgcagtgttcaaaagctctatgaagctcttcagaagcacgtttactgcttcaggataagcactccgcaagccttggaagaggcgctgtacagtgactatctccaccgagaacagtattttattaaaaagcacagcaaagaagaaatatattgccaattaccaagcagtactggggttgaagactttggtccagtgcccagatctcgctatccgttggtagctctgttgaccctcgctgatgaggatgacagggaaatttatgacattatttccatggtgtctgtcattcatattcctgataagacttacaaacttccctgcagaatattgtatcaatatttaatcctggctcaaggtcaattttatgatcttaagcaacttttcatgtctgcaaataatagtgctactccctccagagaccagtctcccgcagacgggagtgtggagcacagcttgttggagaaggcggggctggctggggctgaagtggacccggtggaggagagcagcaaagactgtgtggtgtgccagaacgggggtgtgaactgggtgctcctgccttgccggcacgcctgcctgtgcgacagctgtgtgtgctacttcaagcagtgtcccatgtgccgccagtttgtgcaggaatcctttgcactgtgtggtcagaaagaggcagacaaggacatactagaaacttcctgaagaatcacagccggagagtgtactttctacacaagggcagaacctcgtgtccttagagtcaatcctaacagagtctgcagtcttacctgtcggagagagctctgtgtgcactttcatactttgtacagtacatggatgacgggaataaagtcttctgctcagtgcg

SEQ ID NO: 3230 - DNA, 1561 bp, Rattus norvegicus
  Genbank Accession No. NM_053911
gcgggccccaccggccgggcggttgggccgtgaagggagagtcttttcggcgctgaggacgggcgctgaggaggcggcggtggctcctggggcgtttgagcgggctcactcgagcccgcgggccgacgcggacgcaggcccagccggcggaaacgccccggactccccgcgggccttcctagccgccatggaggacggtgtctacgagcccccagacttgactccagaggagcgcatggagctggagaacatccgtcggcgaaagcaggagctgctggtggagatccagcgcctccgggaagagctaagtgaagctatgagcgaagtggagggtctggaggccaatgagggcagtaagaccttgcagcggaaccggaagatggcaatgggccggaagaaattcaacatggaccccaaaaaggggatccaattcttggtggagcatgaacttctacagaacacacctgaggaaattgcccgcttcctgtacaagggcgaggggctgaacaagacagccattggggactacctaggggaaagggaagagctgaacctgtctgtgctccatgcttttgtggatctacatgagttcaccgacctcaatctggttcaggccctccggcaattcctgtggagctttcgcctccctggagaggctcagaaaattgaccgaatgatggaggcctttgcccagagatattgcttatgtaatcccggggtcttccagtccacagacacctgctacgtgttgtccttcgctgtgatcatgctgaacaccagccttcacaatcccaatgtcagggacaagccgggcctggagcgctttgtggccatgaaccgaggcatcaatgagggtggggacctgcctgaggaccttctcaggaacctctatgacagcatccgaaacgagcccttcaaaatccctgaggatgatgggaatgatctcacccacaccttcttcaacccagaccgagagggctggctcctaaagctgggagggggccgggtgaagacttggaagcgtcgctggttcatcctcacagacaactgcctctactactttgagtacactacggacaaggagcccagagggatcatccccctagagaacctgagcattcgtgaggtggatgatcctcggaagccgaactgctttgagctttacattcccaacaataagggacagctcatcaaagcctgcaaaacggaggctgatggtcgggtagtagaggggaaccacatggtgtaccgaatctcagcacccacacaggaggagaaagacgagtggatcaagtccatccaggctgctgtaagcgtggaccccttctacgagatgttggcagcaagaaagaagcggatttctgtgaagaagaagcaagaacaaccctgaccctgtccccaactccattatttattttggagctgccccgcctgggtggcaggacccctgggccctggggctgtggatcctggttccctgtttggaaaatcaccacctctagctcctgactccttatttgtaattaacatgttggtaatcttattaattatttaacccctc

SEQ ID NO: 3231 - DNA, 1958 bp, Rattus norvegicus
  Genbank Accession No. NM_053920
tggagacccggggcaggaggcggtggcgtcttcggcggcaagagcagcatggattggggtaccgagttgtgggatcagtttgaggtgctggaacgccacacacagtgggggctggatctgttggacaaatacgtgaagttcgtgaaagaacgcgtcgaggtggagcagtcttatgcgaagcaactcaggagtctggtgaaaaagtatcttcccaagagacctgccaaagatgaccccgaaatcaagtttagccagcaacagtcatttgtccagcttctccaggaggtcaatgattttgcaggccaacgagagctggtggccgagagccttggcatccgagtgtgtctggagctggctaagtattcacaggagatgaagcaagagaggaagatgcacttccaagaaggccgtcgggcccagcagcagctggaaaatggcttcaaacagctggagaatagtaagcgaaagtttgaacgagactgtcgcgaggctgagaaagcggctcacaccgcagagcggctggaccaggacattaatgccaccaaggcggatgtggagaaggccaagcagcaagcccaccttcggaaccacatggcagaagagagcaagaacgaatacgcggcccagctgcagcgcttcaaccgggaccaggctcacttctacttctcacagatgccgcagatattcgacaagctgcaggacatggatgaacgccgggccacccgccttggggccgggtatgggctcttatctgaagctgaactgcaggtggttcccattattggcaaatgcttggagggcatgaaggtggccgcagagtccgtggatgctaagaacgactcgaaggtcctcatcgaattacacaagtcagggtttgcccgcccgggtgacttggaatttgaagacttcagccaagttatgaaccgagtgccgtcggacagcagcctgggcaccccagatggcaggcctgagctccgagcagcttccagccgtagtcgtgccaagcgttggccttttgggaaaaagaacaagaccgtggtcaccgaagatttcagtcacctgcccccggagcagcagagaaagcgactccagcaacagttggaagagcggaaccgagagttgcagaaggaggaggaccagagggaggccctgaagaagatgaaagatgtatatgagaaaacaccacaaatgggggaccccgccagcttagagccccgcattgcagagaccctgggcaacattgaaaggctgaacgtggaagtgcagaagtatgaggcttggttggcagaagctgaaacgcgggtcctcagtaaccgaggggacagcctaagccgtcacactaggcctcctgatcccccaactactgccccacctgatagtagcagtagcagcaacaacagtggatcccaggataatatggagagctcagaagagcccccttcagaagaaggccaggacacccccatctacactgagttcgatgaggactttgaagaacctgcatcccccatcggccagtgtgtggctatctaccattttgaaggatccagtgaggggaccgtctccatgtccgagggggaagacctcagtctgatggaggaagacaagggtgatggatggacacgggtgaggaggaaacagggaggcgagggctatgtgcccacctcttacctccgagtcacactcaactgaaccccactggagggacgatgggcaggactgtcagctgctgcttctgggccacaggggactttgcactttattcctgccctcgtggcttttggctgaaacctgtgtaacctgctgtccctcatccgcctcacctggcaccccacggaccacttgtcttcccgtgtggctgtacatagttgtcatttcagacctttctccctgccgctccggtgtgggccaagttttgttttatattaaaaagtatatataattacaaaaaaaaaaaa

SEQ ID NO: 3232 - DNA, 864 bp, Rattus norvegicus
  Genbank Accession No. NM_053948
tgacttctgctagtgcttccggcgaggtcccttcctggggagttctggcctctgcggtccaagcttctgcagaagatgttttatcatatttccctggagcacgagatcctactgcacccacgctactttggtcccaacttgctcaacacggtgaagcagaagctgttcaccgaggtggaggggacctgcactgggaaatatggctttgtgattgctgtcactaccatcgacaatattggtgctggtgtgatccagccgggccgaggttttgttctttatccagtgaaatacaaagctattgttttccggccctttaaaggggaagtggtggatgctgtggtcactcaggtcaacaaggttggacttttcacagaaattgggcccatgtcctgcttcatctctcgacactccatcccttcagagatggagtttgatccaaattcgaaccccccttgttacaagaccatggatgaggacattgtaattcagcaggacgatgagatacgcttgaagattgtagggacacgtgtagacaagaatgacatttttgctattggctctctgatggatgactacttgggacttgtgagctgagtgagggagcctccagcttgctttgatcctgatttagaaagtgtgactttccaacttgaactcagcaccaacttgactgtcgtaccagaggttcaatctggccactgttatgggggcagggaagaaggctccttgtccccagaacactttgtttcttccagctgagctgtgctcttattctcttctgtgttctaaccataaacatgttgtccttagttctcaaggaaatgtgtcttctcttggtaggaataaaagttgtttatttatttt

SEQ ID NO: 3233 - DNA, 963 bp, Rattus norvegicus
  Genbank Accession No. NM_053971
ctctttcccgtcttgcaagatggcgggtgaaaaggcggagaagcctgataaaaaggagcagaaacctgcagccaagaaggctggcggtgatgctactgcgccccgcgccggggcctggtgcgtcaaaaagagtagttctaaggctaaaaagctgaggaagagtaagccccattgcagccggaaccctgtcctggtgagaggaatcggcaggtattcccgatctgctatgtattccagaaaggccttgtacaaaaggaaatactctgctgccaagacaaaggttgagaagaagaagaagaaagaaaaggtccttgctaccgtcacaaaaacagttggtggggacaagaacggtggcacccgggtggtgaagcttcgaaaaatgcctaggtattaccctactgaagacgtgcctcggaagctgctgagccacggcaagaagcccttcagccagcacgtgaggcggctgcgctccagcatcactcccgggactgtcctgatcatcctcactgggcgccacaggggcaagagagtggttttcctcaagcagctgggcagtggcttgctacttgtgactggacctcttgccctcaacagagttcctctgcgtaggacacaccagaagtttgtcatcgccacctctacgaaagttgatatcagcaaggttaaaattcccaaacacctgactgatgcttacttcaagaagaagccacttcgcaagcccaggcatcaggagggtgagatcttcgacacagagaaggagaaatacgaaattacagagcagcgaaaggctgatcagaaagctgtggactcgcagattttgccaaagatcaaagctgtcccccagctccagggctacctgcggtctcagttctccctgacgaacggcatgtaccctcacaaactggtgttctaattgttaacaacctaattaaactgcttcataaggaaaaaaaaaaaaaaaaa

SEQ ID NO: 3234 - DNA, 1742 bp, Rattus norvegicus
  Genbank Accession No. NM_057097
gagccgcgcactcgagggagcttctgccgccgccgccgccgccgccgccgccgccgccgccgccgccgccgccgccgccgccgccgccgccgccgccgccgaaatgtctacaggggtgccttcagggtccagtgctgccactggcagtaatcgaagactccagcagacacagaatcaagtagatgaggtggtggacatcatgagagtcaatgtggataaggtgttagaaagagaccagaagctctcagagctagacgaccgcgcagatgcactgcaggcaggcgcctcgcagtttgaaacaagtgctgccaagttgaagagaaagtattggtggaagaactgcaagatgtgggcgatagggatcagtgtcctggtgattattgtcattatcatcattgtgtggtgtgtctcttaatgaagaacagaggaaatgaagcctgacggcaggatcttcttcgagactttctacttagaactgcgtgttgtcgcacttcccatgattatttgtgttagtttacatacagttcagtgcctagatgttttttttttttttcccaaaaatgtgcctttgtttttcatatacactcgaggtgtgacctgccctgcccacattttgcacagtgcctttacagatttatggactgggaaagaggacttgtgtgtttcagagtgctgagatctaggtggatgttgtcactgatggcttgtggattcaaggaagaggattttgttcaagtcagctgtccccacacctaacatggacttcaaaaccacagtttaaacctttgggtaattagattcccaacttggaccttccaagaagaacactactgcctaacaaaaatcagtgacaacagcagggcgtgccttattttgataactaggtaacttttcattaagagtacttttgtaagcactaccgaccccgctgtatttaagatgctggtgaagagctcatgctcttatgttagatacggagatgttcactttctagttcttgttgtgtatcacttctaaaacagtattttaatcagaaataaccctttaggaagtttttatagaactgtgaccaaagtttctattttgccaaaagttaaatacaaatgaattgtccataagtttgtcccccagtagtaaattcaaataagtgccaagtgtaactcaaggtgccctttaagaaaaaatgttagtactgtctgagcccgcagcatcttgacagtccttcctgtggaatgctgtaggtacagcttctcatcctgatgtggtttctttcctagagctatagaggtgacctcaaatcacacctgtatgcaagatagtagtttgcagactgcactagcctgtggccactagtgtgatgagagcagcatctgaagcctcacaaaggcaacagtctgcacagagttctgggagactgtggcagtgccaccaggatgtcctgaaatgtgtgtctgtgtgcaaagcagcattagccaaaatgtcataggatctggttctagttttttttatctgatcccctaacattaccgaaacaaaacaagtgttgaagacatgccttgccacatagctagggcctctgtcctggtctgaccccacaactttggtgctgtctcctcgtactctgtcccatgtaagtcgttggctcctgtattaacacagtaatacctcgcttctctgtgcatttagctgggaatgttcccgctatggtgaccggaataaagttattaacatgaaaaaaaaaa

SEQ ID NO: 3235 - DNA, 760 bp, Rattus norvegicus
  Genbank Accession No. NM_057099
gcggccgccttagctgttcgtggagccgtctctgcaccggcctttgggccggaggcgctcactccagactgggaaaaccgagaagtctccacagggaccacgatcatggctgtgcaatttgacgggggcgtggttctaggagcagactccagaacaaccactgggtcgtacatcgccaatcgagtgactgacaagctgacccctatccacgatcacatcttctgctgccgctcaggctcggcagctgatacccaagcagtagctgatgctgtcacgtaccagcttggtttccacagtattgagctgaacgagcctccactagtgcacacagccgccagtctctttaaggagatgtgttaccgctacagagaagatctgatggcaggaatcatcatcgcaggctgggaccctcaagaaggagggcaggtgtactctgttcccatgggaggtatgatggtaagacagtcctttgccatcggaggctccgggagctcatatatctatggctatgttgatgctacctatcgggaaggcatgaccaaggatgaatgtctgcaattcactgccaatgctcttgctttggctatggaacgggatggctccagtggaggagtgatccgcttggcagccattcaacagtcgggggtagagcggcaggtgcttttgggagaccagatccccaaggtcaccatctccactttgccacctccctgaagcctaggattcccatcccgacgcacaagctaataaacagattgtc

SEQ ID NO: 3236 - DNA, 2573 bp, Rattus norvegicus
  Genbank Accession No. NM_057100
ccgggctcccggcccgggcctcgccatgccgccaccgcccgggcccaccgccgccctgggcactgcgcttctgctgctcctgctggcctccgagtcttcgcacactgtgctgttgcgggcgcgtgaggcggcgcagttcctgcggcccaggcagcgccgcgcctaccaagtcttcgaggaggccaagcagggccacctggaacgggagtgcgtggaggaggtgtgcagcaaggaggaggctagagaggtgttcgagaacgaccccgagacggactatttctatccaagatatcaagagtgcatgaggaaatatggccggcccgaagataaaaacccaaatttcgccacctgtgttaagaacttacctgaccaatgcaccccaaacccctgtgataagaagggcactcaactctgccaagacctcatgggcaacttcttctgcttgtgcaaagatggctggggaggccggctctgtgacaaagatgtcaacgagtgtagtcagaagaatgggggctgcagccaggtctgccataacaaaccaggaagcttccaatgtgcctgccacagtggcttctcacttcaatcagacaacaagagctgccaagatatagatgaatgcacagactcagacacctgtggggatgcgcgttgcaagaaccttccgggctcctactcctgcctctgcgacaaggggtacacttacagctccaaggagaagacctgccaagatgtggatgagtgccagcaggaccgttgtgagcagacctgtgtcaactccccaggcagctatacctgccactgtaatgggcgcgggggcctaaaactgtccccagacatggatacctgtgaggacatcttaccgtgtgtgcccttcagcatggccaagagcgtcaagtccttgtacctgggccgcatgttcagcgggacccccgtgattagactacgcttcaagaggctccagcctaccaggctgctggccgaatttgacttccgtacttttgaccctgagggagtcctcttcttcgccggaggtcgctcggatagcacctggatcgtcctgggcctcagggctgggcgacttgagttgcagctacggtacaatggcgttggacgcatcaccagcagtgggccaaccatcaaccacggcatgtggcaaacgatctctgtggaagaactggaccgcaaccttgtcatcaaggtcaacaaagatgccgtgatgaagattgcggtggctggggggctgttccagctagagagaggcctgtaccacctgaatctcactgtggggggcattcccttcaaggagagtgacctcgtccagccgattaaccctcgcctggacgggtgcatgaggagctggaactggctgaatggggaagacagtgccattcaggaaacggtcaaggccaatacaaaaatgcagtgcttctctgtgacagagaggggctccttcttcccggggaatggatttgccttctatagcctcaactacacccggacatcgctggatgtcggcacggaaaccacctgggaagtagaagtcgtggctcgcattcgccctgccactgacacgggggtgctgatggcactggtgggggacaaagacgtcgtcctcctctctgtggccctggtcgactaccactccacaaagaagctcaagaagcagctggtggtcctggcagttgagaatgttgccctggccctgatggaaatcaaggtgtgcgacagccaggaacacactgtcactgtctccctgcgggatggcgaggccaccctggaagtggatggtaccaagggccagagcgaagtgagcaccgcacagctgcaggagcgactggacctgcttaagacacgtctgcaaggctccgtgctcacctttgtggggggcctgccagatgtacaagtgacttccacacccgtcacggcgttctaccgtggatgcatgactctggaggtaaacgggaagaccctggacctggatacggcctcctacaagcacagtgacatcacctcccactcctgcccgcctgtggagcacgtcacagcctagaccgagctgcaagagttctctacacctaaaagacacggtgaagcagggtcagggacacacagcaccatctcctctcgcatgggccctgcaacactggagcaggtgcagggctacgatgggtactacgtactgtccgtggagcagtaccccgagctggctgacagtgccaacaacatccagttcctgagacaaagcgagatcggcaagaggtaacccccgggccacccctgcgcagattctcctgtagcacaaaccgaaccggactctccaaagagccttccagaatgacactgctctgcagacaccctcggcgcagacacaggcaacacaaaccagaaacaaagacgactttttttttctctaaatgaccttaaaggtgatcggctttaaagaatatgtttacatacgcatatcgctgcactcaattggactggaagtatgagaaggaaaaaaaagcattaaaaaggcaacgttttgccatgaccctctgtaccttcgaggcactgtatttaacaaaagtttt

SEQ ID NO: 3237 - DNA, 2779 bp, Rattus norvegicus
  Genbank Accession No. NM_057107
tgtaaaacttgattcccgttgagatctgttgattgtatttttgagcacatgaataaccacgtatcttcaacaccgtctaccatgaagctaaaacaaaccatccaccccatacttttatatttcatacattttataatatcactctatactattttaacatacatcccattttattttttgtgtgagtcaaaacaagagaaaccaaaccacattaaagcaaagcctgtcagttcaaaaccggactctgcatacaggtctgtcaacagtatggatggcttagcttcagtattgtatcctggctgcgacacacttgataaagtttttatgtatgcaaaaaacaaatttaaggacaaaagactattgggaacacgtgagattttgaatgaggaagatgaaatacaaccaaatggaaaggtttttaaaaaggttattctggggcactataattggctttcctatgaagatgtcttcattcgagccctcgattttggaaatgggttacaaatgttgggccagaagccgaaggccaacatcgccatcttttgtgagaccagggctgagtggatgattgctgcgcaggcgtgtttcatgtacaacttccagcttgttacactgtatgcgactctgggaggtccagccattgtccatggactgaatgagacagaggtgaccaacatcattactagtaaagaactcctgcaaacaaagctgaaggatatcgtctctttggtcccacgtctgcggcatatcattactgttgatgggaagcctccaacctggtctgagttccccaagggcgtcattgtacacaccatggctgcagtgcaggctctaggagtaaaggctgacgtggacaagaaagctcacagcaaaccactgccctcagatattgcagtaatcatgtacacaagtggatccacaggaattccaaagggagtcatgatctcacacagcaacatcattgcctctataacggggatggcgagaaggattccaagactgggagaggaagatgtatacattggatatttgcccctggcacatgttctagaattaagcgctgagcttgtgtgtctttctcatggatgccggattggctactcttcaccacagacattagcagatcagtcttcaaaaataaagaaaggaagcaaaggagacacatccgttctgaagcccacgctgatggcagctgtgccggaaatcatggatcggatctacaaaaatgtcatgaataaagtgaatgaaatgagtgcttttcaacgaaacttgtttattttggcatataattataagatggagcagatttcaaaagggtgtagtaccccgctgtgtgaccgctttgttttccggaatgtccgaaggctgctgggtggaaatattcgcgttttattgtgcggtggtgctccactttctgcaacgacacagcgattcatgaatatctgcttctgttgtcccgttggccaggggtatggactcacagaatctactggggctggaacaattacagaagtgtgggactacaataccggcagagtgggagcaccattagtttgctgtgaaatcaaattaaagaactgggaggaaggtggctattttaatactgacaaaccacatcccagaggtgaaattctgattggtggccaaaatgtgacaatggggtactacaaaaatgaagcaaaaacaaaggccgatttctttgaagatgaaaacggacagaggtggctgtgcactggcgatattggagagtttgaccctgatggctgcctcaagatcattgatcgtaaaaaggaccttgtgaaactacaggcaggagagtatgtttctctaggcaaagttgaggcagctttgaagaacctcccactgatagataacatttgtgcatatgcaaacagttaccattcttacgtaattggatttgttgtgccaaatcaaaaggaacttacggagctagctagaacgaaaggatttaacggaacttgggaagagctgtgtaacagcagtgaaatggaaaacgaggtccttaaagtgctttctgaggctgctatttcagcaagtctggaaaagtttgaaatcccactgaaaattcgtttgagccctgacccatggactcccgaaactggtctggtgactgatgccttcaagttgaaacgtaaagaacttaaaacacactaccaggcagacattgagcggatgtacggaagaaaataattagtttgggcattggtttgctacagtgagctcagatcaaatagggaaatacttgaaatgtatgtctcaggccaaggcaaactccattcctcatattaaaccctggctgttacttctcactacgtcaccatttttaactgacaggattagtaaactattaagacagcaaacatgtgtctgtctctgttttttcccctcctccagtttgctttggcatctatgactgtgtttgtcaataggagactttttcaaaatcatactggggaagcagtgattttaaaacctcaagtttttaaacatgatttatatgttctgtacaattgttcagtttgtaactttttaaagtttggatgtatagaaggataaataggaaatataaaaattggttatttgggggcttttttacttattgtatttaaaaataaaagggtatcaatgtgaaattatgtaaattttaaatgcttatgaatcaaatcattgttgaacaaaagatttgttgctgtgtaattattgtcttgtacgcatttaagagaaataaatatactcagacttatgttttaagaaatgg

SEQ ID NO: 3238 - DNA, 1109 bp, Rattus norvegicus
  Genbank Accession No. NM_057197
gaattccctgctgcaaacatggcgctgctggcccgtgcgttctttgctggggtgtcccgcctcccctgcgatcccggtcctcagaagtttttcagctttggaacgaaaaccctgtatcaaagcatcgatgctccacagtctaaattcttcccacccattttaaagcctatgctaccacctaatgcctttcaaggaaaagtggctttcatcacgggaggaggcactggccttggcaaggcaatgacaactttccgctccagcctgggtgcccagtgtgtgatcgcgagcaggaatattgatgttctgaaagctactgcagaagagattacttctaaaactggaaataaggtctatgcgattcggtgtgacgttcgagatcctgatatggtacacaacacagtactggagctgatcaaagttgcagggcatcctgatgtggtgataaacaatgcggcagggaacttcatttctcccagtgagagactgtctcccaatggttggaggaccataactgacatagttctcaatggtacagcctatgtgacgatagaaattggaaagcagctaattaaagcacagaaaggagtcgcctttcttgctatcactacgatctatgctgagagcggatcaggctttgtaatgccaagttcttcagccaaatcaggcgtggaagccatgaataagtctcttgcagctgaatggggtagatacggaatgcgtttcaacataattcagccagggcctatcaaaaccaaaggtgcctttagccgtttggacccgactggaaaatttgagaaagatatgatcgagagaatcccctgtggtcggctgggaactgtggaggaacttgccaatctagcgactttcctttgcagtgattatgcctcttggatcaatggggcagtcattcgatttgacggtggagaggaagtgtttctgtcaggtgaattcaactctctaaagaaggtcaccaaggaggagtgggatgtaatcgaaggcctcatcagaaagacaaaaggctcctaagacgttcatggcttcctctgtgacaaactaaagtttagggactatatagatggacatttgagttaataaattttttgtctgat

SEQ ID NO: 3239 - DNA, 2721 bp, Rattus norvegicus
  Genbank Accession No. NM_057211
gcggccgtcggcggacgcgggaagaagtgtcttgtaggcgcggcgccccactcagccccggcccccctcatccgcgtactcggctgatgcctcagggcgtcagctcggcggagaggcggtcgaggcgtgcgcctggctagcagttggctttccccgtgactcggacacgtttgcagtcgaataaacttgcgaccgccacgtgtggcatctctccaaggaaccggctcaggaggagggcgcgcccatcgtgggatcgcgcggggcgcccggcagggcggcggcgacagcggcagagccggccgcggctgctgcgtgcggaggcgctgccggttacgtaaagatgaggggctgaggtcgcctcggcgctcccgcgagtcgcaagctcccgcgcccccgccccctcggccgcgccgcaccgcgctcgtcgtccgagaccagggcagggctagccgaagctccgcagccaccctcaagtttggccgcaccgcccgggctgccgtcgcccgcaccatgtccgcggccgcctacatggacttcgtggctgcccagtgtctggtttccatctccaaccgcgccgctgtgccggagcacgggggcgctccggacgccgagcgactgcgactacctgagcgcgaggtgaccaaggaacacggtgacccgggggacacctggaaggattattgcacactggtcaccatcgccaagagcttgttggacctgaacaaataccgacccatccagaccccctcggtgtgcagcgacagtctggagagtcccgatgaggatataggatccgacagcgacgtgaccaccgaatctgggtcgagtccttcccacagcccggaggagagacaggattctggcagcgcgcccagcccgctctccctcctccactctggagtggcttcgaaggggaaacacgcctccgaaaagaggcacaagtgcccctacagtggctgtgggaaagtctatggaaaatcctcccatcttaaagcccattacagagtgcatacaggtgaacggcccttcccctgcacgtggccagactgccttaaaaagttctcgcgctcggacgagctgacccgccactaccggacccacactggcgagaagcagttccgctgtccgctgtgtgagaagagattcatgaggagtgaccacctcaccaagcatgcccggcgccacaccgacttccaccccagcatgatcaagagatcaaaaaaggctcttgccagccccttgtgaggtgctccccatatggcaaccaggcagagatggtcccggaaggacagagctcccaggaaacagacggacacatggaaatctgccaccgcagagttgtgctggccacaggaggtcactgctctttggtcaatattctgacactctccctgcgctgtttccaaaaagcacacggtagcctaagatcaaagtcaacatttggtccccttgcagaggccactctgaaccgtctctgactgttggagggcaggcaaataaatgcttttggtattttctcctttgttttggggggtggggggagggggcaaggccaagacttggggtaggatttttgaagattcaggctggtgtacatacgtctgactgggtgagttgacccctggcctcccacagtgactctggatccttgatgcttgctgactctcagaattgtttttcttctctctcaatgtcacgaccagagtgcttcagcttgtttagcagagccactctcgaatcacgttaacttttgagatttaaaaaacaaaacaaaacaacaaaaaaaaaaaaaaacccctccatagcacagctgtcttttatgcaagcaagagcacacctactccagcatgatctgtcatctaaggacttcaaaacaaaacaaaacaaaaaaaaaagttacttatagtcagtggataagcagagtccgaatttacactaaacaagacagaccttcgaggggtcataagtccggaactttcaaaccttgcttcgtatgaatcgtactatctgaacataaactgcacttttattttctaataccgagggtgaatacggtaaatccatgccttgagggtagaagccgacattctgtttggcacacgttattatctgcttattttccaggatacacatttccctgagaacccacggcagagatgtgagggcagaatgtatggaaacacatgctgaggaggggaaggaggaggggagtgctttaaagatacaaaaaaaaaaaaaaaaaaaaaaagagcaaacaattttaacttcatgaatttgtttgaattttcccaagcttcagataacaacgccactcacgggactaggacgctgcaagagcattgggctctgtgtagcattagctgataaatgggtgtatagccatcaccagacctggaaatgcccccttttggtgggggtgggggtgtttcttggtctctctttcgttcctatgaaatttccactaagaggtgcaagagttatatcaaaggaaagggaactgaaatatggaaaaaaaaaagtttgcccctgtaagtagtctctagggaaggaagatgccacaatggtttcagaggcgactctgcagaacagtcccttctgctgaacataggtcagagaaacactcgtgaatggcatcacatcgccaactgtctgcatcatggcccaccactacttagcttgtatctcggtgtctacacaatggcctgaaccactggtcaccat

SEQ ID NO: 3240 - DNA, 1614 bp, Rattus norvegicus
  Genbank Accession No. NM_057213
cgggccagcacaagatggcgttgcgagcgatgcggggaatcgtgaacggggccgcgcccgagctgcccgtgcccaccggtgggccgatggccggagctcgggagcaggcgctggcggtgagccggaactacctctcccagcctcgtctcacctacaagactgtctctggagtgaatggtccactagtgatcttagatcatgtaaagtttcccagatatgctgagattgtccacttgacattaccagatggcacaaaaagaagtgggcaagttctagaagttagtggctccaaagctgtggttcaggtatttgaaggaacatccggcatagatgccaagaaaacatcctgtgagtttactggagatattctccgcacaccagtgtctgaggatatgcttggtcgagtattcaatggatcaggaaaacccattgaccgaggtcctgtggtgttggccgaagacttccttgacatcatgggtcagccaatcaaccctcagtgtcgcatctacccagaagagatgattcagacgggcatttctgccatcgacggcatgaacagtattgcgaggggacagaaaatccccatcttttctgctgccgggttaccacacaacgagattgcagctcagatctgtcgccaggctggtttggtaaagaaatccaaagacgtggtagactacagtgaagaaaactttgccattgtgtttgctgctatgggagtaaacatggaaacagcccggttcttcaaatctgactttgaagaaaatggctcaatggacaatgtctgccttttcttgaatctggctaatgacccaactatcgagaggatcatcactcctcgcctggctctgaccaccgctgagtttctggcttaccagtgtgagaagcatgtcctggtcatcctgacagatatgagttcttacgctgaagcacttcgagaggtttcagctgccagggaagaggttcctggtcggcgaggcttccccggctacatgtatacggatttagccaccatctatgaacgcgctgggcgagtggaaggtagaaatggctctattacccaaatccctattctcaccatgcccaatgatgatatcactcatcctatccctgacttgactgggtatattactgagggccagatctatgtggacagacagctgcacaacagacagatttaccctcctattaatgtgctgccctcactctctcggttaatgaagtcagctattggagaaggaatgaccaggaaggatcatgctgatgtgtctaaccagttgtacgcatgctatgctatcggtaaggatgtgcaagccatgaaagctgtggtgggagaagaagccctgacctcagatgacctcctttacttggaatttctgcagaagtttgagaaaaacttcattactcagggtccctatgaaaatcgaactgtctatgagactttggacattggctggcagttgcttcgaatcttccccaaagaaatgctgaagaggatccctcagagtaccctgagcgaattttaccctcgagactctgcaaagcactagctgctgctgcttgtgcggctcgaccctcttgtgaagtgctggttctgtttcctgattccttttg

SEQ ID NO: 3241 - DNA, 1018 bp, Rattus norvegicus
  Genbank Accession No. NM_080767
ggatctgtgcggcgctcctcgggggcagcggccgagtgggcttgccgtggatgcagaagggcttcgctcggacccgggacactacagtttctccgtgcaagctccggagctcgcgcttccccggggaatgcagcccactgaattcctgaggtcctttggtgatgaccaggaaaggaaggttcagattgaaatggcgcatggcacaaccacgctggccttcaaattccagcatggagtcatcgtggctgtagactccagggcctctgcagggagttacattgctaccataagggtgaacaaggtgatcgagattaacccttacctgcttggaactatgtctggttgtgcagccgactgtcagtactgggagaggctgttggccaaggaatgcaggctatactatctgcggaatggggaacgcatctccgtgtctgcagcctccaagctactttccaacatgatgctgcagtaccggggtatgggcctctccatgggcagcatgatctgcggctgggacaagaagggaccgggactttattacgtagatgacaatgggactcggctctcgggacagatgttctccacaggcagcgggaacacctatgcctacggggtgatggacagtgggtaccggcaggatctcagtcctgaggaggcctacgaccttgcccgaagagctattgtttatgctacccacagagacagctattctggaggagttgtcaacatgtaccacatgaagaaagacggttgggtgaaagtggagagcactgacgtcagtgacctgttgcacaagtaccgagaggccactctgtgatcactgctgggcagacatcctcccggccctgaggagctggcagactcagggacctggggctacttcagtcttaggagaaagacgggcccaacctgggctggagacaaagctctgaggctatggagacatctttgtttaccctctcactcagccagccctcacggataccttctaagtacaataaaagaaaaacagttctac

SEQ ID NO: 3242 - DNA, 3043 bp, Rattus norvegicus
  Genbank Accession No. NM_080787
ggaagacagaagcgtgggagtggagaaagtggcacaaaccagagccctggagatactctggaaacgcggagcagattgtgttggaaagctggcaacagcggtggtctcgggcgcggcgggagggcaggctgggtcgggggcgggcagtgtgtcgtcaggagctgggcggccccgcggcggccgcgtcttcctagcccatcccctcaagcccagctcgggctccggcgccccagctccgaccgtgcgctctcctgggtcaagttagagcccaccgagagccccgcgccactcgcgcactctcgcacccgggcagaaggactgcggaaggggccgccccacgggctgggtgagggctgcagcgtccagagaaggaagcgttgacagctggagccggctgctggaagggtttgcgccgggacgcgggggttgccgtagcgctacgcaagacggggcttaccctctgaaaagcaaacataagaggctgtacaaccaggttatctctgcgatcagcctcaagcagagaagaaagatggccaaagacaagggcctcatcagcccagaagactttgcccagctgcaaaagtacatagactactccaccaaaagtgtcagcgatgtgctgaaggtctttgagatgaacaaatattgccaaggagatgagattgggtacctgggatttgaacagttcctgaaaatgtatctggaagtggaggaggttccccatcacctatgctggactctgttttggtccttccatagcagtcaagacttggatgaggagactgagtcaaaagccaatgtgatctgtctcagtgacgtctactgctacttcaccctcctggaaggcggcagtccggaagacaagctagagttcaccttcaagctgtacgacatggacagaaatgggatcctagacagcacagaagtagaaaaaatcatcctgcaaatgatgagagtggctgaatatctggactgggatgtgtctgagctgagaccgatccttcaggagatgatgaaagagatggaccgggatggcagtggctgtgtctccctagctgagtgggtccgggctggggctaccactgtgcccctgcttgtccttctggggatagacatgactatgaaagatgatggacaccatatatggagacccaagagattctccagaccggtctactgcaacctgtgcgagttgagcattggcctcggcaaacaaggcctgagctgtaacctctgtaagtacattgttcatgaccactgtgccatgaaggcccagccttgtgaagtcagcacctatgccaagtctcggaaagacattggtgtccagccacacgtatgggttcgaggaggctgtcattctggacgctgcgaccgctgtcagaaaaagatccggacctaccacagcctaacgggactgcactgcgtgtggtgccacctggagatccacgatgactgtctgcaggctgttggtcccgagtgtgactgtggactgctccgtgatcatatcctgcctccgtgttctatctaccccagggtcctggtatctggacaggagtgcaaacagaagaccacagatgttacgagcctgtgcacccctgaggcttttcggattgaacctgtttctaacacccacccccttctggtcttcatcaatcctaagagcggaggcaagcaggggcagagcgtgctttggaagttccagtacattctgaaccctcggcaggtgtttaacctgaaggatggtccggagccagggctcaggtttttcaaagacgttcctcagttccgggtgttggtgtgtggtggagacggcaccgtaggctggattctagagaccattgacaaagccaactttcccattgtgcctccagtcgctgtgttgcccctgggcactggaaatgacctggctcggtgcctaagatggggaagaggttatgaaggtgagaacttgagaaagattctcaaggatatagagataagtaaggtggtatatctcgatcgatggctcctggaagtgataccccaacaaaacggagaaaagagtgatccagttccctctcaaatcatcaataactacttctccattggtgtggatgcttccattgctcaccggttccatctcatgagagagaaataccctgagaagttcaatagcagaatgaagaacaagctttggtacttggagtttgccacatcggagtccatcttctcaacgtgcaaaaagctggaagagtcagtgaccgtcgagatatgtgggaagctgctggatctgagtgacctgtccctcgaaggcattgcggtattgaatatcccgagcatgcatggtggctccaatctctggggtgacaccaagagacctcacggggatacgtgtgggatcaaccaggcactgggcagtgtggccaaaataatcacagaccccgatattctcaaaacctgtgtgccagacatgagtgacaagcggctggaagtcgtaggaatagagggtgtgattgagatgggtcagatctataccaggctcaagagtgctggacaccggctggccaagtgctccgagatcacgttccagaccacaaaaaccctccctatgcaagttgatggagaaccctggatgcaagcaccctgtacaatcaagatcacccataagaaccagatgcctatgctaatgggtccggctcccagttcctccaatttctttggcttttggagctgaggatggatgccatctgccttgagcccacctccctgttcctggagatttcccactatctagatgctgccacaccttcctgccagcccagaaggatgttccatcaccttcacagtatttattatcctccgccacctcactgctcccacacagacatccttacacaaccagcgatgcgtaaccttgaaaatgcctcatctaataaagtgactttttccatcactgggatatctgttaaaatgagcgacacatctctttttacaccttcacccctctacagacagatttaaaagcagacagaacaaataaatgaacaaagaaagcctaaaaaaa

SEQ ID NO: 3243 - DNA, 1712 bp, Rattus norvegicus
  Genbank Accession No. NM_080886
ggccgctgcacctgcccggtcttgcgccgagaccgctgtcaatcgcggggcaccaggaataaaaggccccttgcagagatttgaaaatggccatgaacaaaagtgttggcctcttcagctccgcatccctggctgtggactacgtagattccctgctgcctgagaatcctctgcaggaaccctttaagaatgcttgggtctacatgttggacaactatacaaagttccagatcgcaacctggggctccctgatcgttcatgagacgatctatttcctgttctctttacctggctttctattccagtttatacctttcatgagaaagtacaagattcaaaaggataaaccagaaacctttgaaggccagtggaagtgtttgaaaggaattctgtttaatcatttttttatccagttgcctctgatttgtggaacatactattttacagagtttttcaatattccttatgattgggaaagaatgccaagatggtatttcactttggcaaggtgtttgggctgtgcagtcatcgaggatacctggcactatttcctgcacagactccttcaccacaagaggatttataaatacattcataaagtccatcacgagttccaggctccatttggaatcgaagcagaatatgcacatcccttggaaaccctaattcttgggactggatttttcattggaattgtgcttttgtgtgatcatgtaattcttctgtgggcatgggtgaccatgcgtttgctagaaaccatcgatgtgcacagtggttatgatatccctctcaacccgttgaactacatccctttttataccggggctcggcatcacgatttccaccacatgaacttcattgggaattacgcctccaccttcacgtggtgggacagaatctttgggacggatgtccagtaccatgcctacactgaaaagatgaagaagcttgggaaaaagtctgagtgagcacctgctctccgccctcctgactgcagctggcaactaacattgcttctggggagcagaactaagcacgtgactcggctgctggtgataggaacattaacaacctttaagtactctgcgggatgagaactcttctgctcgacacccaagatctgtaaatgtgggaacaaagaaatagatacataagtacagttttcaggaggaggttttaaaggccatattgccaacctcaccgaaaggtttcaggaacccgaggaagtgttaatgtacaactcaccacttcacgccacccgaggctgaagttgacgttgccttttaagcctttttacatacactggccatttcagaaaattctcaacaataatgtctgccttcgagtttaagtcatggtgttttttagaattgacttgaaatgaaaatatcacaaagtgaatatatcagctggtgatcgagtgactgaaacccccctggtctgcggttgaccagttcaggactattctttctgtgaaggattgtttgattgtagtatctttatcagcatcttgtaaattggctcatttcctacgtgatgtacatagaatactataacttaacgactttcaagttacttggggcatttttaaattgaggagccccacttctgatgtccacccccttgtctttgtgtgtcaggtggtctcggagctttgtgaattctctatctgcacctgtcagagctggtgaaataaatgtgatttttgtccg

SEQ ID NO: 3244 - DNA, 1685 bp, Rattus norvegicus
  Genbank Accession No. NM_080892
tctctgctgaacctttgtccattcctagcaaatcctgcaggaccagagtgtcagccagcagcatggctacaaaatgcacaaagtgtggtccaggttatgcgacccctctggaggccatgaaaggaccccgagaggagattgtctacttgccctgcatttaccgaaacacaggcattgaagccccggattatttggccacagtggatgttgaccccaagtctccccattatagccaggtcatccataggctgcccatgccacacctgaaggacgagctgcaccactcagggtggaacacctgcagtagctgctttggggacagcaccaagtcacgcgacaagctgatactgcccagcatcatctcctcccgcatctatgtggtggatgtgggctctgagcctcgtgccccgaagttgcacaaggtcattgagcccaatgaaatccatgccaagtgcaacctgggcaatctgcacaccagccactgcctggccagcggagaggtgatgatcagctccttgggggatccccaggggaatggcaaagggggttttgtgctgctggatggggagaccttcgaggtgaaagggacgtgggagaagcctgggggtgaagctccaatgggctatgacttctggtaccagcctcgacacaacatcatggtcagcactgaatgggcagctcccaatgtcttcaaagatggcttcaaccctgctcatgtggaggctgggctgtatgggagccacatacatgtgtgggactggcagcgacatgagattatccagaccctgcaaatgaaagatgggctgatccccctggagatccgcttcctgcacgacccagatgccacccagggctttgtaggctgcgccctcagctccaacatccagcgcttctacaagaatgagggaggcacctggtcagtggagaaggtgatccaggtgccctccaagaaagtgaagggctggatgttgccagaaatgcctggtttgatcaccgacatcttgctgtccctggatgaccgcttcctctacttcagcaactggctgcacggggacattcggcagtatgacatctctaacccgaagaagcctcgcctcactgggcagatcttccttgggggcagcattgttaaaggaggctctgtacaagtgctggaggaccaagagctaacgtgtcagccggagcccctagtggtcaagggaaaacgagttcctggaggtcctcagatgatccagctcagcttagatgggaagcgtctttacgtcactacatcactgtacagcgcctgggacaagcagttttaccctaatctcattagggaaggctctgtgatgctgcaaattgatgtagatacagcaaatggagggctgaagttgaaccccaactttctggtggactttgggaaagagcctcttgggccagcactggctcatgagcttcgttacccagggggtgattgcagttctgacatctggatctgaaggctagccctaaaggccttcctccacagtcggggtcctccttctgaggagcctagcttcgctctgctctgggtcccaactctccaaggccatgatgagaccatcgagaactgcagagcagtatctcactactaccttgcttgttgtttgtgccattcttaagtgagctcctggaagcaccaagaaataaaatgctgaaccttt

SEQ ID NO: 3245 - DNA, 1082 bp, Rattus norvegicus
  Genbank Accession No. NM_130823
gaattccggagaatcttctttcgtctgctcgctctctctcccgtcgtcctagcccgccgccgcctgctgagcttgccctctccccgcttgcagacatggctgacatcaagaacaaccccgaatattcttcgtttttcggtgtcatgggcgcctcgtccgccatggtcttcagcgccatgggagctgcctatggcacagccaagagtggcactggcatcgcagccatgtcggtcatgaggccagagctgatcatgaagtccatcatcccagtggttatggctgggatcatcgccatctacggcctggtggttgcagtacttatcgctaactccctgactgatggcatcaccctctacaggagttttcttcaactgggtgctggcctgagtgtggggctgagtggcctggctgctggctttgcaattggcattgtcggagatgctggtgtccggggcactgcccagcagcctcgactgttcgtgggcatgatcctgatcctcatctttgcggaggtgcttggcctctacggtctcatcgtggccctaatcctctccacaaagtagtcttttccaccaccagtcacaggataggatgtaaagatcacccctcctcattccagaaggaacagcctgacacatgcacgggcagctgcccctcagtagttggtcttgtaaatgtgcagtgtccctagtgccattgtctgttgccccgccttgcccctactgccccgtgctgtggacatctgggcccactcatctcccacccaggcccctgaccagtgacgatttcagcctctggtcaccccacccatcgccctagagtgcgccttgtgtataagaatgaattagagttgtcatttttctcttcactggatgtttatttataaaagatttgacctattcatgtgtctgtggagcagccctgtctcccaactctatagtaatcattagtagactgttgccttgtggggttcctgttgctgagactccttggatggagccaccctgcccccagccctgaacagccgggggggggtagagagttcctcagagctggctcccagctgtgtccaataaaagttc

SEQ ID NO: 3246 - DNA, 2381 bp, Rattus norvegicus
  Genbank Accession No. NM_131913
gcgaatggcagcctccagaaagccgccgcgagtaagaccacaggatggctccgaaggtgacctcagagcttctgcggcagctgcgacaagctatgaggaactcggagtgcgtggcagaacccatccaggcctacatcatcccatcgggagacgcccaccagagtgagtacattgcaccctgtgactgtcggagggcgttcgtctccggcttcgatggctctgcaggcacagctatcatcacggaggagcatgcggccatgtggacggatgggcgctactttctccaagctgccaagcagatggacaacaactggaccctcatgaagatgggtctgaaggacacaccgactcaggaggactggctggtgagtgtgcttccggaaggatccagggttggtgtggaccctctcatcattcccacagattactggaagaagatggccaaggtacttcgaagtgctggtcaccacctcgtgcctgtgaaggagaaccttgtggataagatctggacagaccggccagagcgcccttgcaagcccctcctcacactgggtctggattatacaggcatctcgtggaaggagaaggttgcagaccttcggttgaaaatggcggagaggagcatcgtgtggtttgtggtcactgccctagacgagattgcatggctgttcaatctccgagggtcagatgtggagcacaacccggtgtttttctcctacgcaatcataggactagagaggatcatgctcttcatcgacggggaccgcattgatgcgcctggtgtgaaacagcacctgctccttgacttgggcctggaggcagaatataaaatccaggtgctgccttacaagtccatcctgagtgaactcaagaccctgtgtgctgacctgtccccgagggagaaggtgtgggtcagtgacaaagccagctatgctgtgagcgaggccatccccaaggatcatcggtgctgtatgccttatacgcccatctgcattgccaaagccgtgaagaactccgccgagtcagcaggcatgaggcgggctcatattaaagatgccgttgccctctgcgagctcttcaactggctggagcaagaggtccccaaaggtggcgtaacggagatctctgcagctgacaaggctgaggaatttcgaagacaacaggctgactttgtggacctgagcttcccaacgatttccagcacgggacccaacggcgccatcattcactacgcgccgatccctgagacgaataggaccctgtccctggatgaggtgtatctcattgactccggtgctcagtacaaggatggaactacagacgttacccggaccatgcacttcgggacccctactgcctatgagaaggagtgtttcacgtatgtactgaaaggccacattgctgtgagcgcggctgttttcccaacgggaaccaaaggccaccttctagactcctttgcccggtcagccctgtgggattccggcctggattacctgcacggaacaggacacggcgtcgggtctttcctgaatgttcacgagggcccttgtggcatcagttataaaacgttctctgacgagcccttggaagccggcatgatcgtcactgatgagccagggtattatgaagatggggcgtttgggatccgcatcgagaacgttgttttggtggtccctgcgaagaccaagtataatttcaataaccgaggaagcctgacctttgaacctctaactttggttcccatccagaccaaaatgatagatgtggatgctcttacagataaagagtgtgactggctcaacagctaccaccagacctgcagggatgtgattgggaaggagctgcagactcaaggccgccaggaagctctcgagtggctcctcagagagacagagcccatctccaggcagcattgataccgtctagcgtttgtttttgtaggatgctctggggaaggaagacacatggcagaccctgacttctttctcctcacctcctcctcctccccaactcccctttttacttttagacactaagaagggcagaaactcttcttatccactttgatattttcttgcaaacagtcttttatgaatttttaattgttgagaatgagccaggaataaaactgctacaccagaaggaggggcctcacaaagcgaagccttgacaagggggagatacccgagccctctggccagcggtggccagcggtgactgctctgcgatggtctccttccaggtgctggtacctcagtcgcggtcaccctgacgttcatgagaccctcctatgatcagtgaataaaatactaaactcggaagagatgagtgcctatggtgtgtacagataaccctctgattttgtgggtttctgagcggcc

SEQ ID NO: 3247 - DNA, 1935 bp, Rattus norvegicus
  Genbank Accession No. NM_133295
caaaggaacaaatagcccacagatccgcagaacccttgtccttccacaatgcgcctctaccctctggtctggctttttcttgctgcgtgcacagcttgggggtacccatcctcaccacctgtggtgaacactgttaaaggcaaagtcctggggaagtatgtcaatttggaaggatttgcacagcctgtggctgttttcctgggaatccccttcgccaagccccctcttggctccttgaggtttgctccaccacagcctgcagagccttggaactttgtgaagaatactacctcctacccacctatgtgctctcaagatgctgttggagggcaggttctctcagagcttttcaccaacaggaaggaaaacattcctttacagttttctgaagactgcctctacctgaacgtttatactccggctgacttgacaaagaacagccggctaccagtgatggtgtggatccatggaggtggactggtagtgggtggagcatccacctatgatggacaggtcctctctgcccatgaaaatgtggtggtggtgaccattcagtatcgccttggcatctggggattcttcagcacaggggatgaacacagccggggcaactggggtcacttggaccaggtggctgcactacactgggtccaggacaacattgccaactttgggggtaacccaggctctgtgaccatctttggagaatctgcaggaggtttcagtgtctctgctcttgtgttatctcctctggccaagaacctcttccacagggccatttctgagagtggtgtggtcctcacttctgctctgattacaacagatagcaagcccattgctaagctgattgctacactttctgggtgtaaaaccaccacatcagctgttatggttcattgcctgcgccagaagacagaggatgaactcctggagacttcattaaaattgaatcttttcaaactggacttacttggaaacccaaaagagagctatcccttcctacctactgtgattgacggagtggtgctgccaaagacaccagaagagatcctggctgagaagagtttcaacacagtcccctacatagtgggcatcaacaagcaagagtttggctggatcattccaacgcttatgggctatccactctccgaaggcaaactggaccagaaaacagccaaatccctcttgtggaagtcctacccaacactgaaaatctctgagaaaatgattccagtggttgctgagaagtacttcggagggacagatgaccctgccaaaaggaaagacctgttccaggacttggttgcagatgtgatatttggtgtcccatcagtaatggtgtctcgaagtcacagagatgctggagcccccaccttcatgtatgaatttgagtatcgcccaagctttgtatcagccatgaggcccaagacagtgatcggagaccatggtgatgaactcttctcagtatttggatctccatttttaaaagatggtgcctcagaagaggagaccaatctcagcaaaatggtgatgaaatactgggccaactttgctcggaatgggagccctaatgggggagggctgccccattggccagaatatgaccagaaggaagggtacctgaagattggtgcctcaactcaggcagcccagaggctgaaggacaaagaagtggctttttggtctgagctcagggccaaggaggcagcagaggaaccatcccactggaaacatgttgagctctgatcaggagggtcagccatgtttgagaacctgaagctaaaggggaattattccacagaagattttgtaaagacataacacttcttgtctttgagactataacatcacatggtattttgtacaaatgcattaaagggaaaatacttaaccttattgcttcaacttgtaaaataaaacattgtttagaaattc

SEQ ID NO: 3248 - DNA, 2909 bp, Rattus norvegicus
  Genbank Accession No. NM_133307
gaattccggggcggcggccgcggggatcccgcgagcggcccctgaacatctacccttcttgccgggacccgggaggtccccactggcctccgggcccgtcctgatcagactcgtgtcgacctccccgtccacgcgcatccgggagagccgcgccacgagacggacccgggcccgccgggacccctggtgtctggccctgcgtcgagaggctggtgactgccacccataagctccagcttcagcctcggcttactcccctcaggggcttgcaggctgaggcctgccctcggacgcggctgaccagcctctccctctcttccacactttggacttctctttggacctcctaaaaaggctccatcatggcaccgttcctgcgcatctccttcaattcctatgagctgggctccctgcaggcggaggacgacgcaagccagcctttctgtgccgtgaagatgaaggaggcactcaccacagaccgagggaagactctggtacagaagaagcccaccatgtaccctgagtggaagtcaacattcgacgcccacatctatgaaggccgtgtcatccagatcgtgctgatgcgggcagctgaagaccccatgtcggaggtgaccgtgggcgtgtcagtgctggctgagcgctgcaagaagaacaacggcaaggctgagttctggctggacctgcagcctcaggccaaggtgctgatgtgtgtgcagtatttcctggaggatggggattgcaaacagtccatgcgtagtgaggaggaggccatgttcccaactatgaaccgccgtggagccattaaacaggccaagattcactacatcaagaaccacgagttcatcgccaccttctttgggcagcccaccttctgttctgtgtgcaaagagtttgtctggggcctcaacaagcaaggctacaaatgcaggcaatgcaacgctgccatccataagaaatgcatcgacaagattatcggccgctgcactggcactgctaccaatagccgggacaccatcttccagaaagaacgcttcaacatcgacatgcctcaccgattcaaggtctataactacatgagccccaccttctgtgaccactgtggcactttgctctggggattggtgaaacagggattaaagtgtgaagactgcggcatgaatgtgcaccacaaatgccgggagaaggtggccaacctgtgtggtatcaaccaaaagctcttggctgaggccttgaaccaagtgacccagaaagcttcccggaagccagagacaccagagactgtcggaatataccagggattcgagaagaagacagctgtctctgggaatgacatcccagacaacaacgggacctatggcaagatctgggaggggagcaaccggtgccgccttgagaacttcaccttccagaaagtacttggcaaaggcagctttggcaaggtactgcttgcagaactgaagggcaaggaaaggtactttgcaatcaagtacctgaagaaggacgtggtgttgatcgacgatgacgtggagtgcaccatggtggagaagcgggtgctggcgctcgcctgggagaatcccttcctcacccatctcatctgtaccttccagaccaaggaccacctcttctttgtgatggagttcctcaatgggggcgatctgatgttccacattcaggacaaaggccgcttcgaactctaccgggctacgttttatgcagctgagatcatctgcggactgcagtttctacatggcaaaggcatcatttacagggacctcaagctagacaatgtaatgctggacaaggatggccacatcaagattgctgacttcgggatgtgcaaagagaatatatttggggagaaccgggccagcacattctgcggcactcctgactacatcgcccctgagatcctgcagggcctgaagtactcattttccgtggactggtggtcttttggggtcctcctctatgagatgctcattggccagtcccccttccatggtgatgatgaggacgagctctttgagtccatccgggtggacacaccacactacccgcgctggatcaccaaggagtccaaggacatcatggagaagctcttcgagagggaccctgccaagaggctgggagtaacaggaaacatcaggcttcacccctttttcaagactatcaactggaacctgctggagaagcggaaggtggagccgccctttaagcccaaagtgaaatccccttcagactacagcaactttgacccagagttcctgaatgagaaaccccaactttccttcagtgacaagaacctcatcgactctatggaccagacagccttcaagggcttctcctttgtgaaccccaaatatgagcaattcctggaatagtgagctcccagacctgcttttaatgccccggcagagtaggcccatctgccctggtttgcatcctcactgcccatgaagaagagtgggtgactggtgattcctgctgctgccccctcttcctcggagagtctggctcctgttggctgggctcacagtacttcctctgtgaactgtttgtgaatttgccttccttttgccatcggagggaaactgtaaatcctgtgtgtcattacttgaatgtagttattgaaatatatattatatatatgcacatatatataataggctgtatatattgctcagtatagaaagcatgtaggagactggtgatgtgttgacctttttttaaaaaaaaccatatgtatacgtgtgtatgtatacatctacacacgtatacatatatgtatgtatgtatgtatgtatgtatgtatatatgaccaaaagaaaagagagcacaagctacctgaaccacaggattgtttatgtgtgtataaataaacactgaatggtaaaaaaccggaattc

SEQ ID NO: 3249 - DNA, 2234 bp, Rattus norvegicus
  Genbank Accession No. NM_133398
agccattgttccgccgggggaggacaagcgaggcctggcgctggcgccccgacgccacttagcggccgcctctggagacactctgtccccgccgccccgtgtcctcctggcggcggcggcgtgaggccgactggagggagtgggaaccctcggccctccccgtggcggcggcggccacctattccccactctggagtgaggggcggccgcgatgcgcttggcctaaggtgtcgcggccctcgtcgcttcccacgactgttccagcggcgtctgtgctccccggcgtcatcccgagagtctctgacgggagggaagatggctgcacgaagctggcaggacgaactggctcagcaggccgaggagggctctgcccggctgcgggagttgctctctgtcggcctaggttttctgcgcacggagttgggcctcgacctggggttggagccgaagcggtacccgagctgggtgatcctggtgggcaccggcgctctcgggttgctgcttctcttcctcctaggttacggctgggccgctgcttgcgccggcgcccgcaaaaagcgaaggagcccgccccgcaagcgggaggaggtgaccccgccgactccggcccccgaggacccagcccaactgaagaatctcagaagcgaggagcaaaagaaaaagaaccggaagaagctgcctgaaaagcccaaaccaaatggacggactgttgaaatacctgaagatgaagttgttagaactccccgaagtataactgccaagcagccaccagagacagacaagaaaaatgaaaagtcaaagaaaaataagaagaagtcaaagtcagatgctaaagcagtgcaaaacagttcacgccatgatggaaaggaagttgatgaaggagcctgggaaactaaaattagtcacagagagaaacgacaacagcgtaaacgtgataaagtgctgactgattctggttcattggattcaactatccctgggatagaaaataccatcacagttaccaccgagcaacttacaactgcatcatttcctgttggttccaagaagaataaaggtgattctcatctaaatgttcaagttagcaactttaagtctggaaaaggagattctacacttcaggtttcttcagggttgaatgaaaatattactgtcaatggaggaggctggagtgaaaagtctgtaaaactctcctcacaattgagtgcaggtgaggagaagtggaactctgtcccacctgcttctgcaggcaagagaaaaacagagcagtctgcttggactcaagaccctggtgatactaatgcaaatgggaaagactggggaaggaattggagtgatcgctcaatattttctggcattggatctactgctgagccagtttctcagtctaccacttctgattatcagtgggatggtagccgtaatcagccccatatcgatgatgaatggtctgggttaaatggtttgtcttctgctgatcctagctcagactggaatgcaccagcagaagagtgggggaactgggtagatgaagatagagcttcacttctgaagtcccaggagccgatttctaatgatcaaaaggattcagatgatgataaggaaaaaggagaaggagctcttccaactggaaaatctaaaaagaaaaaaaagaaaaagaagaagcaaggtgaagataactctatcacccaggacacagaagacctagaaaaggacactagagaagagcttccagtgaatacctcgaaagcccgtccaaaacaggagaaagcttgttccctgaagaccatgagcactagtgatccagttgaagtactcatcaaaaatagccagcctatcaagactcttccacctgctatctctgccgagccatctgttactttatcaaagggtgactctgacaagagctcttcccaagtgccaccgatgttacaagacacagacaaacccaagtcaaatgctaagcaaaacagtgtgcctccctcacagaccaagtctgaaactaattgggaatctccaaaacaaataaaaaagaagaaaaaggccagacgggaaacgtgaatttttttcctaaattggacatgtgtttacaaacactgtcttgaagattatgctgtttatgcaataatttgtgaacatgtacagagttttatataaatttaaaccaatttttaaaacaaaactgaacacaaccaccataaaatggaatcaaagggaaagttaatttatgaaat

SEQ ID NO: 3250 - DNA, 1946 bp, Rattus norvegicus
  Genbank Accession No. NM_133418
ccggggtcgggccaggtcgctgctgctctggccatggctgaggcacgcacgtctcgctggtactttggagggctggcttcctgcggagctgcctgctgcacgcaccctctagacctgctcaaggtgcatttgcagacccaacaggaggtgaagcttcgaatgactggaatggcactgcaggtggtgcgaaccgatggcttcctggcactctacaatggcctgagtgcctcgctgtgcaggcagatgacctactccctgacccggttcgctatctacgagaccatgcgggactacatgaccaaggacagccaggggcctctccccttctacagcaaggtgttgctgggcggcatcagtggtttaactggaggcttcgtggggaccccagcagatttggtcaatgtcaggatgcagaatgacatgaagctgcctctgagccagcgccgcaactactctcacgccctggatggtctgtaccgtgtagcccgtgaagaaggcctgaagaagctcttctctggagcaactatggcatccagccgtggggccctcgtcactgtgggccagctgtcctgctacgaccaggccaagcagctggttctcagtactgggtacctgagtgacaacattttcacccacttcctctccagtttcattgcgggcggatgtgccacatttctctgccagcccctggacgtgctgaagactcgcttgatgaactccaagggcgagtatcagggtgttttccattgtgccgtggagacagcaaagcttggaccacaggcctttttcaagggtctcgttcctgcgggcgtccgtctcgtcccccacaccgtgcttaccttcatgttcctggagcagctgcggaagcacttcggtatcaaagtggcaacctgacaccgccagggacacctgggctgcgctcagtcgctgtgctgagccccttggaagagtaggaagggagtgggctcccttcctccttggcctgggcccgtgctgatccccagaagattcctgttcttcccacccttgggctgctggctacgccttccgaccctgccttggccccactgaagtggcacctctgccctactggctcccaggctctccccactgggacgtcccatcttcctacccgatgattcactcagaagaggtctggcctggctggtgtcactgtccccacctccctggctgctaccctgccctgcctgtcaagcccggagaagctgagtacacttcctgctcttgctggcccactgaacagcttccacccaggacttgggtagtgtggcagggtacagcccctggcagcttctgcttaccaaatgactagagcacgcacgcacacacatacacacatgcacttacgtcacaagagggaccaccgtgcagtgttctggaaggtagtgccttcaggagagggaacagggcagcagcacagatcaccagcaaacgccatgaccgcggagtccggagaaagtacctggggttccctgtgcacctcccgtgctcagccttggctgctttaagagtcagtttttgcggaaccctcctactcagcagccactaccatcatcaggaactggctgtgtccctcatacacctgtgccctcccttgcctggcttcccccagggccaggggctcatgctggagctggggctatgatggattcattttatgtgtcctcctaggacctgttttcccgtatggcaggggtcacccctcaccatccctcagggttcaaagcagcctgttttccctcaaattggggttgtgtgtatatcaacgtgaggttgggccctgtgcccgtttgcctcccctcagcaccaggccctcacccaggaggtgcgggaggtggcagtgggcccaggggcactgcctacatctctcttcaggatctaataaaccaagtggccaaaaaaaaaaaaaaaaaaaaaaaaaaaaa

SEQ ID NO: 3251 - DNA, 1902 bp, Rattus norvegicus
  Genbank Accession No. NM_133586
tagcccgacgaactgagaactggccatggcacggaaacaaccacatagctggctgaatgctgtgctctttgggctcctgcttattcttatccatgtgtggggtcaggactcaccagagtccagctccatcaggaccacacacacgggccaggtccgaggaaagcttgaccacgtgagggacactaaagctggtgtccacaccttcctgggaattccctttgccaaggctcctgtaggaccgctgcgctttgcacctcctgaggaccctgagccatggagtggtgtgagagatgggacctcacatccggccatgtgtctgcaaaatattgatatgctggatgaagtaggcctgacagatatgaaaatgatactgtcttccattcctatgtctgaggactgcctgtatctcaacatctatacaccagcccatgcccatgagggctctaacctgcctgtgatggtgtgcatccacggaggtgcactggttataggaatggcttccatgtgtgatggatctctattggcagtcaatgaggacttggtggttgtcgctatccagtatcgtctgggtgtcctgggctttttcagcactggagatgagcatgccagaggcaactggggatacctggaccaagtggctgccctgcgatgggtccagcagaatatcgcccattttggaggcaaccctaaccgggtcactatttttggcgtgtctgcaggtggcacaagtgtgtcttcacatgttatatcccccatgtctcaagggctcttccatggtgccatcatggagagtggagtggccctgctgcctgaccttatctctgaaacctctgagacggtctccactacagtggccaagctctctggatgtgaggccacggactcagagaccctggtgcgctgcctgagagccaagagtggagcagagattctggtcattaacaaggtcttcaagatgattcccgctgtggtggatggagagttcctacccaggcatcccaaagagctgttggcatctgaggattttcgccctgtccccagcatcattggtgttaacactgatgagtactgttgcaccattcctatggtcatgggcactgctcaaataataaaggagctatccagagagaacctgcaggctgttctaaaggatacagcagcacaaatgatgcttcctcctgagtgtggtgacctgctaatggaagagtacatggggaatactgatgatccccagaccctacaaatacagtacgctgagatgatgggagacttcctgtttgtgatccctgcactccaagttgcacactttcaacgttcccatgcccctgtctacttctatgagttccaacatgcacccagctatttcaagaatgtcaggccaccccacgtgaaggctgaccatgctgatgaggttccttttgtctttgggtccttcttctggggcataaaagttgacttcactgaggaggagaagctgctgagtaggcggatgatgaagtactgggccaattttgcaagacacgggaaccccaacagcgagggtctaccctactggcctgtgttggaccacgacgagcagtacctgcagttggacacccagcctgctgtggaccgagccctgaaggccagaaggctgcagttctggaccaagactctgccccagaagatccaggagctaaatggagctcagaaaaaccatgcagagctgtagtgtctggtgaaaggaacagagtgtgggagtgagggcaggtgggatcattctgagtttcaaagtctaattttctgttccaacacgcagaatcctttccaaccccaatattttccctttctgacatgaatgagaagccctccgtgtgttactctttattcttctgggcaaaatttaattggactcaataaaga

SEQ ID NO: 3252 - DNA, 883 bp, Rattus norvegicus
  Genbank Accession No. NM_134349
gctagctgtcctcctgggattcagtcatttaaagattgagaccaagattgaaagcatggctgacctcaagcagctcatggacaacgaggtgttgatggcctttacctcctatgcaacgatcattcttgccaagatgatgttcctgagctccgcgactgcattccagaggctaaccaacaaggtttttgccaacccggaagactgtgctggcttcggcaagggggagaatgccaagaagttccttcggactgacgagaaggtggaacgcgtgcgaagagcccacctgaatgaccttgaaaacatcgttccctttctcggtatcggcctcctgtactccctgagcggaccggatctctctacagccctcattcacttcagaatctttgtgggcgctcggatctaccacaccattgcttacttgactccccttcctcagccaaacaggggcttggcattttttgttggctacggagttactttgtcaatggcttacaggctgctcaggagcagactgtacttgtaaagagatttgtgaccgtcaccctctgattgatttaaaaaaataaaggattctatatttctagtgtattaaaaaactttctaaggttttatgtatgaaaggagcagagaaatcaggaatcagggaaaattctgtttgaagactaccatccacaggctctacccttttgtacctgggttagacatttaacatgaccggccttagctatgctgtctaactcctaaagtactttgtcctaagtcttgagtgccttataaattgtaacattccttctacatttcctgtggtgcatctataaaagagtgctcacacctgtgtgaagcctgggtttcattggcacctgaattaaaaacattacaaatg

SEQ ID NO: 3253 - DNA, 1330 bp, Rattus norvegicus
  Genbank Accession No. NM_134410
gggttagtttaacatgggttcctccagctccaccgctctggctcgccttggactccccgggcagccgcggtccacctggctcggcgtcgccgcgctgggactggccgcagtggcgctggggaccgtggcctggcgtcgcgcgcgtccccggcggcgccggcagctgcagcaagtgggcacggtgtcgaaggtttggatctacccgatcaagtcctgcaagggggtgtcggtgtgcgagactgagtgcaccgacatggggctgcgctgcggcaaagtgcgcgacaggttttggatggtggttaaggaagatggtcacatgatcactgcccgccaggagcctcgccttgtgctggtcaccatcaccttggagaacaattacctgatgctcgaagctccaggcatggagccgatagttctgcctatcaagctgccctcttcgaataagatccacgactgcaggttgtttggcctcgacattaaaggcagggattgtggcgatgaggtggcccggtggttcaccagctacctaaagacgcaagcctacaggttggttcagtttgataccaaaatgaaaggaaggacaacaaagaaactctacccgtcggagagctaccttcagaactatgaggtcgcctacccagactgcagccctatccacctgatttctgaagcctccttagtggatctcaacaccaggctgcagaagaaagtgaagatggagtatttcaggccgaacatcgtggtgtcaggctgcgaggctttcgaggaggacacctgggatgagctcttgattggtgacgtagagatgaagagggtgttgagctgccccaggtgcgtgttgactacagtggacccagacaccggcatcatagacaggaaagagccgctggagaccctgaagagctatcgcctgtgtgatccttctgtgaagagtttataccagtcgtctccactctttgggatgtatttctcagtggaaaaaattggaagcctgagagtgggtgaccctgtgtatcggatggtggattagtggatcccgtggactgactcggtttggattattcacaactgacagtctgagtaacagagtgatggggaatcttgtcatttactcggcttccctgggagacgacgcatctgcaagtcctcacggccatcttcctggaaatggatctctgttcttcctctggagctgcacatgcccgagttcattcaagaaagctaccagaggtggtttgggaatgtgacggtgtataaattttagataatgaggttttaaaaaattaaacggaattgttactcccacggttaaaaaaaaaaaaaaaaaaaa

SEQ ID NO: 3254 - DNA, 1178 bp, Rattus norvegicus
  Genbank Accession No. NM_138549
agaagggacgcacgcatagagaggggcggagccggagccctggagtgctgctccttgtgtgtgtggggctgggtggtggttggtgcggcagggcggctactcagctgcagcagtgcaggtgccatcctgtggaagaaccatgaagcactacgaggtggagattcgggatgcaaagacgagggagaagctgtgcttcctggacaaggtagagcctcaggccaccatttctgaaatcaagacccttttcaccaagacacacccgcagtggtatcctgcccgccagtccctccgcctggaccccaaggggaagtccctgaaagatgaagatgtgttgcagaagcttcctgtgggcaccacagctacgctctacttccgggacctcggggcccagatcagctgggtgacggtcttcctgacggagtatgctgggccccttttcatctacctgctcttctacttccgggtgcccttcatttatggccgcaaatacgactttacatccagtcggcatactgtggtgcacctcgcctgcatgtgccactccttccactacatcaagcgcctgctggagactctcttcgtgcaccgattctctcacggaaccatgcccctgcgaaacatcttcaaaaactgcacctactactggggctttgctgcgtggatggcttattacatcaaccaccctctctacacaccccctacctatggagttcagcaggttaagctggcactggccatttttgtgatctgtcagcttgggaacttctctatccacatggctctccgggatcttcgaccagcggggtcgaaaaccaggaagatcccataccccaccaagaaccccttcacctggctgtttctgttggtgtcctgtcccaactacacttacgaggtcggctcctggattggctttgccattatgacacagtgtgtcccagtggccctcttctccctggtgggcttcacccagatgactatctgggccaagggcaagcatcgcagctacctgaaggagttccgtgactacccacccctgcgcatgcccataatccccttcctgctctgagcagctcctcccgagctcagcccagtaatgccctccacctactacccctgtcctgatgtggctggccaaggctctccagcagcaacaataaaacctgcttacccaaaaaaaa

SEQ ID NO: 3255 - DNA, 1893 bp, Rattus norvegicus
  Genbank Accession No. NM_138877
gggtgtagaacggtgccaccactgtcttcttcgccaccatgggggcccagctgagcacgttgagccgagtggtactctccccggtctggttcgtctacagcctcttcatgaagctgtttcagcgctcctcaccggccatcaccctcgagaaccccgacatcaagtaccctctgcggctcatcgacaaggagattatcagccacgacactcggcgcttccgatttgcactcccttcgccccagcacatcctgggccttcctatcggccagcacatctacctctccaccaggatcgatggcaacttggtcattcgtccctacacccctgtgtctagtgatgatgacaagggctttgtggacttggtggtcaaggtttacttcaaggacacgcatcccaagtttccagctggagggaaaatgtctcagtacctggaaaacatgaatattggagacaccattgaattccggggccccaatgggctactggtctaccagggcaaagggaagttcgccatccgtgcagacaagaagtccaaccctgttgtcaggacggtgaagtctgtaggcatgattgcaggagggacaggcatcaccccaatgctgcaggtgatccgagccgtcttgaaggacccgaacgaccacactgtgtgctatctgctcttcgccaaccagtccgagaaagacatcctgctgcggcctgagctggaggaactgaggaacgaacattcttctcgcttcaagctctggtacacagtggacaaagcccccgatgcctgggactatagccaaggcttcgtgaatgaggagatgatcagggaccatcttccacctcctggggaggagacactgatactgatgtgtggacccccaccgatgatccagtttgcctgtttgccaaacctggagcgtgtgggccatcccaaggagcgatgcttcaccttctgatggctggatgctggccactcccatgcctgctgctcacgcactcaccacaaccaccttccaccccttccttccccactactgtcctttaccctgacatatgcccacatccatgctggggcctgggttcagcctggcctgcccagccctggtcatccagctgtactggcccctgaggggcccctttgggagcaggcctgtgtatcaggtggcttctgttgaccactttctgaataggcttctgtctggtactaactggccattaccagagatggtccatgaccacccctttatacacacacacatacacatacagagacagagagacagagagacagagatagacagagatagacagagagacagatacagacatagagacagacagagacagagagagaggagtcagagagctgttagtaccatgtctacccgttaccatggaccgcaatgtgtagtaaggaaatgaaaggtaaacagttatctacagtcctaggaaccatgcctgtcacctaaccacctactgccttaggctatggcctggtctgtgcccctaaacactacattagacagtgacacccagaggttctcttaggagggtgtctggcagtgacaggccagcccccacttgctggccaggagttccttgggtcagcacgtggacccttccaaaaccccacacactgcccctcccctccatgatgccttgagcaccctaagttgtcagcccaacagagtttggtagaccttggggtacctggcttgtttctccatcccatacctccctcccatctggttcccagcctggggggttctgagcagagcctcttttctcggagacagacccggtgcctggcgctgccttcagcagacagcagacagcctcctgcacactggctttttttagtcatttatgggcaaaatgagttaaaataaaactttgcaaatcctg

SEQ ID NO: 3256 - DNA, 1621 bp, Rattus norvegicus
  Genbank Accession No. NM_138899
gtggatcgcccgggagaactgggcccagggctcaggtggagctgccgatgccccgggctgaaaggtgagaccacgctggtgaggctgggacaagaccttgcacctccagacctgggccgagaccacaaggggagccgccaagatgccagaggaaaatatcttcctgttcgtgcctaatcttattggttatgcccggattgttttcgccatcatttccttctactttatgccctgctgccccttcacggcctcctccttctatctactcagcggacttctagacgctttcgatggacacgcagctcgagcccttaatcaaggaacccgatttggggccatgctcgacatgctgacggaccgttgcgccaccatgtgtctcttggtcaacctggccctgctctaccctcgggccactcttctgttccagctcagcatgagcctggacgtggccagtcactggctgcatctgcacagttctgtggtgcgaggcagtgagagccacaagatgattgacctgtctgggaaccctgtgcttcgaatctactatacttccaggcctgctctgttcaccctgtgtgctggaaatgaactcttctactgcctcctgtacctgttcaatttctccgagggaccactagtcggctctgtggggcttttccgaatgggcctctggatcacagctcccattgccctgctcaagtccatcattagtgtcatccacctcgtcacggctgcaaggaacatggctgccctcgatgcagcagaccgcgccaagaagaaatgatcctctcccatccccagctgcccacctgccctgggtatctactgtgccacatggctcctctcctcctaagaggtcccagtgtcatgtctttctcatgtgttctctaacctgctgggattgggggtcaccctctgtttggtgttgtcactgtctttttactcctgataactagacccaacccgtgaccccaaggacctggcactgcaaagcaggaagggtgctcaggaggcccactcatccagccggtgctccaggaggcctgtctgaagactgggtgttgccacatatcctgctggatcagcctggggtctggcctgagactttgggaacttatacgggcaaaggagtcaggctgatgggccaagaaggctggggtaccaggccagggagggaaggggccaagggccaactagatctttcccttaggcaagctcctctatcctgtcctgctctggaaacctccataataaaggggggcaccttcactctttttggatttgtttactttgggacactcttagatgatggcctagggttcaaaggagctgggtaaaaaaaaaagaaatccacctggatgcttttcccacaaaggtggttggctcctccctgtcattccagtgacctcagagaggcctcgaggttcacaagcgttgtcctgcccacctgctctatgtcctggctggccactttcactgtaaccttgatgtttttgaccctcatgagaatgtaagcttcacaagagcagatttagatctttctcgtctctgcctggagtgaaaagtagcctggcatgtggtaactgcttaataaatattcatggaaagatgaaaaaaatac

SEQ ID NO: 3257 - DNA, 2908 bp, Rattus norvegicus
  Genbank Accession No. NM_138900
ggaggtatcgaggaagagagaacagggaggtggggcggaggttcctcgcagagcctctggagccgcaggggcttcacggcatgaccagaagcaggagaggaggctgacccacttgttcccatcagctcctgaaggtgacactgagccctgggtggcccctcactgccaaagcagtcacctgtatttgtcagataaagacggccagcccggctgccctttacctccaagtcagagatccagagagccatgggcaaatcgccagagatgtggtgctttgtcttcttttctcttttggcatcgttttctgctgagcctaccatgtatggggagatcctgtcccctaattatccccaggcgtaccccaatgaggtcgtgaaaacttgggacatagaagtcccagaggggtttgggattcacctttacttcacccatctggacatggagctgtcagagaactgtgcatacgactcagtgcagataatctcaggaggtatcgaggaagagagactctgtggccagaggtccagcaagagtcccaactcccccactgtagaagagtttcaattcccatacaataggctccaggtggtctttacgtcagacttctccaacgaggaacggtttactggctttgcagcgtattactcagccgtagatgtaaatgaatgcacagactttacagatgtcccttgcagccacttctgcaataacttcattggtggatacttctgctcctgccccccagaatacttcctccacgatgacatgaggacttgtggggtcaactgtagtggggatgtattcactgccttgattggggagatcgcaagtcccaattatcccaacccatacccggagaactcaaggtgtgaataccagattcggctgcaggagggcttccgactggtgttgactatccggagagaagattttgatgtggaaccagcggactcagaggggaactgccacgacagtttgacttttgctgcaaaaaaccaacagtttggtccttactgtggcaatggattccctggacctctaactattaaaacccagagcaatactcttgatattgtctttcaaactgacctaacggggcaaaataaaggctggaagcttcgttaccatggagatcccatcccctgtcccaaagaaatcagtgctaattctatctgggagcccgaaaaggcaaaatacgtgttcaaagatgtcgtgaagataacctgtgtggatggattcgaagttgtggagggaaatgttggctcaacatcattctattccacttgtcaaagcaacggacagtggagcaattccaggctagagtgtcaacctgtggactgtggtgttccagaacccattgagaatggtaaagttgaagacccagaagacactgtattcggctccgtcatccactacacgtgcgaagagccatattactacatggaacaggaagaaggcggagagtatcactgtgctgctaatgggagctgggtgaatgaccagctgggtgtcgagcttccaaaatgtattccagtctgtggagtacccaccgagccctttaaagtacagcagaggatatttggaggatactctacaaagattcaaagttttccttggcaggtctactttgagtccccccgaggtggcggggctcttatcgatgagtactgggtgctgacggccgctcacgttgtggagggaaactctgacccagtgatgtatgtcgggtccacacttctgaaaatagagcggttgagaaatgcccagaggctcatcactgaacgtgtgattattcatcccagctggaaacaagaggacgacctgaatacacggacaaattttgacaatgacattgccctggtgcagctcaaagaccctgtgaaaatgggacccactgttgcccccatctgcctgccagaaaccttctcagactacaacccctcagaggttgacctggggctgatctctgggtggggccgaacagagattagaaccaatgttattcaactcagaggggcgaagttacccataacatctttagaaaagtgccagcaggtgaaagtggaaaacccgaaagcgaggtcaaacgactatgttttcactgacaacatgatctgtgctggggaaaagggtgtggacagctgtgaaggtgacagcggaggggcttttgctctgccggtccccaatgtcaaggaccccaaattctatgtggctggcctggtgtcctgggggaaaaagtgtgggacctatgggatctacacaaaggtaaagaactacgtggactggatcctgaaaactatgcaggagaatagtgggcccaagaaggactgatccgtagtaacaacacccctccaggactagcaaggtcatttttctcagatcctgggacggtcccattatttcaaaatgatggagagagggtgtgggagcatggttaacgttgaacatgattgtcaagaagcctgcttggaggcagagttgatcactgagccgtgttggttattcagttgctattgctaacaacatgcggaagcctttctgtcttgcttcatcccacagggatatcttaaacgatttccccctcatttaacccgcttgaaatccttattgcttacagtaaagcatgtttccaatctggttctggctgctcgagagcccagaaggagagggaaatttgagggtattttgtcatggaattcaggcatcgacaggttgtctgaaacactatgcagtcagggaacacagccttttttctaagtgagatttacccaatagctggaagtcagaattgactaccttagctttcctttgtgagttgtttcaatatgttccctagaaattagttttcttataatcctcctttgtatcatacaatgtaatgacttaataaaagagaaattgaacattg

SEQ ID NO: 3258 - DNA, 1632 bp, Rattus norvegicus
  Genbank Accession No. NM_138911
atggagcaggtgaatgagctaaaggagaagggcaataaggccctgagtgctgggaacattgatgatgccttacagtgctactctgaggcaattaaactagatcctcagaaccatgtgctctatagcaatcgctctgcagcctatgccaagaaaggagactaccagaaggcgtatgaggacggttgcaagactgttgacctgaagcctgactggggcaagggttattcaagaaaagcagcagcccttgagttcctaaaccggtttgaagaagccaaacgaacctatgaagaaggtttaaaacatgaagccaataatctacagcttaaggaaggcttgcagaacatggaggccaggttggcagagaggaaatttatgaatcctttcaacttgcctaatctgtaccagaagttagagaatgatcccaggacaaggacactgctcagtgaccccacctacagggaactcatagagcaactacagaacaagccttcagacctgggcacgaaactccaagatccccgggtcatgactactctcagtgtcctccttggagttgatctgggcagtatggatgaagaggaagaggcagcaacacccccacctccaccccctcctaaaaaggaggccaagccagaaccaatggaagaagatcttccagagaataagaaacaggctctgaaagaaaaggagctgggaaatgatgcctacaagaagaaagattttgacaaggccctgaagcattatgacaaggccaaggagctggaccctaccaatatgacttacataactaatcaagcagctgtgcactttgagaagggcgactacaacaaatgccgggagctctgtgagaaggccattgaagtaggcagagagaaccgagaggactaccgtcagatcgccaaagcttatgctcgaattggcaattcctatttcaaagaagaaaggtacaaggatgctatccatttctacaacaagtctctggcagagcaccgaaccccagatgtgctcaagaagtgccagcaggcagagaaaattctgaaggaacaagagcgactggcttatatcaaccctgatttggctttggaggaaaagaataagggcaatgagtgcttccagaaaggggactacccccaggccatgaagcactatacagaagccattaaaaggaacccaagagatgccaaactatacagcaaccgagccgcctgctacaccaagctcctggagtttcagctggcactcaaggactgtgaagagtgcatccagctagagccaaccttcatcaagggttatacacggaaagcagctgccctggaagccatgaaggactatacaaaagccatggatgtgtaccagaaggcattagacctggactccagctgtaaggaagcagcagatggttaccaacgctgtatgatggcacagtacaacagacatgatagccctgaggatgtgaaacggcgggccatggctgaccctgaggtacagcagataatgagtgacccagccatgaggctcatcctggagcagatgcaaaaggacccccaagctctgagcgaacacttaaagaatcctgtaatagcacagaagatccagaagctgatggatgtgggtctcatcgcaattcggtga

SEQ ID NO: 3259 - DNA, 1046 bp, Rattus norvegicus
  Genbank Accession No. NM_139081
tttgcgaacggcgagcagcggcggcggcgcgggaagtgcagcggaggtttttgctggtttcggaccccagcggccggatggtgaaatcctccctgcagcggatcctcaacagccactgcttcgccagagagaaagaaggggacaaacgcagcgccacgcttcacgccagccgcaccatgccgcttcttagtcagcacagccgcggcggctgcagcagcgagagttctagggttgcccttcattgctgtagtaacctgggtccggggcctcggtggtgctcctgatgtccctcacccacccctgaagatcccaggtgggcgagggaacagtcagcgggatcacagtctttcagctagcatcctgtactccgacgagcggctgaatgtgacagaggagccgacgtctaacgacaagaccagggtcctgagcatccagtgcacgctcacggaggccaagcaggtcacctggagggcggtgtggaatggtggtggcctctacatcgagctcccagctgggcctctgccagaaggcagcaaggacagttttgcagctctactagagttcgcagaggagcagctccgggccgaccacgttttcatctgcttccccaagaaccgtgaggacagagccgccctactccgaaccttcagctttcttggctttgagattgtgagacccgggcatcccctcgtccccaagagacccgacgcttgcttcatggtctacacgctggagagagaggacccgggtgaggaggactaggtgccagccctgcccagtgtccctgcaccctctcccgggtttgtccacatgtcatgattgtgcagaataaacgctcactccattagcggggtgcttcttcgagctgaatgctgtgtttgtcacactcaagtggtggctttaattctaaataaaggtttctattttacttttttattgctgtttaagatggtcaggtgacctgttttagagcagcctcctttgaagtctggaaaaatggtgtcacctcccctggctcaaacctaataaataaagtgatctcgttc

SEQ ID NO: 3260 - DNA, 1133 bp, Rattus norvegicus
  Genbank Accession No. NM_139089
cctcggctgagctgcattccaatcccagctacatccggagcccagctacattcgagcccagccacatcccgagccaaccttccagaagcaccatgaacccaagtgctgctgtcgttctctgcctcgtgctgctgagtctgagtgggactcaagggatccctctcgcaagaacggtgcgctgcacctgcatcgacttccatgaacagacgctgagacccagggccataggaaaacttgaaatcattcctgcaagtctatcctgtccgcatgttgagatcattgccacaatgaagaagaacaatgagaagaggtgtctgaatccggaatctgaggccatcaagagcttattgaaagcggtgagccaaagaaggtcaaaaagagctccgtaactagagagaagccactcgccacagtgctgagaccgatggacagcagagagacggtctctccacctccctttacccagtgtgcggctagtcctaactgtccctgtttctcctgaccatggtcccatcagctggtactcccactacagcgtgatggacaaggcctggtcctgagacaaaagtaactccagcagcaaggcttcccaattctctaagagctggtccgaatcttccctcaggcagctatgacggctctcctagctctgttccgtaagctatgtgcaggtactaatctcttcagcatgtgccatgccccagcctgctccacacaccctccttctccctagctctaagctcatcagttctgagttcacctgagctcctttatttcaaatgcagtccaggtgagatggcaaatcaagtttgtcagaacaaacttaccaccaccttcccaagggaatttcataactcagaatactcacaggaacctagacatgcatgtttaaatattatttaatgaccgactgtacaaagtggaactcctagatgtattttttgtacgattttcattgtatatgtaagaacttgtgtggttaagtatgtatcaatgggtagttaaagtttacataggcaaatgctttgaatgctacatattacaagatgtgttggatggttttcaaaataaaatgtactgtattgaatgtagtatgagacaaaaaagtaataaagtaataataactgacatga

SEQ ID NO: 3261 - DNA, 1664 bp, Rattus norvegicus
  Genbank Accession No. NM_139105
agctagggccatgttttggggctcccgtctgcctttgagagtctttttcgggtcccttcctggccttcttaatacgtggcagagcgtctggaccagaagactacactgtgcaaccaccatgagtcttgacatccagtgtgagcagctgagtgatgcccggtggacagagctccttcccctgatccaacaataccaagtggtcaggctggatgactgtggcctcactgaagtgcggtgcaaagacatcaggtcagcgatccaggccaaccctgccctgacagagctcagcctacgcaccaatgaactgggtgatgctggtgtgggtctggtgctccagggcctgcagaatcccacttgtaagatccagaagctgagccttcagaactgcagcttgacggaagctggctgtggggtcctgcctgatgtgctgcgctctttgtctaccctgcgtgaactacatctcaatgacaaccctctgggggatgaaggcctgaagctgctctgtgaaggactccgggacccccagtgccgtcttgagaagcttcagttggaatactgtaacctcacagctaccagctgcgagcccctggcctcagtgctcagggtgaaacctgactttaaagagctagtattgagcaacaatgacttccatgaggctggtatccacactctgtgccagggcctgaaggattctgcctgtcaactggagtcactcaaactggagaactgtggtatcacatcagccaactgcaaggatctgtgtgatgttgtggcctccaaagcctcactgcaagaactggacttgggcagcaacaagctgggcaacacaggcattgcagcactgtgctcaggactgctgcttcccagctgcaggctgaggactctgtggctctgggactgtgatgtcactgcagaaggctgcaaggacctgtgccgtgtcctcagagccaagcagagcctgaaggaactcagcctagctggcaatgagctgaaggatgagggtgcccaactgctgtgtgagagcctgttagagcctggctgtcagctggagtcactgtgggtaaagacctgtagcctcacagctgcctcttgtccccacttctgctcggtgttgaccaaaaacagttctctgtttgagttgcaaatgagcagcaacccgctgggagactcgggagtcgtggagctttgcaaggccctgggctatccggacacagtgctgcgtgtgctttggctgggagactgtgatgtgacagacagtggctgcagcagccttgccactgtcctgctggccaaccgcagcttgagggaactggacctcagtaacaactgcatgggggacaacggtgtcctacaactgctggagagcctcaaacagcccagctgcatccttcagcagcttgtcctgtatgacatttactggacggatgaggtggaagaccagcttcgggccctggaggaggaaaggccatccctgaggatcatttcctgagatgtacacctctggacacaagatattaatccagccccagaggcagcccaccagatctctggctttggttgtcctagggttggactggcgataagcattgggatcttacttcagtagaaaactttaagacactttataactattaaaatactttgttggcaaaaaaaaaaaaaaa

SEQ ID NO: 3262 - DNA, 1775 bp, Rattus norvegicus
  Genbank Accession No. NM_139113
ggttggcctggaaccggcccgaccagttcctgcctggcgcgcggaccggccgcaggaagttgccgcaaaactttttttgggggggtgcgaccggagccccccgagcgcgcgggctgcatgcgcccgggatagccgggttcccctcgggtcgccaggcgtgcccagagggacggactcgtccggggcgccccggcccgctgtccccggggctatggccatggtgaccggtggctggggcggccccggaggcgacacgaacggcgtggacaaggcaggtgggagctacccacgcgcgaccgaggacgactcggcctcgcctcccggggcgactagcgacgcggagccgggtgacgaggagcgtccggggctgcaggtggactgcgtggtgtgcggggacaagtccagcggcaagcactacggcgtgttcacctgcgagggctgcaagagtttcttcaagcgcacgatccgccgcaatctcagctacacctgccggtccaaccgtgactgtcagattgatcagcatcaccggaaccagtgtcagtactgtcgcctcaagaagtgcttccgggtgggcatgcgcaaggaggcggtgcagccgggcccgatcccgcacgctctcccgggtcccgcggcctgcagccctccgggcgcggcgggagtcgagccgttcgcggggccgccggtgtccgagctgatcgcgcagctgctgcgcgctgagccctaccccgcggctgggcgctttggtggcggcggcgccgtgctgggcatcgacaacgtgtgcgagctggcggcgcgcctactgttcagcacggtcgagtgggcccgccacgcgcccttcttcccggagctgccggccgccgaccaggtgggcctgctgcggctcagctggagcgagctgttcgtgctgaacgcggcgcaggcgccggtaccgctgcacacggcaccgctgctggctgccgcggggctgcacgccggccccatggctgcggagcgcgcggtggccttcatggaccaggtgcgtgccttccaggagcaggtggacaagctgggccgcctgcaggtggatgctgccgagtacggctgcctcaaggccatcgcgctcttcacgcctgatgcctgtggcctttctgacccagcccatgttgagagcctgcaggagaaggcacaggtggccctcaccgagtatgtccgtgcccagtacccatcacagccccagcgctttggacgcctgctgctgcggctgccggccctgcgtgctgtgcctgcatccctcatctcccagcttttcttcatgcgcctggtgggcaagacacccatcgagacgctcatccgggacatgcttctgtcagggagcacctttaactggccctatggctcgggctagtgatggtcctttcctaggacacatggaagctggggccttgtagggaccatggggaccagggccccagcttctcttctgagactgacttctttttttaaagactgtgaaatgtttggtttggtttgttttttaaataatcatgaaaccaaaaagattcggatctcccaggctccagctttgtcctggcagccttcggcagggtggggctgagggtctggagccagcatgctagtgcctctggtgtcctgggtatctggaagggccactgcagctgggcaggggtgctatgggccaggagggtcccctggacacatggcccatggagggaaccatgaaatcatggccaacaataaagatattcccatccttaaaaaaaaaaaaaaaaaaaaaa

SEQ ID NO: 3263 - DNA, 1742 bp, Rattus norvegicus
  Genbank Accession No. NM_153308
gaattcggcaggcgcaggccaagcaactcggccgtccagcgggtgcaggtgcggaccaccatcaccgcgcgcgcttgcagccaccgtagacaccggtctctggctccctagagcggggcagccacagaacccgaggccatgtaccatgaaaagagtttcttggtctctggggacagctatcctcccccaaaccctggctatcctgtggggccacaagcccctatgcctccctatgttcagcctccctaccctggggccccatacccacaggccgctttccagccctctccctatggtcaaccagggtatccccatggtcccggtccctatcacaaggtggttacccctcaaggacctactcaaggaggctacccaccagggccattacccacagagccccttcccccctaacccctatggacagccaccacccttccaggaccctggctcacctcagcatgggaactaccaggaggaagggcctccatcctactatgacaaccaggacttcccctcggtcaactgggacaagagcattcgccaggccttcatccgaaaggtgttcctggtgctgaccctgcagctgtcggtaaccctgtcgactgtggccattttcacttttgtcggggaggtgaagggctttgtccgggccaatgtctggacctactatgtctcctacgccatcttcttcatctccctcattgtcctcagctgttgcggggacttccggaaaaagcatccctggaaccttgttgccctgtcgatcctgaccatcagtttgtcctacatggtgggcatgatagccagtttttacaacacggaggcggtcatcatggccgtgggcatcaccacagctgtctgcttcacggtggtcatcttctccatgcagacccgctacgacttcacctcgtgcatgggcgtgctcctggtgagcgtggtggtgctcttcatcttcgccatactctgcatcttcatccggaaccgcatcctggagatcgtgtacgcctcgctgggcgctctgctcttcacctgcttcctggctgtggacacccagctgctcctggggaacaagcaactgtccctgagcccagaagaatatgtgtttgcggccctgaatctgtacacggacatcatcaacatcttcctatacattctcaccatcattggccgtagccaaggaataggacaagccccagctcaggtggcatggtgggctcagacccatgcccctgccatgacattgccatctgtgcttccccctctctggttcccagccatggcctggagcagagggagcccctctcgccctcgtgtatgtacactgcaaatacttaacgttcggaccctctctgccacagcatggaaacctttatcccttttgcccttgccaaggggtgacagggctgcatttctgtgccaccttctgtctactcattgttgcatgagccctgtctgccagcccatcccggggtctgggatcaacaccaggtcccaggggagaaggatcataccaagaggtgagggtgcacgtcttccctcctgtcccagctcccctggcatagagtccccatgtcccctcctcaccctgccttctgaggggcttgcagggtggggcctcgttcttgttctgggccccgagaccaagagagggtggcatgtttcaggggagaggctctcttgtgtgctgccattgtaaaatgccaataaaagggtatcttctgctaaaaaaaaaaaccgaattc

SEQ ID NO: 3264 - DNA, 1716 bp, Rattus norvegicus
  Genbank Accession No. NM_153314
gaaagcttactagataaaaggtcaagcagtgacagaaaggaacacactgtgaacagaaggtttttgatttttaagatgcctgggaagtggatttctgctcttctgctgctacagataagttgctgtttccaatctgggaactgtgggaaggtgttggtgtggccgatggaattcagccactggatgaatataaaaacaatactggatgaacttgtacagaggggccatgaagtcagtgttctgaaaccttcggcttactatgttcttgatccgaaaaaatcgccagatcttaagtttgaaactttccctacatctgtcagtaaagatgaactggaaaattatttcataaagcttgtggatgtgtggacttatgagttgcaaagagatacatgtttgtcttattctcctttactacaaaatatgatagatgaattttctgattactatctaagtctttgtaaagacaccgtttcaaacaagcagctcatggcaaaactacaggaatccaagtttgatgttcttttgtcagatcctgtggctgcctgtggggagctgatagccgaagtgctccacattccttttctgtacagtcttcgcttctctccaggctacaaaattgaaaagtccagtggaagatttatattacctccatcttatgtaccagtaattttgtcaggaatgggtggcccaatgacattcatagacagggtaaaaaatatgatatgtacgctttattttgacttttggttccatatgtttaatgccaagaaatgggatccattttacagtgagatttttggaaggcccaccacattagctgagacaatgggcaaagcagaaatgtggctcattagatcctactgggatttggaatttccccacccaacattaccaaatgttgactatattggaggactccaatgcagacctcctaaacccttgcccaaggatatggaagattttgtccagagctctggagagcatggcgtggtggtgttttctctggggtcaatggtcagcagcatgacagaagaaaaggccaatgcaattgcatgggcccttgcccagattccacaaaaggttctttggaaatttgatggcaaaaccccagcaaccttaggacccaataccagagtctacaagtggcttccccagaatgacctccttggtcatccaaaaaccaaagcctttgtaactcatggtggagccaatggtgtctatgaggccatctatcatggaatccctatggttggcattcctatgtttggagaacaacatgataacattgcccacatggtggccaaaggagcagctgttacactgaatatcaggacaatgtcaaagacagatttgttcaatgcactaaaggaaataataaacaatccattctataaaaaaaatgctgtgtggttgtcaaccattcaccatgaccaacctatgaagcccctggacaaggctgtcttctggattgagtttgtcatgcgccacaaaggggccaagcacctgagaccacttggacatgaccttccctggtaccagtaccactctctggatgtgattggattcctgctctcctgttcggcagtcattgcagtccttactgtaaaatgcttcttgtttatttaccgactctttgtgaagaaggaaaagaaaatgaagaatgagtagagctcatttacaatgcactacaggaatgaaatttcagccacattctaa

SEQ ID NO: 3265 - DNA, 419 bp, Rattus norvegicus
  Genbank Accession No. R46985
  misc_feature (1)..(419): n = a or c or g or t
ggcacgagcagccgnagccatnagcagnaangtctcacgcgacaccctgtncgaggnggtgcggnaagtcctgcacgggaaccagcgnangcgccgnangtttctggagacggtggagctgcagatcagcctgaagaactacgaccctcaganggacaaacgtttctcgggcaccgtcaggctcaagtccaccccacggcccangttctcggtgtgcgttctgggggancagcagnactgtgatgangncaaggccgntgatatcccccacatngtcatngaggggntcaagaagcttacaattatcaagaagtngggtcaagatggttggcttaagangtncggatggcctcttggggncctcttgagttctcttgatttaagcagnatccccaccgttttccttggggcccagngct

SEQ ID NO: 3266 - DNA, 413 bp, Rattus norvegicus
  Genbank Accession No. R47014
  misc_feature (1)..(413): n = a or c or g or t
ggnacgagtctgactgtcctgaagctctgtagaccaagctggcctcaaactcaaagacctgcctccctttgcctctgcctcccaagtgctggaagtaaaggcgtgcggtgtgcggcactactgcctggtttactttacaaggtcttaataattcctctagtatttgtagtttgtcagtaagatcattaaactaaataattttcagtaattttaaaatgtgatctgacggggttggggatctagctcagcggtagagcgcttgcctagcaagcacaaggccctgggttcggtccccagctccaaaaaaaaaaaanngaangaaaangaaaaaaaaaaaanaaaaactcgagggggggcccggtacccaattcgccctatagtgagtcgttttacaattcactggccgccgtttt

SEQ ID NO: 3267 - DNA, 376 bp, Rattus norvegicus
  Genbank Accession No. R47028
  misc_feature (1)..(376): n = a or c or g or t
ggcacgagcgctacaattacatttattattctacttctacttacagtacttgaatttgncgtagccttaattcaagcctatgtattcacccttctagtaagcctgtacctacatgataacacataatgacccaccagacccatgcataccatatagtaaacccaagcccatgaccactaacaggagncctatcagntcttctactcacatccggcttagnaatatgattccattacaactccacaatnctcctatcattagggctcctgacaaacatcctagctatatatcaatgatgacgagatatcatccggggaaggnacataccangggcaccacacccctattgtncagaaaggnctccgggtgcggaata

SEQ ID NO: 3268 - DNA, 264 bp, Rattus norvegicus
  Genbank Accession No. S35751
gatccagttctttgtgccatagcaaagaagtacaagcaaaccccagccctagttgcccttcgctaccagctgcagcgtggggttgtgcccctgatcaggagtttcaacgcgaagcggatcaaagagctaacacaggtttttgaattccagttggcttcagaggacatgaaagccctggatggcttgaacagaaatttcagatacaacaatgcaaaatattttgatgaccatcccaatcatccatttactgatgaatagtaacat

SEQ ID NO: 3269 - DNA, 954 bp, Rattus norvegicus
  Genbank Accession No. S46798
ccggaatacctttcctcacaggattctattcaaaagatctcatcatcgaagccatcaacacgtgtaacaccaacgcctgagccctaataatcactttaatcgccacatccataactgctgtgtacagcatacgcatcatctacttcgtcaccatgacaaaaccacgatactccccactaattactattaatgaaaacaacccaaacctcattaatccaatcaaacgcctagcattaggaagcatcctagcaggcttccttatctcactaaatattcctccaactaacattcaaattctcacaataccctgacatttaaaaataacagccctacttattacaatcctaggatttgccattgccctagaacttaacaatttaacactaaatctatcaataagcaaacccaccaaactatcatcattctcaacctccctaggctactacccaccaattataccccgaattattcctcaaaaaactctaaattctagctacaaattatccttaaacctactagacctaatctgactagaaaagacaatcccaaaatcaacctcaatcacccaaacccaactatctaaaataatatccaaccaaaaaggactaatcaaactatatttcctatcatttctcatcactatttcactaatttttatcttacacacacttaatcccgagtgatttcaataataataaaaatccccgcaaacatagaccacccagccaccactatcattcaagtagcacaactataaatagccgcaaccccaatccccccctccaacataaccccaacatcatcaatctcatacattaatcaatcgcctagactatcaaaatcaactaactccaccttattattcaaactaaacaagtagaacactaccaactccataaaaagccctaaaacaaaaaaactaaaaataaaccaattagaccctcaagtttccgg

SEQ ID NO: 3270 - DNA, 126 bp, Rattus norvegicus
  Genbank Accession No. S59892
gtgtttggatgattaaaatatgaaaaggaagattcttcctcttaattgcctttgtaatatgagaatgtattagtacagacttgtaaaatatatactgtataaaaattagccaatagttctttcttc

SEQ ID NO: 3271 - DNA, 436 bp, Rattus norvegicus
  Genbank Accession No. S66024
actttattttggactgtggtacggccaacaagaccactctgtatgcaaaagcccaacatggctgtaactggagatgaaactgatgaggagactgaccttgccccaagtcacatggctgctgccacaggtgacatgccaacttaccagatccgagctcctactactgctttgccacaaggtgtggtgatggctgcctcaccaggaagcctgcacagtccccagcaactagcagaagaagcaactcgcaagcgggagctgaggctgatgaaaaacagggaagctgctaaagaatgtcgacgtcgaaagaaagagtatgtcaagtgtcttgagagtcgagtcgcagtgctggaagttcagaacaagaagcttatagaggagcttgaaactttgaaagacatttgctctcccaaaacagattagtagaaatatttaacta

SEQ ID NO: 3272 - DNA, 195 bp, Rattus norvegicus
  Genbank Accession No. S69316
actctcactatgaatcctgtgtggagagggaatgtgacattttaaagttatttcttttgagagacttgttttggatgctcccccaagcctccctctcccctgcactgtaaaatgttgggattatgggtcacaggaagaagtggtttttttagttgaatttttttttttaacattcctcctgaatgtaaatttgta

SEQ ID NO: 3273 - DNA, 987 bp, Rattus norvegicus
  Genbank Accession No. S79304
gaattccctttcttcgaccccgctggaggtggagacccaattctttatcaacacctattctgattcttcggccacccagaagtgtacatcttaattcttccagggtttggaattatttcacatgtagttacctattactctggaaaaaaagaacccttcggatatataggtatggtatgagccataatatctattggcttcctaggatttattgtatgagcacatcacatattcacagtaggcctagatgtagacacccgagcctactttacatctgccactataattatcgcaattcctacaggcgtaaaagtattcagctgactcgctacactacatggaggaaatatcaaatgatcccccgccatattatgagccttagggtttatcttcttattcacagtagggggcctaacagggatcgtactatctaactcatcccttgacattgtacttcatgatacatactacgtagtagctcacttccactatgtcttatctataggagcagtattcgccatcatagcttgcttcgtccactgattcccactattctcaggctataccctaaatgacacatgagcaaaagcccactttgccattatatttgtaggtgtaaacataacattttttcctcaacacttcctaggattagcagggatacctcgtcgttactctgattatccagatgcttataccacatgaaatacagtctcctctataggctcattcatctcacttacggccgtccttgtaatgatcttcatgatttgagaagccttcgcatcaaaacgagaagtgctctcaatttcctactcttcaactaacctagaatgactgcatggatgccccccaccttaccacacattcgaagaaccttcctatgtaaaagttaaataagaaaggaaggattcgaaccccctacaactggtttcaagccaatttcataaccattatgtctttctcaataaaaaaaaaaaggaattc

SEQ ID NO: 3274 - DNA, 380 bp, Rattus norvegicus
  Genbank Accession No. S81025
gggacaccaagatagcattttggtacaaataagagacccgaggatggccagagacctcagatgtgtgtctctgccagtcgactgggctggtccctctcatttgttcagtctgaatgatagttctccttccttaccattcagacatctttccagatgcccagggtgaatgtcacgtttacccacaacctggctcggcactgggtgaaattctacaaggtgtttatcagtgtaaaaacggtcagcctttggagaggtttcttggacacgtcacccccaaagagtcggaactgtgcccagctccaaccttagtgactgtgggtcatagtcccagtgctgaaactgctgaagtgtgacatgggtaagagctttgctttagtcgg

SEQ ID NO: 3275 - DNA, 114 bp, Rattus norvegicus
  Genbank Accession No. T26357
ttaaataccaaattaaatgctggtttgttggttgtttttaaatgattgttacttcaataggcatcccctcttgacatatggagtcataataaaatgagatgatagtttaaaaaa

SEQ ID NO: 3276 - DNA, 811 bp, Rattus norvegicus
  Genbank Accession No. U00926
ggaattccgctgctgtcgctaagctaaagtcactgacgtttccgccaccatgctgcccgccgcattgcttcgtcacccaggtctgcgccgtctggtgctccaggcgcgtacgtacgcccaggccgccgcctcacctgcccccgccgctgggcctggacagatgtccttcaccttcgcctccccgacgcaggtgttctttgatggtgccaatgtccggcaagtggatgtgcctacgctgactggagcctttggcatcctggcatcccatgtccccacactacaggtcctacggcctgggctggtaatggttcatgcggaagatggcaccacaactaagtattttgtgagcagcggctccgtcactgtgaatgcggactcctctgtgcaattactagctgaagaagtcgtgacactggacatgctggacctcggggcagcccgggcaaacctggagaaggcgcagtcagagctgtcaggggcagcagatgaggcagcacgggctgagatccaaatccggatcgaggccaatgaagccctggtgaaggccctggagtaggcgtactttgtctgtcacccacagggtaacagaggcaggtcctggggggctgaagtcgccaccagggggcagcagtgctccggttactggcttaaagcttccctggtgctgcctgccaggtcatggagggcttccccaggcttccagagtctgggatccccaggatgcctctggagagctggccttgattgcccctcaaagccacccggacagtcagctggcccagcctatctgcattaaataccacggaattcc

SEQ ID NO: 3277 - DNA, 2002 bp, Rattus norvegicus
  Genbank Accession No. U01146
ccctttaatttcctcgaaaactccaatcactcggctgaagccatgccttgtgttcaggcgcagtatgggtcctcgcctcaaggagccagccccgcttctcagagctacagttaccactcttcgggagaatacagctccgatttcttaactccagagtttgtcaagtttagcatggacctcaccaacactgaaattactgccaccacttctctccccagcttcagtacctttatggacaactacagcacaggctacgacgtcaagccaccttgcttgtaccaaatgcccctgtccggacagcagtcctccattaaggtagaagacattcagatgcacaactaccagcaacacagccacctgccccctcagtccgaggagatgatgccacacagcgggtcggtttactacaagccctcttcgcccccgacacccagcaccccgggcttccaggtgcagcatagcccgatgtgggacgatccgggctcccttcacaacttccaccagaactacgtggccactacgcatatgatcgagcagaggaagacacctgtctcccgcctttcactcttctcctttaagcagtcccgcccgggcactcctgtgtctagctgccagatgcgctttgacgggcctctgcacgtccccatgaacccggagcccgcgggcagccaccacgtagtggatgggcagaccttcgccgtgcccaatcccattcgcaagccggcatccatgggcttcccgggcctgcagatcggccacgcgtcgcagttgcttgacacgcaggtgccctcgccggcgtcccggggctctccctccaatgagggtctgtgcgctgtttgcggtgacaacgcggcctgtcagcattacggtgttcgcacttgtgagggctgcaaaggtttctttaagcgcacggtgcaaaaaaacgcgaaatatgtgtgtttagcaaataaaaattgcccagtggacaagcgccgccgaaatcgttgtcagtactgtcggtttcagaagtgcctggctgttgggatggttaaagaagtggttcgcacggacagtttaaaaggccggagaggtcgtctaccctcaaaaccgaagagcccacaggatccctctcccccctcacctccggtgagtctgatcagtgccctcgtcagagcccacgtcgactccaatccggcaatgaccagcctggactattccaggttccaggcaaaccctgactatcagatgagtggagatgatactcaacatatccagcagttctacgatctcctgactggctctatggagatcatcagagggtgggcagagaagattcctggctttgctgacctgcccaaagccgatcaggacctgctttttgaatcagctttcttagaattatttgttctacgcttagcatacaggtccaacccagtggagggtaaactcatcttttgcaatggggtggtcttgcacaggttgcaatgcgtgcgtggctttggggaatggattgattccattgttgaattctcctccaacttgcagaatatgaacatcgacatttctgccttctcctgcattgctgccctggctatggtcacagagagacacgggctcaaggaacccaagagagtggaagagctacaaaacaaaattgtaaattgtcttaaagaccatgtgactttcaataatgggggattgaaccgacccaactacctgtccaaactgttggggaagctcccagaacttcgcaccctttgcacacaggggctccagcgcattttctacctgaaattggaagacttggtaccaccaccagcaataattgacaaacttttcctggacaccttacctttctaagactttctcccatgcacgtcaaagaactggaaagaaaaaaaaaatccagagggggctggtcaagatgggtagagagctggctgaagtgtccggttcatgtctcccttctgtagacccctagccctcacccctaaagtaaacaaacaaacaagcaaacaaacgg

SEQ ID NO: 3278 - DNA, 70 bp, Rattus norvegicus
  Genbank Accession No. U01347
ggacagcctcccaccagcttcctggtctcaggccctgctacaccgggaaaccatggacattgaagcatac

SEQ ID NO: 3279 - DNA, 604 bp, Rattus norvegicus
  Genbank Accession No. U02096
cggagttttgtgaattacggtagtgggtaagacctgagttcctccagctcctacctactttcagctgactagaagggcaaggatggtagatgctttctgtgccacctggaagctgacagacagccagaattttgatgagtacatgaaggctctgggcgtgggctttgccactaggcaagtgggaaatgtgaccaaaccaacggtgattatcagtcaggaaggcggcaaagtggtgatccggacacaatgcacattcaagaacacagagatcagtttccagctgggagaagagtttgaggaaacaagcatagatgacaggaactgtaagtctgtgattcggttggatggagacaagctcattcatgtgcagaagtgggatggcaaagaaacaaattgtgtcagagaaattaaggatggcaaaatggttgtgactctcacctttggggatgtcgttgctgttcgctgttatgaaaaggcatagaagaaatgccgggtcttttgaaaacttggtttcctgaagttccagagttatccagctactgaagcactggtcactaattataagtttgtctttggtgtggaggcagaaaattataatttaagg

SEQ ID NO: 3280 - DNA, 1043 bp, Rattus norvegicus
  Genbank Accession No. U02315
ggaagggcaagaagaaggaccggggatcccgcgggaagcccgggcccgccgagggcgacccgagcccagcactgcctcccagattgaaagaaatgaagagccaggagtcagctgcaggctccaagctagtgctccggtgcgaaaccagctccgagtactcctcactcagattcaaatggttcaagaatgggaacgagctgaaccgcaaaaataaaccagaaaacatcaagatacagaagaagccagggaagtcagagcttcgaattaacaaagcatccctggctgactctggagagtatatgtgcaaagtgatcagcaagttaggaaatgacagtgcctctgccaacatcaccattgttgagtcaaacgagttcatcactggcatgccagcctcgactgagacagcctatgtgtcctcagagtctcccattagaatctcagtttcaacagaaggcgcaaacacttcttcatccacatcaacatccacgactgggaccagccatctcataaagtgtgcggagaaggagaaaactttctgtgtgaatgggggcgagtgcttcacggtgaaggacctgtcaaacccgtcaagatacttgtgcaagtgcccaaatgagtttactggtgatcgttgccaaaactacgtaatggccagcttctacagtacgtccactccctttctgtctctgcctgagtaggagcatgctcagtcgatgctgctttcttgttgctacatctcccctcagagtcacctagagcctagaaccttctaccaggtctaatattgactgcctctgcctgtcgcatgagaacattaacaaggccgctgtgttacttctctgtttgtgactagtcggctcagagttactaaataggtgtgtgaggccccagaggtttctgaaaatggtcccgcagaaggtgatgcaaatcgatagtcaacatgccaagagtgaaataataataataataataataataataataataataataaaggcgtttcaaactcgcacttgtattggtaaaataaaatcattccaacaagt

SEQ ID NO: 3281 - DNA, 2402 bp, Rattus norvegicus
  Genbank Accession No. U02322
gcggccgcagctgccgggagatgcgagcgcagaccggattgtgatcacctttccctcttcgggctgtaagagagcgagacaagccaccgaagcgaggccactccagagccggcagcggagggacccgggacactagagcagctccgagccactccagactgagcggacgctccaggtgatcgagtccacgctgcttcctgcaggcgacaggcgacgcctcccgagcagcccggccactggctcttcccctcctgggacaaacttttctgcaagcccttggaccaaacttgtcgcgcgtcaccgtcacccaaccgggtccgcgtagagcgctcatcttcggcgagatgtctgagcgcaaagaaggcagaggcaaggggaagggcaagaagaaggaccggggatcccgcgggaagcccgggcccgccgagggcgacccgagcccagcactgcctcccagattgaaagaaatgaagagccaggagtcagctgcaggctccaagctagtgctccggtgcgaaaccagctccgagtactcctcactcagattcaaatggttcaagaatgggaacgagctgaaccgcaaaaataaaccagaaaacatcaagatacagaagaagccagggaagtcagagcttcgaattaacaaagcatccctggctgactctggagagtatatgtgcaaagtgatcagcaagttaggaaatgacagtgcctctgccaacatcaccattgttgagtcaaacgagttcatcactggcatgccagcctcgactgagacagcctatgtgtcctcagagtctcccattagaatctcagtttcaacagaaggcgcaaacacttcttcatccacatcaacatccacgactgggaccagccatctcataaagtgtgcggagaaggagaaaactttctgtgtgaatgggggcgagtgcttcacggtgaaggacctgtcaaacccgtcaagatacttgtgcaagtgcccaaatgagtttactggtgatcgttgccaaaactacgtaatggccagcttctacatgacttctaggaggaaaaggcaagaaacagagaagcctctagaaagaaaattggatcatagccttgtgaaagaatcgaaagcggaggaactctaccagaagagggtgctgacaattactggcatctgtatcgccctgctggtggtcggcatcatgtgtgtggtggcctactgcaaaaccaagaagcagcggcagaagcttcatgatcggcttcggcagagtcttcggtcagaacggagcaacctggtgaacatagcgaatgggcctcaccacccaaacccaccgccagagaacgtgcagctggtgaatcaatacgtatctaaaaacgtcatctccagtgagcatattgttgagagagaagtggagacttccttttccaccagtcattacacttccacagcccatcactccacgactgtcacccagactcctagtcacagctggagtaatgggcacacggagagcgtcatttcagaaagcaactccgtaatcatgatgtcttcggtagagaacagcaggcacagcagtcccgccgggggcccacgaggacgtcttcatggcctgggaggccctcgtgataacagcttcctcaggcatgccagagaaacccctgactcctacagagactctcctcatagcgaaaggtatgtatcagccatgaccaccccggctcgtatgtcacctgtagatttccacacgccaagctcccctaaatcgcccccttcggaaatgtctccacccgtgtccagcatgacggtgtccatgccctctgtggcagtcagcccctttgtggaagaagagaggcctctgctgcttgtgacgccaccaaggctacgggagaagaaatatgatcatcacccccagcaactcaactcctttcatcacaaccctgcacatcagagtaccagcctcccccctagcccactgaggatagtggaggatgaggagtacgagacgacccaggagtatgagtcagttcaagagcccgttaagaaagtcaccaatagccggcgggccaaaagaaccaagcccaatggccacattgccaataggttggaaatggacagcaacacaagttctgtgagcagtaactcagaaagtgagacagaagacgaaagagtaggtgaagacacaccattcctgggcatacagaaccccctggcagccagccttgaggtggcccctgccttccgtctggctgagagcaggactaacccagcaggccgcttctccacacaggaggaattacaggccaggctgtctagtgtaatcgctaaccaagaccctattgctgtataaaacctaaataaacacatagattcacctgtaaaactttattttatataataaagtatttcaccttaaatt

SEQ ID NO: 3282 - DNA, 1089 bp, Rattus norvegicus
  Genbank Accession No. U03390
ggcacgaggggtcgcggtggcagccgtgcggtgcttggctccctaagctatccggtgccatccttgtcgctgcggcgactcgcaacatctgacgccatgaccgagcaaatgacccttcgtgggaccctcaagggccataatggatgggttacacagatcgccaccactccgcagttcccggacatgatcctgtcggcgtctcgagacaagaccatcatcatgtggaagctgaccagggatgagaccaactacggcataccacaacgtgctcttcgaggtcactcccactttgttagcgatgttgtcatctcctctgatggccagtttgccctctcaggctcctgggatggaaccctacgcctctgggatctcacaacgggcactaccacgagacgatttgtcggccacaccaaggatgtgctgagcgtggctttctcctctgacaaccggcagattgtctctgggtcccgagacaagaccattaagttatggaatactctgggtgtctgcaagtacactgtccaggatgagagtcattcagaatgggtgtcttgtgtccgcttctccccgaacagcagcaaccctatcatcgtctcctgcggatgggacaagctggtcaaggtgtggaatctggctaactgcaagctaaagaccaaccacattggccacactggctatctgaacacagtgactgtctctccagatggatccctctgtgcttctggaggcaaggatggccaggctatgctgtgggatctcaatgaaggcaagcacctttacacattagatggtggagacatcatcaatgccttgtgcttcagccccaaccgctactggctctgtgctgccactggccccagtatcaagatctgggacttggagggcaagatcatggtagatgaactgaagcaagaagttatcagcaccagcagcaaggcagagccaccccagtgtacctctttggcttggtctgctgatggccagactctgtttgctggctataccgacaacttggtgcgtgtatggcaggtgactattggtacccgctaaaagtttatgacagactcttagaaataaactggctttctg

SEQ ID NO: 3283 - DNA, 1919 bp, Rattus norvegicus
  Genbank Accession No. U04733
ctaaaatggagctgctgggattcactacgcttgctctcgtggtttcggtgacttgcctcagcctcctttcagtgtggacaaaactgcgcactagggggaggctgcccccgggccccaccccccttcccattattgggaatctactgcaactgaacctcaaggacatccctgcatcgctttccaagctggccaaagagtacgggcctgtttacacgctgtactttggaacctctcctactgtggtcctacatggctatgatgtggtgaaggaggcgcttctccagcaaggggatgagttcctcgggagaggacctctgcccatcatcgaagatacccataagggatatggactcattttcagtaatggagagaggtggaaagtcatgcgacgcttctccctcatgactctgaggaacttcggaatggggaagagaagcctagaggagagggtgcaggaggaagcccggtgccttgtggaggaattacaaaaaacaaaagctcagccctttgaccccaccttcatcctggcctgtgctccctgcaacgtgatctgctccattcttttcaacgatcgattccagtacaacgacaagacgttcctcaaccttatggatcttttaaataaaaattttcaacaagtgaactccgtgtggtgccagatgtacaacctttggccaacgatcataaagtatctccctggaaagcatatagaatttgcaaaaagaattgatgatgttaaaaacttcattcttgaaaaagtgaaggaacaccagaagtccctggatcctgccaaccctcgggactacattgactgttttctcagcaagattgaggaggagaaggacaacctgaagtctgagttccatctggagaacttggctgtctgtgggtctaacttgtttacggcaggcaccgagacaaccagcaccaccctgagattcgggctcctgctccttatgaagtatccagaggtgcaagccaaagttcatgaggaacttgaccgtgtgattggacgccaccaaccccccagcatgaaggacaagatgaagctgccttataccgatgctgtattgcatgagattcaaagatacatcactctccttccttccagtctgccccatgctgtggtccaggacacaaaattcagagactatgtcatccccaagggtactactgtactcccgatgctgtcttccgtcatgctggatcaaaaggagtttgccaacccagagaagtttgatccaggacactttctggataaaaatggctgcttcaagaagacagactactttgttcccttctcccttggaaagcgggcctgtgttggtgagagtttggcccggatggagctcttcctgttcttcaccacccttctgcaaaagttttccctgaagactctggtggagcccaaggaccttgacatcaagcctattactaccgggattatcaatttgccgccaccttacaagctgtgccttgttcctagataagggtttatccttctaatcattcaaatcaaagtaattgtttcctttttctataaatattctttttatgctaagcactgcctaggccagaaacatcatgcatgaaaaccacatggacatttatttcgatttaaaaatctaggtcttaaaagcttccaggacacaggcagtgtgtctgtgtccctcaactgctctagaaaccaggccccaagcacaactgacaccagatatgcaagaccctcatcagacgccacctacaagtagcactgtgtgctcttctgtagctttggaaatagaattgttttctgtcattgttttaatagagaaattaatgtaatggcctacgttcattttcctgttcacacttaaaaacatttacatgatttgtgccacattcacaaaataaattctcaccctgacaataaaaaaaaa

SEQ ID NO: 3284 - DNA, 1865 bp, Rattus norvegicus
  Genbank Accession No. U04738
gttcagcgttcggctgctctccacggcaatccgctgccccgggtgggcaccccgaagcatgaacacgcctgcaactctgcccctggggggcgaggacaccacctggacccctgggatcaacgccagctgggctccggatgaggaggaggatgcagtgcggtccgacggcacggggacagcgggcatggtaactatccagtgcatctatgcgctcgtgtgtctggtgggcctggtaggaaacgccctggtcatattcgtgatcctacgctatgccaaaatgaagacagccaccaacatctacctgctcaacctggccgtcgctgatgagctcttcatgctcagtgtgccatttgtggcctcggcggctgccctgcgccactggccgttcggggcggtgctgtgccgcgcagtgcttagtgtggacggccttaacatgttcacgagtgtcttctgcctcacagtgctcagcgtggatcgctatgtggctgtagtgcaccctctgcgagctgccacctaccggcggcccagcgtggccaagctaatcaacctgggagtgtggctagcatccttgctggtcaccctgcccatcgcagtcttcgctgacactaggccagctcgtgggggtgaggcagtagcttgcaacctgcactggcctcacccggcctggtctgcagtctttgtgatctatacttttttgctgggcttcctactcccggttctggctatcggattatgttacctgcttatcgtgggcaagatgcgtgctgtggccctgcgggctggctggcaacaacggaggcgctcagagaagaagatcactaggctcgtgctaatggtggtgactgtctttgtgctatgctggatgccattctatgtagtgcagcttctgaatctgtttgtcaccagcctcgatgccactgtcaaccatgtgtccctcatcctcagctatgccaacagctgtgccaacccgattctctatggtttcctctcagacaacttccgacgctctttccagcgggttctgtgcctgcgctgctgtctcctggaaacaactggaggtgctgaggaagagcccctggactactatgctactgctctcaaaagcagaggtggcccaggatgcatatgccctccattgccctgccagcaggagcccatgcaagcagaacctgcctgcaagcgagtccctttcaccaagaccactactttctgaaaaccatttcaccctccctcagcccacctgcaagcaggtctgcaccacactctcaagccagcaacttcaagaaaactcctgttgtcactaagccaggccctttcagcagcctgtgttctgtccctaggagcctcaggactcctgctagcccctgcctctcctaggactgactggctccaaggacaactccgtgggggtaggacttctctgggttttgggctagagtaccatccatcctttcctggacctctagcaatttttcaagaggcaggaagcaggtggtggtcagaaagggatgcctacccttgtgtgacttgtgacagtgactgcttggaagagcgctgggagggtgaggtaggcagagctaggctctctgctgtgtggtagcatagggcatacggtgatacaggggagaagatatgatacctccaagtgttttccctctgtgtctgtctgagtctcttgttgctaaatgagatgtctacgcaacagctgaaagcatttgctttcccaaggcaaatgtttctccagttgtcaaaggaccagtagcagacttcctgcgaatgcaaatgtttaaagaaggatggtgtggggcgttttttgaaaaaaaaaataattctgatttctggtcaggaattaaaaggcagaaagg

SEQ ID NO: 3285 - DNA, 843 bp, Rattus norvegicus
  Genbank Accession No. U05014
gggccgaggtgccgcggggttgctggagggtcgtgggcggcgtgcaggagacatgtcggcgggcagcagttgcagccagactcccagccgggctatccccactcgccgcgtagccctcggcgacggcgtgcagctcccgcccggggactacagcaccacccccggcggcacgctcttcagcaccaccccgggaggaaccagaatcatctatgaccggaaattcctgatggagtgtcggaactcgcctgtggccaaaacacccccaaaggacctgccaaccattccaggggtcactagccctaccagcgatgagcctcccatgcaggccagccagagccatctgcacagcagcccggaagataagcgggcaggtggtgaagagtcacagtttgagatggacatttaagggaccagccataggacgcagtgatgcttctgggcccctggggcccttgggaggagagccacagcagtcaggccttgtacccggcagacactgggtgtggatcggccacccagtcctgctcctcactcagggcacctgctctgccttccattttgtgaataccagcacatacctccttgtgcctctgttgatactgagctgctactccagggtaatgactctcacctacaccctccctgcatcaagcgccagcgagtggacacagaggagtctgtcggaatgatctggcaattctagccccaacctctggagcacacccaccttaccttaggttggggtacctgggaaagccaccctttacttctttccctgagaggaaataaaagccacatttaccctaggcccacagccgggccctgtctgaaaaaaaaaaaaaa

SEQ ID NO: 3286 - DNA, 1612 bp, Rattus norvegicus
  Genbank Accession No. U05675
aggcaaagggcaactgcttggaatttcagaaaatctgaaaccatgaggcatctatggctgctgctcctgtctgtttccttagttcaaactcaagctgcaactactgactccgataaagtggacctctcgattgcccgtggtcatcgacctgttgacaggagaaaggaagagcctcctagcctaagacctgcccctcctcctatcagcggaggtggctatcgagcccgtccagccaaagttgatgcaggtcagaagaaagtggaacgaaaaccccctgatgcaggaggctgtgttcacggtgacggagacatgggagtgctatgtgctacagggtgtgagttgcgtcaaactttgctaaaccacgaaaggccaatcaaaaacagtattgctgagttaaatagcaacataaactctgtttatgagacctcttcggtcacctttcagtacctgactctgctgaaagacatgtggaaaaagaagcaggcacaagttaaagataatgaaaatgtcataaatgagtattcctccattttggaagaccagaaattatatattgatgagactgtgaacgataatatcccccttaatcttcgtgtgctccgctcaatcctggaggacctgagaagcaaaatgcaaaaattggagtctgacatctcagctcagacggaatactgccacactccatgcaccgtcaactgcaacatcccggtggtgtctgggaaagagtgtgaagagatcattcggaagggaggtgagacatccgaaatgtatctcattcagcctgacacctccagcaaaccatacagagtgtactgcgacatgaagaccgaaaacggaggatggacggtcatacagaaccgtcaggatggcagcgtcgactttggcaggaaatgggacccatacaaaaaaggatttggaaatattgcaaccaacgaagatacgaagaagtactgtggcttgccaggcgaatattggcttggcaatgataagattagccagctcaccaggataggacccacagaactcctaatcgaaatggaggactggaaaggagacaaggtgaaggcacactatggaggcttcacggtgcagaccgaggccaacaagtaccaagtgtcagtgaacaagtacaaagggactgctggcaacgccctcatggaaggggcctctcagctggtgggggagaacagaaccatgaccatccacaacggcatgttcttcagcacctacgacagggacaacgatggctgggtaactacagatccaagaaagcagtgctcaaaagaagatggcggcggctggtggtataacagatgccatgcagccaatccgaatggcagatactactggggtggcctttacagctgggacatgtccaagcacggcacagatgatggtgtggtgtggatgaactggaagggatcgtggtactccatgagaaggatgtctatgaagatcaggcccgtcttcccacagcaatagtcccccaagcatagactttcagccttctatgtctgacattttttacattatgttattggaattttctttgatacattatatccactaatgctcaaaacaatggctgagtgtgtctttttttttttttttt

SEQ ID NO: 3287 - DNA, 2122 bp, Rattus norvegicus
  Genbank Accession No. U05989
caggcggcggcggcgggagtcaggagtcgcggcgtgaggggcgcccccgccggcccctctgggaacatggcgaccggcggctatcggagcagcggcagcaccacggacttcctggaggagtggaaagcgaagcgcgagaagatgcgcgccaagcagaaccccgtgggcccgggttcgagcggcggggatccagccgccaagtcccctgcgggaccgctcgcccagactacggccgcggggacctcggaactcaaccacggccccgccggcgcggccgcacctgccgcccccgggccgggcgccctgaactgcgctcacggctcgtccgcgctgccccgcggggctcccggctcccggcggccggaggacgagtgtcctattgccgctggggccgcgggagcacccgcgtcccggggagacgaggaggagccggatagcgccccggagaagggccgcagctcggggcccagcgccaggaaaggcaaagggcagatcgagaagaggaagctgcgggagaagcgccgctccaccggcgtggtcaacatccccgcggcggagtgcttagatgagtacgaagatgacgaagcaggacagaaggaacggaagcgagaggatgctatcacacagcagaacaccatccagaatgaagctgcgagcctcccagatccaggaacctcctacctgccccaggacccgtcgagaacagtcccaggcagatacaaaagcacaatcagtgccccagaagaagaaatcttaaatagatatccccgaacagatagaagtggcttcagtagacacaacagagataccagtgcgcctgctaacttcgcttcaagtagcaccttggaaaagagaattgaagatcttgagaaggaagtcttgagagaaaggcaagaaaaccttcgacttacgaggctgatgcaagataaagaagaaatgattggaaaactcaaggaagagattgatttgttaaatagagacctcgatgacatggaagacgaaaacgagcaactaaagcaggaaaataaaactcttttgaaagttgttgggcagctgacaaggtagaagacgcaaggctgcctcggtgtgggaaacctgcttttaaaccgcggatgaatgtcatggcgaaggcgcccgtgattcagtgcgctgagagaactgtatatttatttctagaaaacacatggatctcttcttctcaaaatttactctttctcattactagtttttaaaaagtgtaaatccccgtctttcaacatagaagttaacatctttagctattaaaatgataggtgatgcctcttggttctgtgtgatactcagataatatatggttcgaagtagcagccatttgcatatgttttatctatgttagcacatattctccctaaaggaagatgcatagtctttgtttacatgaattcaaatccttgggggagttgcctacagatgccctattactaatgtgtgcgccttccgtgtgctaatgcctactcataaagacgcatctgccgtctcgtcctcccacgggctctcctgattccgagtggtaatagatacactactttgtatagcagtaatcgttcaaaggaaagctattttgcagttatttcatatgttctagttggctaaatataaacttaagaaaatacttgaactgtgttatagtaagtgaaaaattactattttgtgtttgaatattgaaaaaaaatttcagtaacttctgaaaaacagttaatgtatagtttcttatgtaggtactatcattcctttttttttattgctctagggtttactagtaaataatgggatatttaaaaagttgtttattcttcaggcctcaattgtgtacaatttcagtattgaagaagaaaattgatgctgtgaatagcatgtgcttcaaaaatcagaactaaaaaatttttccacacttaaaatatgtacacatacgtcagcatgtgtaagcagagataacacagatatctcagccgattcctgagttggagacaccctgggatgctttttgtcaatagagaatcatcccataaccctaacactgaagattttaaagcaaccatatttgaagatttataaaataaagttgtcttctattaaaaaaaaa

SEQ ID NO: 3288 - DNA, 1589 bp, Rattus norvegicus
  Genbank Accession No. U06230
aattggcttgaaaccagttgtagggggttcgaatcagaatctctcgatcactcaaattggctcctgattgcacttcgtgaagggaagattgaagttcagtttaagaatgagttttcaacccaaatcacaactggaggcaatgttattaacaatggtatatggaatatggtgtctgtggaagaattagacgacagtgttagcattaaaatagctaaggaggccgtgatgaatattaataaacttgggagtctttttaaacctaccgatggatttctggacaccaaaatatactttgcaggattacctcggaaggtggaaagtgcactcattaagccgattaatcctcgtctggatggatgtatacgaggctggaacttgatgaaacaaggagctttgggtgcaaaggaaatagttgaaggaaaacaaaataaacattgcttcctcactgtggagaagggctcctactaccctggttcaggaattgctcagttcagcatagactacaataatgtaactaatgcagaggattggcaaataaatgtgaccttgaatattcgcccgttcactggcactggggtcatgcttgctttagtttctggggacacagtgccctttgccttgtccttggtggattctggctctggaacttctcaggacattctggtatttgttgaaaattcagtagcagctcacttagaagccataactctgtgctcggaacagccatcccagctgaaatgtaacattaacagaaatggactggaactgtggaccccagttagaaaagacgtcatttactctaaagatctccaaaggcaactcgccatcttggacaaaacaatgaaaggaaccgtggccacttacctgggtggcgttccagatatttccttcagtgccacaccagtgaatgctttttacagcggctgcatggaagtgaacatcaacggggtacagttggatctggatgaagccatttccaaacataatgacattagagctcactcctgtccgtcagtgaggaaaatccagaagaacttctaaagtctgtttcctgggcttctaatctctcttttcatattgtaattatgctcttgttcatgtttccatcaccaaatggcaggattacatgtgttatatgcatgtttaaatatgatgtggtactttgtccttcagatttttgttatataagtcgcatttttgaaaagtcttgtactcactgctgtctagaaattaaataacaaaacacatgaaacatttaaatttcaatttatttcctataaatcttccagtgcgtcacaggcaacataatctgctccattgtctttggagagcgctttgactacagagaccgccagttcctgcgcttgctcgacctgttgtataggaccttttccctcataagctcattctccagccagatgtttgaggtctactctgacttcctgaagtactttcctggtgtccacagagaaatctacaaaaacctgaaggaagtcctcgactacattgatcatagtgtggagaaccacagggccactttggaccccaatgctccccgagactttatcgatactttccttctggaattc

SEQ ID NO: 3289 - DNA, 1844 bp, Rattus norvegicus
  Genbank Accession No. U06273
ggatgtctgggaagtggatttctgctctgctcctgctgcaaataagtttctgctttaaatctgggaactgcggaaaggtgttggtatggccgatggaatatagtcactggatgaatataaagataatactggaggaacttgtacagaagggccatgaagtcactgttctgagaccttcagcttttgtctttcttgatcccaaggaaacttctgaccttaaatttgtaacttttcctacatctttcagtagtcatgacctggaaaatttttttacaaggtttgtgaatgtatggacttatgagttgccaagagacacatgtttgtcatattttctttatctacaagatacgattgatgaatattctgactactgtctgactgtttgtaaagaagcagtttcaaacaaacagttcatgacaaaactacaggaatccaaatttgatgtcgttttctcagatgccattggtccctgtggagagctgatagctgaactgctccagattccttttctgtacagtcttcgcttctctcctggctacacaattgaacagtacattggaggagttctattccctccctcctatgtacccatgattttttcaggattagctggccaaatgacattcatagagagggtacacaatatgatatgtatgctttattttgacttttggttccaaacatttagagagaagaaatgggatccattttacagcaaaactttaggaaggcccaccacattagctgagataatgggcaaagcagaaatgtggctcattagatcctactgggatttggagtttccccacccaatatcgccaaatgttgactacattggaggactccactgcaaacctgctaaacccttgcccaaggatattgaagacttcgtccagagctctggagagcatggtgtggtggtgttttctctggggtcaatggtcaggaacatgacagaagaaaaggccaacatcattgcatgggcccttgcccagattccacaaaaggttctttggagatttgacggcaaaaaaccacccaccttaggacccaataccagactctacaagtggcttccccaaaatgatcttcttggtcatccaaaaaccaaagcctttgtaacgcatggtggagccaatggcatctatgaggcgatccatcatggaatccctatgattggcattcccttatttgcagagcaacatgataacattgcccacatggtggccaaaggagcagctgtggaagtaaatttcaggacaatgtcaaagtcagatttgctcaatgcactggaggaagtcatagacaatcctttttataaaaagaatgctatgtggttgtcaaccattcaccatgaccagcctacgaagccactggacagagctgtcttctggattgagtttgtcatgcgccacaaaggggccaagcacctgagatcacttggacataaccttccctggtaccagtaccactctctggatgtgattggattcctactttcctgtgtggcagtcactgtagtccttgctctaaagtgctttttatttgtttatcgattctttgtaaagaaggaaaagaaaacaaagaatgagtagagctcaatgataatgcatcacatgaatgaaatttgttcatcattttaagttatgaaccaccttctaaaaactcattaataactttacagaagcatagcttctttgtaattttgtaccatgtaaaaagacatataattctgaggcttctgatatgtgaccaaagaatcccatcatttattttaattttcaaactattcaatgtaaaacaatttgcctgtgtagaaaaatatataaataaagattgaattc

SEQ ID NO: 3290 - DNA, 1846 bp, Rattus norvegicus
  Genbank Accession No. U06274
cggatgcctgggaagtggatttctgctctgctcctgctgcaaataagtttctgctttaaatctgggaactgcggaaaggtgttggtatggccgatggaatatagtcactggatgaatataaagataatactagaggaacttgtacagaagggccatgaagtcactgttctgagaccttcagcttctgtctttcttgatcccaaggaaacttctcaccttaaatttgtaacttttcctacatctttcagtagtcatgacctggaaaatttttttacaaggtttgtgagtgtatggacttatgagttgccaagagacacatgtttgtcatattttctttatctacaagatacgattgatgaatattctgactactgtctgactgtttgtaaagaagcagtttcaaacaaacagttcatgacaaaactacaggaatccaaatttgatgtcgttttctcagatgccattggtccctgtggagagctgatagctgaactgctccagattccttttctgtacagtcttcgcttctctcctggctacacaattgaaaagtacattggaggagttctattccctccttcctatgtacccatgattttttcaggattagctggccaaatgacattcatagagagggtacacaatatgatatgtatgctttattttgacttttggttccaaacatttagagagaagaaatgggatccattttacagcaaaactttaggaaggcccaccacattagctgagataatgggcaaagcagaaatgtggctcattagatcctactgggatttggagtttccccacccaatatcgccaaatgttgactacattggaggactccactgcaaacctgctaaacccttgcccaaggatattgaagacttcgtccagagctctggagagcatggtgtggtggtgttttctctggggtcaatggtcaggaacatgacagaagaaaaggccaacatcattgcatgggcccttgcccagattccacaaaaggttctttggagatttgacggcaaaaaacccaccaccttaggacccaataccagactctacaagtggcttccccaaaatgatcttcttggtcatccaaaaaccaaagcctttgtaacgcatggtggagccaatggcatctatgaggcgatccatcatggaatccctatgattggcattcccttatttggagagcaacatgataacattgcccacatggtggccaaaggagcagccgccacagtaaatttcaggacaatgtcaaagtcagatttgctcaatgcactggaggaagacatagacaatcctttttataaaaagaatgctatgtggttgtcaaccattcaccatgaccagcctacgaagccactggacagagctgtcttctggattgagtttgtcatgcgccacaaaggggccttgcacctgagatcacttggacataaccttccctggtacctgtaccactctctggatgtgattggattcctactttcctgtgtggcagtcactgtagtccttgctctaaagtgctttttatttgtttatcgattctttgtaaagaaggaaaagaaaacaaagaatgagtagagctcaatgataatgcatcacatgaatgaaatttgttcatcattttaagttatgaaccaccttctaaaaattcattaataactttacagaagcatattgtaattttgtatcatgtaaaaagacatataattctgaggcttctgatatgtgatcaaagaatcccatcatttattttaattttcaaactattcaatgtaaaacaatttgcctgtgtagaaaaatatataaataaagatttaattgaaaaaaa

SEQ ID NO: 3291 - DNA, 5795 bp, Rattus norvegicus
  Genbank Accession No. U06752
ttaacatcttctcagagccaacacactggtagcatgaagaccacccacaatcctcaaaccaccagaaacacagaggtgactacaactctttctgcctcctcaagtgaccaagttcaggtagagacaacttcccagacaacactatccgatgcaacaacgacctcacatgctcccagagagagcagctcacctccaagtacatcagatattttaaccaccatggcctccacagaaggcacctcaggagacacaggacacacaatggcagtaactactcaaggttccacacctgccaccacagagatctcagtgacaccttcaacccagaaaatgtcacctgtgtcaacattcagcacttctacacaggaaataacaacactttcccaaagtcaacacactggaggcatgaagaccacccgcaatcctcaaaccaccggaaccacagaggtgactacaactctttcagcctcctcaagtgaccaagttcaggcagagacaagttcccagacaacactatctcctgatacaacaaccacctcacatgctcccagagagagcagctcacctccaagtacttcagacatgttaaccaccacggcctccacagaaggcacctcaggagacacaggacacacaacggcagtaactactcagggttctatacctgctaccacacagttatcaacaacattcgcatctcaaaaaatgtcaacagtgtcaacacccaccacctcctcaattcaggaattgtcaacacttcctcagagccaacacactggcagcatggagatcagtagcagacctcaaaccacctcagtcacatcaactctttcatcctctccaagtggctcaactcctgtacagactcggtccgtgacatcatcctcagatgaaagaaccaacccaacttcttctggtgtcagtaacacatccccagctacaacagaagtgctcaccccaacatcctctccagagtctactccaggaaacacagctccgaggacaactgagacctctacaacaaccacgacaaaagtcttaatgacatctttacaacagaaactaccaacagggtcaacactcggcacttctacacccacagaggtgactacaactctttcagcctcctcaagtgaccaagttcaggtagagacaacttcccagacaacactatctcctgatgcaacaaccacctcacatgctcccagagagagcagctcacctccaagtacatcagttatattaaccaccatggcctccacagaaggcacctcaggagacacaggacacacaacagcagtaactgaccaaggttccacacctgccaccacagagatctcagtgacaccttcaacccagaaaatgtcaactgtgtcaacacttgtcacttctactcaagaattaacttcttctcagagccaacgcactggaagcatggggaccagcagcaaacctcaagccaccacaccgacagaggtgaccacatccactctttcatcgttttcaaggggatccttattttctgcgcgtaactgctgcttgcaaacaaaaaaaccaccgctaccagcggtggtttgtttgccggatccgagctcggtaccaagcttgatgcatagcagcaaacctcaagccaccacaccgacagaggtgaccacatccactctttcatcattttcaaggggatccactcaaacccagacagtttcttgggaaacatcctcctcaggaaaaataactgccccatctacttccagtaggaggaccccatccgtagccacatcagacatattcaccaccacagactccacctcaggaaacgcggggcacacacttttaacgggaagccacagtgtgatcacatcaagagtcgcaagcacaactctaggccgattgtcaactgtagcgcacagacagtctactcagcgatcatctacacattctcagagttacttgactgaaagcatgggggcatccagcacgtctgaaaccagcctcctcacagaggctaccacagagacgagtttatgcctcttcacctggacccactgtgacagagaccttctctcgtggacgtcctcttcaggattgaccacgaaaacagacaatgacagaagtacagcactctcagccacctccttgacccttccggctcccagcacgtccacagcctccaggtccacagtgcctccagcccctcttccaccagatcagggtatttccctctttcagattggctttcccctcggctctctctgcgggattccttctattttacagataacggtcagatcattttccccgagtcagactacgatgtcttctcctaccccaacccacctcaaagaggcttcacaggaagggagcgtgtgccatagtggccattctggggtgatgctgatttctctagctccaggggaaccatattttaggaccactacatcacattttacgatgagcagcaccagcctaattcggaaggtggagtctctgattaatgagtttacaagtgactggagcttcaagccaagtgacactgaagtcacctgggtcaatgttcctgcctatccagcccaggggaggactttgggagccaatacctaccaagccatcctctccacagatgggagcaggtcctacgccctgtttctctaccagagcggtggcatgaggtgggatgtgacccagggactgtacaaccgagtgctcatgggcttctccagtggagatgggtattttgaaaacagcccgctgatattccggccagcagtggagaagtaccgtccagatcgattcctaactccaaattacggatccggggactcgaggtctacaggctacacagggaggtgtggcccaactacaggctcaagtgtctgcagtggttggaaagtcagcctcagcagcccagctggggctggaacaagatttcctgcccttgctcctggcagcagggacttcggttctggctcatcaacacaggtctgtggggcaggcagctatgcagcttctctccgggcagggcgtgtgctgtacgtatggcacctgggtgagtttcgagaaggctggagaatgcacagtccttggcagtttgatgaggacgaaggaaggcacagaactggcttggccgctggaacgacaagccctctttctgcgtccagtaccagctcaggcggccccgagttagttgtgctgggtaccaggcccccccggcccgcttggacatttggtgatccccacatcaccactttggataacgccaaatacaccttcaacgggctaggatacttcctgctggttcaggcccaggacagaaattcttccttcctgctggagggccgcactgcccagactgattctgccaatgccacgaacttcattgcctttgcggcccaatacaacaccagcagcctgaagtctcccatcacagttcagtggtttcttgagcccaatgacacaatccgagttgtacacaataaccaaacggtggcctttaacaccagcgacactgaagacttgcccgtattcaatgccactggtgtcctactgatccaaaatggctcccaagtctcagccaactttgatgggacagtgaccatctctgtgattgctctctccaacatccttcacgcctcctccagcctgtcagaggagtaccgcaaccacacaaagggccttctgggagtctggaatgacaatccagaagatgacttcagaatgcccaatggctccaccatcccctccaacacgtccgaggagactcttttccactatggaatgacatcggaaactaacgggataggcctccttggggtgaggacagaccctctgccttctgagtttactcccatcttcttgtcccaactgtggaacaagagcggcgccggtgaagacttgatctctgggtgcaacgaggacgcacagtgcaagtttgacatcctggccacaggaaacagagacatcggacaaagcaccaactcaatccttagaacattccggcacgtgaatggcacgctcaaccagtacccaccccctatccactacagcagcaagattcaagcctacaaggggcgagaacagtggccattgagatcaccagcaactctaaggatgtcgtattcagcctctccaacaagtgcagtggcctttgagctctttgaaaacgggagtttgcacgtggacaccaacatccccagaagaacgtacctggagattctagcaagggatgtcaagactaacttgtcatcggtactccagcctgagacggtggcttgcttctgtagtaaggaggaacagtgtttgtacaacgagaccagcaaagagggcaactcttccactgaggtgaccagctgcaagtgcgatgggaactccttcggccgcttgtgtgaacactctaaggacctctgcactgagccatgcttccctaatgtggactgcattcctgggaagggctgtcaggcctgccctccaaacatgactggagatgggcgtcattgtgtagctgtggagatctctgaattctgccagaaccattcctgtcctgtgaattactgctataaccatggccattgcgacatctctgggcctccagactgccagcccacttgcacctgcgcccctgccttcactggtaaccgctgcttcctggccgggaacaatttcactcccatcatctataaagagcttcccttgaggaccatcacgctctctctcagggaggacgaaaacgcctctaacgctgacgtcaatgcctcggtggcaaacgtactagagaacttggacatgcgggcttttctctccaacagcttagtggagctgatacgaacctctcccggagcaccagtccttggcaagcccattcatcactggaaggtcgtctcccacttcaagtaccgtcccaggggacccctcatccactatctgaacaaccaactgataagcgccgtgatggaggccttcctcctccaggctcggcaggagaggcggaagaggagtggagaagccaggaagaacgtccgcttcttccccatctcgagggcagacgtccaggacgggatggccctgaacctaagtatgctggacgagtacttcacgtgcgatggctacaaaggctaccacttggtctacagcccccaggatggcgtcacctgtgtgtccccatgtagtgagggctactgtcacaatggaggccaatgcaagcacctgccagatgggccccagtgcacgtgcgcaaccttcagcatctacacatcctggggcgaacgctgtgagcatctaagcgtgaaacttggggcattcttcgggatcctctttggagccctgggtgccctcttgctactggccatcttagcatgtgtggtctttcacttctgcggctgctccatgaacaagttctcctaccctctggactcagaactgtgaggcctcgtcccagatgggcagctgcacctagaatacctcaggacccgcccaccggtctgcccctgctctagggagactggaaagggccgactcgatgaagatgatttgagattcttcaagcatgaataaagggagtgaaaccagactctaccattttagtaggccatgggtataggttttccggagatgaggaaatgtagagatggatggattcctatacagcacatgggaaaggatattgcctatgtacacacacacacacacacacaccagagttaatggatgactggctttatattcaccaaaatgtttttacttataaaaccagcatacttctcattaaaatctatttaaatataaaaaaaaaaccggaattc

SEQ ID NO: 3292 - DNA, 2226 bp, Rattus norvegicus
  Genbank Accession No. U07201
aagaagcttggcgactgtaaggcgagaggaagcctccagcgggtcttgtcgctgagctacctcagctccacctcctctggccctggcccctagtgcgcagactgcctgcagccctcctgtagcatgtgtggcatctgggccctcttcggcagcgatgactgcctttccgtgcagtgtctgagtgcgatgaagattgcgcacaggggcccagatgcattccgttttgagaacgtcaatggatacaccaactgctgttttggcttccaccggctggcggtggttgaccccctgtttggaatgcagccaataagagtgaggaaatatccttatctgtggctgtgttacaacggtgaaatctacaaccacaaggcgctacaacaacgtttcgaatttgagtatcagaccaatgtggacggtgagataattctccatctctatgacaaaggcggcatcgagaaaaccatctgtatgttggatggggtgtttgcatttatcttactggacactgccaataagaaagtattcctgggcagagatacctatggtgtcaggcctttgtttaaagccttgacagaagatggatttctggctgtgtgttcagaagccaaaggccttgtctccttgaaacactccaccacccccttcctaaaagtggagccctttcttcctggacactatgaagttttggatttaaaaccaaatggcaaagtcgcgtctgtggaaatggtcaaataccatcactgtacggatgaaccactgcatgccatctatgacagtgtggagaaactcttcccaggctttgagatagagaccgtgaaaaacaatctgcgtatcctttttaacaacgctatcaagaaacgcttgatgactgaccggaggattggctgccttttatcaggaggcctggactccagcttggttgctgcctccctgctgaagcaactcaaggaggcccaagtgccctatgctctccagacatttgctatcggcatggaagacagccctgatctactggctgccagaaaggtggcaaattatattggaagtgagcatcatgaagtcctttttaactctgaagaaggcattcagtccctggacgaagtcatatttcccttggaaacttatgatattacgacagttcgagcatctgtaggtatgtatttaatttccaagtatattcggaagaacacagacagcgtggtgatcttctccggagaggggtcagatgagcttacacagggctatatatatttccacaaggcgccttctcctgagaaggcggaggaggagagtgagaggctcctgaaggaactctacctgtttgatgtcctccgtgccgaccgcactactgctgctcacggtctcgaactgagagtcccgtttctggatcatcggttttcttcctattacctgtctctgccaccagaaatgagaattccaaaagatggcatagaaaaacatctcctgagagagacttttgaggactccaacctgctacccaaagagattctctggcgacccaaggaagccttcagtgatgggatcacctcagtcaagaactcctggttcaagattttacaggacttcgttgaatatcaggttgatgatgcgatgatgtctgaggcctcccagaaatttcccttcaatactccccaaactaaagaaggctattactaccgtcagatctttgaacaccattaccccggccgggctgattggctgacccattattggatgcccaagtggatcaatgccaccgacccttctgcccgcactctgacccattacaagtcaactgccaaagcttagacgctctctacactcttgtgtaaaagtcaatgtttcttcctcctgctctgaaggtagagagacattgaaacaatcagagagaatgaaagtcaaccatcagctgctcaggcttatttaggcatggaaagaaataaaagtatcacatctaaaatgcctcctggttgtaggtaccagtgcggccttgtagctagagactgagtggctcttgctgtattgccactgtcgggatgacagtgagctatgctaaggggcatcttagttctgccttcattcctaacagctggctagtcagattgctatgtgagtcctttgtgggaactggtgacaattctgctttgtaggccaaggattcagtttctttctctttctttctttctttctttctttctttctttctttctttctttcttggaattc

SEQ ID NO: 3293 - DNA, 1223 bp, Rattus norvegicus
  Genbank Accession No. U07886
gagcccaagaggtgtctctgagagacgagggttcagagcaggggctcatttcaggaggaagagccatttgaagcctctttatacacatatgctaggatgtcaggatagctcttctcctccatctctcctttcttctcttcttgattcagacaacagatccgaaaactcactaggcttccggtgtctactaaatgctgagagtcaggccacagcctttctataaacatcactggaagagacaccacctcgtcccagattctgtcttttccctaagctatcaatcattaccggggattccctttgcctctgcacctcataggcaacaaaagaaacataagtcctgcagtctaaggcatacccaagccataagggcaccacgagactcagatgagaagagatttttctccagagtactcagtgagatagactagtgtcaagccagatggggcaactcctggctcttggcctgggacttgtcttcaagatctctgctcttattagagaaagaactttagcatgaggaaaagtaagagaaaacaagttacatgggcatggtggtgtgctcctgcaatcccaatattaagaggttaaaaaataggaccagaagtttaaagtaatccttggctacctagtgagtgtaaggccagcctggaatcaataagagttggtttcaaagaagcaggaggagaaggaggaacaggaacaggaggaggagcagggggaggagaaaaaggaggaggaggaggaggaggaagaggaggaggaggaggaggaggaggaggaggaggaggaggaggaggaggaggaggaggagaagaagaagaagaagaagaagaagaagaagaagaagaagaagaagaagaagaagaagaagaagaagaagaagaagaagaagaagaagaagaagaagaagaagaagaagaaattagaagaagaaaagaagaaggacaaatggctcttttctggtctcaccttttcccttcctgtcactcatgtggacctcagataagagcacagatactctcgacctcttacatttggagagttttgagcagacaggaagaagacggagcctgggagcagctgttctccaatagtcaaattaagactgttcctctctgagctctgtacttcaaccagcacctttaggcagaagccatcaaatcagaaatgtctgttaataattaaagtctatgattgccaccaaaaaaaaaaaaaaaaaa

SEQ ID NO: 3294 - DNA, 4183 bp, Rattus norvegicus
  Genbank Accession No. U08261
gcccagcatcgggaccagtcgcgcagtccgcgctgctgtcctttccgccttttccgcgcgggtgttcgagcagcgccaaacacgcttcagcacctcggacagcatccgccgcgctcgcccggggctcctagagaacccgggggcgcttgaccgcgcgcgggcggcccgcgggtcgtacatcgcgaggtcgtcgcactcgcgcaacccagagccaggcccgctgtgcccggagctcatgagcaccatgcacctgctgacattcgccctgcttttttcctgctccttcgcccgcgccgcctgcgaccccaagatcgtcaacatcggcgcggtgctgagcacgcgcaagcatgaacagatgttccgcgaggcagtaaaccaggccaataagcgacacggctcttggaagatacagctcaacgccacttctgtcacccacaagcccaacgccatacagatggccctgtcagtgtgtgaggacctcatctctagccaggtctacgctatcctagttagccacccgcctactcccaacgaccacttcactcccacccctgtctcctacacagctggcttctacagaatccctgtcctgggactgactacccgaatgtccatctactctgacaagagtatccacctgagtttccttcgcacggtgccgccctactcccaccagtccagcgtctggtttgagatgatgcgagtctacaactggaaccacatcatcctgctggtcagcgacgaccacgagggacgggcagcgcagaagcgcttggagacgttgctggaggaacgggagtccaaggcagagaaggtgctgcagtttgacccaggaaccaagaatgtgacggctctgctgatggaggcccgggaactggaggcccgggtcatcatcctttctgcaagcgaggacgacgctgccacagtgtaccgcgcagccgcaatgctgaacatgacgggctctgggtacgtgtggctggtcggggaacgcgagatctctgggaacgccctgcgctacgctcctgatggcatcatcggacttcagctcatcaatggcaagaatgagtcagcccacatcagtgacgccgtgggcgtggtggcacaggcagttcacgaactcctagagaaggagaatatcactgacccaccgcggggttgcgtgggcaacaccaacatctggaagacaggaccattgttcaagagggtgctgatgtcttctaagtatgcggacggagtgactggccgtgtggaattcaatgaggatggggaccggaagtttgccaactatagtatcatgaacctgcagaaccgcaagctggtgcaagtgggcatctacaatggtacccatgtcatcccaaatgacaggaagatcatctggccaggaggagagacagagaaacctcgaggataccagatgtccaccagactaaagatagtgacaatccaccaagagcccttcgtgtacgtcaagcccacaatgagtgatgggacatgcaaagaggagttcacagtcaatggtgacccagtgaagaaggtgatctgtacggggcctaatgacacgtccccaggcagcccacgccacacagtgccccagtgctgctatggcttctgcatagacctgctcatcaagctggcgcggaccatgaattttacctatgaggtgcacctggtggcagatggcaagtttggcacacaggagcgggtaaacaacagcaacaaaaaggagtggaacggaatgatgggcgagctactcagtggccaagcggacatgattgtggcaccactgaccatcaacaatgagcgtgcgcagtacatagagttctccaagcccttcaagtaccagggcctgaccattttggtcaagaaggagattcccaggagcacactggactcatttatgcagccttttcagagcacactgtggttgctagtaggactgtcagttcatgtggtggctgtgatgctgtacctgctggaccgcttcagtccctttggccgattcaaggtgaacagtgaggaggaggaggaagatgcactgaccctgtcctctgccatgtggttttcctggggcgtcctgctcaactccggcattggggaaggtgccccccggagtttctctgcacgtatcctaggcatggtgtgggctggtttcgccatgatcatagtggcttcctacactgccaacttggcagctttcctggtgctggatcggcctgaggagcgcatcacgggcatcaatgaccccaggctcagaaacccctcagacaagttcatctacgcaactgtaaagcagagctccgtggacatctacttccggaggcaggtggagttgagtaccatgtaccggcacatggaaaaacacaattacgagagcgcagctgaggccatccaggctgtgcgggacaacaagctgcacgcctttatctgggactcggccgtgctggagtttgaggcttcacagaagtgcgatctggtgaccacgggtgagctgttcttccgctcaggctttggcatcggcatgcgcaaggacagcccctggaagcagaacgtttccctgtccatactcaagtcccatgagaatggcttcatggaagatctggataagacatgggttcggtatcaggaatgcgactcccgcagcaatgctcctgcaaccctcacttttgagaacatggcaggggtcttcatgctggtggctggaggcatcgtagctgggattttcctcattttcattgagatcgcctacaagcgacacaaggatgcccgtaggaagcagatgcagctggcttttgcagccgtgaacgtgtggaggaagaacctgcaggatagaaagagtggtagagcagagcccgaccctaaaaagaaagccacatttagggctatcacctccaccctggcctccagcttcaagagacgtaggtcctccaaagacacgagcaccgggggtggacgcggcgctttgcaaaaccaaaaagacacagtgctgccgcgacgcgctattgagagggaggagggccagctgcagctgtgttcccgtcatagggagagctgagacgccccgcccgccctcctctgcccctcccccgcagacagacgcacgggacagcggcctggcccacgcagagccccggagcacgacggggtcgggggaggagcactcccagcctcccccaggccgtgcccgcctgcccaccggtcggccggctggccggtccaccctgtcccggccccgcgcgtgcccccgacgtcggagctaacgggccgccttgtctgtgtatttctattttacagcagtaccatcccactgatatcacgggcccgctcaacctctcagatccctcggtcagcaccgtggtgtgaggccccccggaggcgcccacctgcccagttagcccggccaaggacactgatgagtcctgctgctcgggaaggcctgagggaagcccacccgccccagagactgcccaccctgggcctcccgtccgcctgctctgctgcctggcgggcagcccctgcaggaccaaggtgcggaccagagcggctgaggatgggccagagctgagccggctgggcagggccacagggcgctccggcagaggcagggccctgaggtctctgagcagtggggtgaggggcctaagtggccccggtcggaggagtctggagcagaaatggcagccccatccttcctccagccactaccccaagctacagtgggggcctatggccccagcttgctaggtcacccccgacccttcctccagcgcctgctctctgcaacttgatttccacctctctcctgctgcaccaccctcccacgacatttccccaccccattcactgggttgtctctgacctttcccagggctagccttcactgccctagtggcagtgcttcaggggtgctttctggctcccagacatctagggctccagactccaagagggctgagccttctcttctgtccgcagccacaataggcttcctcagacgctggctcgtgatgagtcccgcaccttgggcaccagggagcgccatctgcctcccagtccggtgtcactcaccccactaccttgtacatgaccagctctcccagtgtcccagtgtctgccccagggacaccgggcgcgcacagccacccctaatcccggtattcagtggtgatgcctaaaggaatgtcag

SEQ ID NO: 3295 - DNA, 1097 bp, Rattus norvegicus
  Genbank Accession No. U08976
agctccagagatggctaccgcgatgacagtttccagcaaactcctcggcctgctgatgcagcagctgagaggtacccgccagctgtacttcaacgtcagccttcgatctctgagctcctctgcacaagaggcgtccaaaagaatccctgaggaagtctcagaccacaactacgagtctattcaagtaacatctgcccagaagcatgttctgcatgtacaactaaaccggccggagaagaggaatgccatgaacagggctttctggagggagttggtggaatgcttccaaaagatatctaaagactccgactgtcgggctgttgtggtctctggtgcaggaaagatgttcacttcaggtattgacctcatggacatggcatcagacatcctgcagcccccaggagacgatgtggcccgcatagcctggtacctccgagacctcatcagccgataccaaaagactttcactgtcattgagaagtgccccaagccggtgatcaccgcaattcacggaggctgcattggtggaggcgtggatcttatttctgcctgtgacattcgctactgcactcaggatgctttcttccaagtcaaggaggtggatgtgggcctggctgctgatgtaggaacgctgcagcgactgcccaaggtcattgggaaccggagcctggtcaacgagctgaccttcaccgcccgcaagatgatggctgacgaggccctggacagtgggctggtcagccgcgtgttcccagataaggacgtcatgctgaatgcagcctttgccctggcggccgatatttccagcaagagtcctgtggctgtgcaggggtcaaaaatcaatttaatctactcccgagaccattctgtggacgagagccttgactatatggccacttggaacatgagcatgctgcagacccaggacatcatcaagtcagtccaggcagccatggagaagaaggactcaaaaagcatcaccttctccaagctctgagtgccttcctgaccctggtcccctcagtgcctcctcccggtgtataactttatgacttagttcttcagttcccggggccttatctccactgtgaacaataaag

SEQ ID NO: 3296 - DNA, 2098 bp, Rattus norvegicus
  Genbank Accession No. U09256
gaattcgggaatgtcatggatccagtgagacagatccagtgcgaccgtgaaggcaaacgctttccgttcctctcagctccaccagcttccacgtcctcgcccgaccgcgccatggagggttaccataagccagatcagcagaagctccaggccctgaaggacacagccaatcgcctgcgcatcagctccatccaggccaccaccgcggcaggctcgggacaccccacatcatgctgcagcgctgccgagatcatggctgtcctgtttttccataccatgcgctacaaggccctggatccccgaaaccctcacaatgatcgctttgtgctctccaagggccatgcagctcccatcttatatgcagtctgggctgaagctggcttcctgcctgaggcagagctgctgaacctgaggaaaatcagctctgacttggatgggcatcctgtcccgaaacaagccttcaccgatgtggccactggctccctgggccaggggctgggagctgcgtgcgggatggcatacacaggcaaatacttcgacaaagccagctaccgagtctattgcatgctgggagacggggaggtgtccgagggctccgtttgggaggccatggccttcgctggaatttacaagctggacaacctcgttgccatttttgacatcaaccgtctgggccagagcgacccagccccgctgcagcaccaagtggacgtctaccagaagcgctgtgaggcctttggctggcacgccatcatcgtggatgggcacagtgtggaggagctgtgcaaggcctttggtcaggccaagcaccaaccaacagccatcattgccaagaccttcaagggccgcgggatcacagggattgaagacaaggaggcgtggcatgggaagcccctccccaaaaacatggctgagcagattatccaggagatttacagccaggttcagagcaaaaagaagatcctcgccacgccccctcaggaggatgccccttccgtggacattgccaacatccgaatgcctaccccacccaactacaaagtgggggacaagatagccacacggaaagcctatggattggcccttgccaagctgggccacgccagtgaccgcatcatcgccctggatggagacaccaaaaattccaccttctcagagctcttcaaaaaggagcacccagaccgtttcatcgagtgctacattgctgagcagaacatggtgagcattgctgtgggctgtgccacacgtgacaggacagtgcccttctgcagcacttttgcggccttcttcacacgcgccttcgaccagatccgcatggccgccatctccgagagcaacatcaacctttgtggctcccactgcggcgtgtccattggggaagacgggccctcgcagatggccctggaagacctggccatgtttcggtcggtccctatgtccaccgtcttttacccaagtgatggagttgccacagagaaggcagtggaattagcagccaatacaaagggcatctgcttcattcggaccagccgcccagaaaatgccattatctatagcaacaacgaggatttccaggttggccaagccaaggtggtcctgaagagcaaggacgaccaagtgacagtgatcggggctggcgtaactctgcacgaggctctggctgctgcagagatgttgaagaaagagaagatcggtgtccgtgtactggaccccttcaccatcaagcccctggacaaaaagctcattctcgactgtgccagagcaaccaaaggcaggatcctcaccgtggaggaccactactatgaaggtggcataggcgaggcagtatctgctgtggtagtgggcgaacctggagtcacagtcactcgcctggcggtcagccaagtaccacgaagtgggaagccagctgagctgctgaagatgtttggtattgacaaagacgccattgtgcaagctgtgaagggccttgtcaccaagggctaggaaggacatgggatgccgggtgggtgaactacacattccagggatgttctggcaaaggtgctcaagggtgtaccgagtggaaaggtaaatatatgttttgagaaaaaccgaattc

SEQ ID NO: 3297 - DNA, 4964 bp, Rattus norvegicus
  Genbank Accession No. U09540
gttgcagacacctctgcgacgccagcttgaaagccgccggcgggctgggatttagctccactttatcaactcccaacccctcacccatctcaaccgcaactccaactctgtgagaaagtcctgactttgcggagccccaggtgcactggagctcagcaaacttgagacacttcccccctgtcctccatcctaatctaagtttaggttctgactgagccaagagtgggtgctaaagcagcgggcctcaggtgtctaggactccgggtccttggggactctcaggttgaagtcttgcagagtctgggcagaggctccagagcttctcccagaccccactgctctacaccgctggaaccgcgcttcatcgcagcatggccaccagccttagtgcagacagtccacagcagctgagctcgctgtctacccaacagaccattcttctgctactcgtttcggtcctggccatcgtgcacttaggccagtggctgctgcgccagtggcgacggaaaccgtggtcctcgcccccgggtccctttccttggccattgatcggaaacgcggcgtctgttggccgggcatcgcacttgtacttcgctcgccttgcgaggcgctatggcgacgtttttcagatccgtctgggcagctgtcccgtggtggtgctgaatggcgagagtgccatccatcaggctctggtgcagcagggcggcgtctttgcggaccggcctcccttcgcctctttccgtgtggtgtctggtggccgcagcctggcgttcggccactactcagagcgctggaaggagcggcgacgtgcagcctatggcacgatgcgtgccttctccacccgccacccgcgcagccgcggtctcctcgagggccacgcgctgggagaggctcgagagttggtggcagtgttggtgcggcgctgcgccggtggcgcctgcctcgatccgacgcagccgatcatagtggcggtggctaatgtcatgagcgctgtatgcttcggctgtcggtacaaccacgacgatgccgagttcctggagctgctcagccacaacgaggagttcgggcgcaccgtgggcgcgggcagcctggtggacgtgatgccctggctgcagctttttcccaacccggtgcgcaccatcttccgcgagttcgagcagatcaaccgcaacttcagcaacttcgtcctggacaagttcctgaggcaccgagaaagcctcgtgcccggggctgctcctcgagacatgatggacgccttcatcctctccgccgaaaagaaggcgactggggaccctggtgacagtccctccgggctggatttggaggatgtgcctgccactattacagacatctttggagccagccaggacaccctttccaccgcgctgctgtggctgctcatcctctttaccagatacccggatgtgcaggcccgcgtgcaggccgagttggaccaggttgtggggagggaccgcctgccctgcatgagtgaccaacccaacttaccatacgtcatggcttttctttatgaatccatgcgattcaccagctttttgcctgtcacccttccacatgccaccactgccaacacctttgttttaggctactacatccccaaaaacacggtagtttttgttaaccagtggtctgtgaatcatgacccagcaaagtggtctaacccagaggactttgatccggcccgcttcctggacaaggacggcttcattaacaaggcactagccagcagcgtgatgatattttcagtgggcaaacgacggtgcatcggcgaggagttgtctaagacgcttctgtttctcttcatctccatcctcgctcatcagtgcaatttcaaggctaaccaaaacgagccctcaaacatgagtttcagttacggcctgagcattaagcccaagtcgtttaaaatccatgtgtctctcagagagtccatgaagctccttgatagtgctgtcgagaagctgcaagctgaggaagcttgccagtgagagagggagaggccggaggtaactgaaatgttcaaagaaaaccatctcattaactggagaggaaaacacagattttattttctccagcttcattttggcctcagttctcaagaatgagcggaaaccaagtggcctgaaggtgaggcgggcttaccaattcatggctcctcaccggccagcagctggagatcctgaagtattttgaaattgaagagtaatagggtccaaggaatttgcatactgttcccccctcacccccattaaacacatgcacacaaatcagcatgtgtgtacagctatccaacaaaatatttcagtaactctgcctttttgggtcgatttgaaagggaacttctattgcagaaattggccccataggaaaccacagtaagcagaggcttaggatatatatatatatatatatatattcaagattcaaagaagtgatttaagtgtaaaatataaagagcagaaatttaccaagagacaaatgagcactcccttgtggccctggacgaggttttctttctgcctgtagatgtgcctcccactctagaacggaccataaagccgttttgctccccctcaatttatggctagtttaataaccacagtaggttttagagattagtgaatccaaaggtaaattgtttgaaaggcaaaaggattttgtaagttaaaactgtatgtcattcagctgttcaaacgaagcattccagttatgagggagaaaaaggtttgccagtctaacgtaagctttcaactttgggatcgtaacaaactgatctgagtaataagtcggataaagtaaaaaataaaaaagcctcatgtcaccaaatagcattcaataaattttgcataattattcacaagcatcatatgaatattaactatttgacaggaaagcacttgaataatacatttcttatgtcatcttgcaaaccaaaaagtataatcagttgggtgaaatttgcccaaatccaggaaacgatcctgacaaaatcgatctgattaatatcagggaagcaagtaacaggacgatcctttcctttcttatttacagcccctacacgagacaaatctcaaaactaaaccagcaaaaccatgctctgatctggtaattgtagttacaacgcacttttcttttggaattgacccctttcggttgcgttaagattccaaactcttggctggctctgattttaaattagtttaaaatccaccttgattattttgtttcggttgaagctggagaaagtatggttattatctcacagaaggtgagacacctaacctttatctaaggacaaatgtcaaaggcaacaatcaatcaaacaaacaaacaaagccatgagtgctctgggtgttcttattagacgccctctgacaagaaactcagtaccactggtagttggtagtttctttttatgtgctattactatggttgttgtaggtgttttttaaattgagtattaaggtctgcggttttgtgtttttttttaagtcagaatctgaagattgtcttgggaggttgtttagcgactgcttggggagacagcagagacggctaaaattggctcttatttaggatggcagactgagcagccgccttcctggtagctgagagaggagaaatatatgtatttggattgtgtaaacaatccgaaacctgttaagaagggttggatgagtggaaaagtagggacagggcgcgtggggggtttcccatttctgttttcactgcaatttagacggaacaaaagaagcccacggcactcagagagcttatggttggctctgtttcattaggcttcttggaattttcctatcaaaattgcaaaggaaggagtgtgtgatattcttgtgtgcagaggccagaagctgacagacagagagtgcatgagcaggagagaaatgtttaaatggtccccattcactccaaattagtctcttgacctgtaacatttgaggcatgatgtttagaaaaaaaggagtttcaagggtcaggtcttaccttcaagtgtctcttaagactggctggagaccaagccctcaccctctctctcccccatccacatctattttgtagttggagattgaattataaaaaatataatgtaatccttatttaaatttctcacaacagaaccccttgaatgtgaaacacaggttgtgtcagtattttcgaggccttgatttcaactacaaaaattaactctgtaaacatttttaagtttttcagacattttaaaagcatgcacctcagtaaggtcgggacagtgatttgagcctccatggcctctttactatgagaaatttgtaagagtgaaaagtcttcatgaaccaatctggactcctcattaagccaaccagacccagatgttttgtgaacgtaggggtcatgttcgtctgatgctttcagcaaaggggaaagaagggggctactttgtatatatttagacccagtgaaaggaaggaggatacaagtcaggaaagagtaacaattgtcatattcggaagctaatagattactggcttagttggaaagcctgccttattctgctacagagggatttcttttgctggtcaccatcttcatcagagtatccacctcctgtcagggcaggcaaaaagtatgtttttattaaatgtctcccttgcacagtaaagcttggactatgtcagaacgttgcttttttttttaaaacaaaaaatatgcctcaggtgtgttttatgaattactcaaaagagttcatgccccagaacttagcctgtacctgtgaaatattatcatgccccttatgtattcacaccagggctgtgctagattaaatagagatcatcaccatggtatgctaattactgtttttagcagtgacacagttgtgtgacagaaggtgtatgttaccaggtgattataacccagaaataattccctatttaacctctaaaaaaaaaaaa

SEQ ID NO: 3298 - DNA, 2642 bp, Rattus norvegicus
  Genbank Accession No. U09551
agtgtgctctaaaggcgacgggtttgtcggagcaccataatatggtgtgggaagtgaagacgaaccagaggcctcatgcagtacagagactcctgctggtgatggacgagagagctacaggagtgagtgactcattggagttgctgcagtgtaatgagaatgtgccgtcctctccaggatacaactcctgtgatgagcacatggagcttgatgaccttcctgaacttcaggctgttcaaagtgaccctacccaatctgccatataccagctcagttcagatgtatctcatcaagaatatccaagaccatcttggagccagaatacctcagacataccggaaaatactcaccgtgaagatgaggtggactggctaacagagttagcaaatattgccactagtccacaaagtccactaatgcagtgctcattttataacagatcatctcctgtacacatcatagctactagcaacagtttacattcctatgcacgcccaccaccagtgtcctctgcaaagagcggaccagccttccctcatgaccactggaaggaagaaacaccagtaagacatgaaagggcaaacagtgagtcagagtcaggaattttctgcatgtcctccctgtcagatgatgatgatctgggctggtgcaattcctggccatcaaccgtttggcattgctttctcaaaggcacacgactgtgcttccataaggaaagcaaaaaggagtggcaagatgttgaagactttgctagagccgccacctgtgatgaggaggagatccaaatgggcactcacaagggctatgggtctgatggtctaaagttgttatcccatgaagagagtgtgtcattcggtgagtctgtactgaagttgacatttgatcctggtacagtagaagatggcttgcttactgtggagtgcaagctggaccaccctttctatgttaaaaataaaggctggtcatcattttatccaagcttgactgtggtacagcacggcattccatgctgtgagattcatattggtgacgtatgtctacctcctggacaccctgatgccattaatttcgatgattcaggtgtttttgatacatttaaaagctatgacttcacacctatggactcttccgcagtctacgttttgagtagtatggctcgccagcgccgcgcatctttgtcttgtggaggacctggtactggtcaagagtttgcaggatctgaattcagtaaaagctgtggttcaccaggatcatcacagctctcctctagttctttatacactaaagctgtcaaaagccacagctcagggactgtgagtgccacttctcctaataagtgcaaaagaccaatgaatgccttcatgctttttgccaaaaaatacagagttgaatatactcagatgtatccagggaaagataacagagccataagtgtgatccttggtgacaggtggaaaaaaatgaagaacgaggaaaggaggatgtatacattagaagcaaaggctttggctgaagaacaaaagcgtttaaatcccgactgctggaaaaggaaaagaaccaattcaggctctcaacagcactaaacctgatgcttctgtctgtaagtctgtaccttgcatcagtactgactctgtacctgcataaggactgactctggacggaaaagcttggaagaccttggtctcaccatttgtcctacatttgtgtgaccataaaatgctgggagcattgagttttgtaatgatttaatgggtgaggaggatctgctttctccattagagcattaagtaagctaaaactatcaacattgtaaaccaaattgccttattttccttccaaacttcatatatgtctatcaggtaatataggcttgaaaattgatatcctgtggtgctaaagtacagtagaaagagagatgtgtatacatgtcttattttaaattgtacgaaggggaatttaaaaatatgtaactgctgtttatacatcagctccttactgcttattaatctgtattgtacccacgatatcaggaatgaagtagaagctggcctttccatgaatagccaccacatggcccagtgtctctgccaaacacagttgcttctagtctggccagtgccaagagacaacataacatggcaggtggatggtgtcattgtctcagctgagagccacctgcttcagataccatgggcgtgtgctgagtggatgcaccagggggcagcacagctccatgattcccagtgggggccaagccaggctaaggtgcagtcagttagcattgggacagtcattgtaatggtgctgttatcagttgaaaccatgctccctgtctcctcagccacatcccctccgtctctgctgtcatcttctctgtggtggggcagactttgcacttactgcagtgcaacacttgcactttacccctccggcttctacagtagagcaagtccttcggcagccctgctgctttcgctctgcgctacaatcatggcttctcatgttacttaccaagtggtatttttggttaggaatcacagctgtaaagttgatttcagttcattacacttcttaaacatattgcccctcaattttgcacactatattcttgtatattatttcaaataaaatgaaaaaagtct

SEQ ID NO: 3299 - DNA, 2756 bp, Rattus norvegicus
  Genbank Accession No. U09870
tgtggcttgcagctgccagctaccctgctaaatgtttggtgggaaaagcttgggattcaccatggcaactgaagaggccatcatccgcatccccccataccactacatccatgtgctggaccagaacagtaatgtgtcccgtgtggaggttggaccaaagacctacatccggcaggacaatgagagggtactgtttgccccagttcgcatggtgaccgtccccccacgccactactgcatagtggccaaccctgtgtcccgggacacccagagttctgtgttatttgacatcacaggacaagtccgactccggcacgctgaccaggagatccgactagcccaggaccccttccccctgtatccaggggaggtgctggaaaaggacatcaccccactgcaggtggttctgcccaacacagcactgcatcttaaggcgttgctggactttgaggataagaatggagacaaggtcatggcaggagacgagtggctatttgagggacctggcacctacatcccacagaaggaagtggaagtcgtggagatcattcaggccacagtcatcaaacagaaccaagcactgcggctaagggcccgaaaggagtgctttgaccgggagggcaaggggcgcgtgacaggtgaggagtggctggtccgatccgtgggggcttacctcccagctgtctttgaagaggtgctggatctggtggatgctgtgatccttacagaaaagactgccctgcacctccgggctctgcagaacttcagggaccttcggggagtgctccaccgcaccggggaggaatggttagtgacagtgcaggacacagaagcccatgttccagatgtctatgaggaggtgcttggggtagtacccatcaccaccctgggacctcgacactactgtgtcattcttgacccaatgggaccagacggcaagaaccagctgggacaaaagcgtgttgtcaagggagagaagtcctttttcctccagccaggagagaggctggagcgaggcatccaggatgtgtatgtgctgtcagagcagcaggggctgctactgaaggcactgcagcccctggaggagggagagagcgaggagaaggtctcccatcaggccggagactgctggctcatccgtgggcccctggagtatgtgccatctgcaaaagtggaggtggtggaggagcgtcaggctatccctctggaccaaaatgagggcatctatgtgcaggatgtcaagacggggaaggtgcgggctgtgattggaagcacctacatgctgactcaggatgaagtcctgtgggaaaaggagctgccttctggggtggaggagctgctgaacttggggcatgaccctctggcagacaggggtcagaagggcacagccaagccccttcagccctcagctccaaggaacaagacccgagtggtcagctaccgtgtcccgcacaatgcagcggtgcaggtctatgactacagagccaagagagcccgtgtggtctttgggcccgagctagtgacactggatcctgaggagcagttcacagtattgtccctttctgccgggcgacccaagcgtcctcatgcccgccgtgcactctgcctactgctgggacctgatttctttactgatgtcatcaccatcgaaactgcagatcatgccaggttgcagctgcagcttgcctacaactggcactttgaactgaagaaccggaatgaccctgcagaggcagccaagcttttctccgtgcctgacttcgtgggtgacgcctgcaaggccattgcatcccgagtccggggggctgtagcctctgtcacctttgatgacttccataaaaactcagcccggatcattcgaatggctgtttttggctttgagatgtctgaagacacaggtcctgatggcacactcctgcccaaggctcgagaccaggcagtctttccccaaaacgggctggtagtcagcagtgtggatgtgcagtcagtggagcccgtggaccagaggacccgggatgcccttcagcgcagcgttcagctggccatcgaaattaccaccaactcccaggaggcagcagccaagcacgaggctcagagactggaacaggaagcccgtggtcggcttgagaggcagaagatcttggaccagtcagaagctgaaaaagcccgcaaggaactcttggagcttgaggctatgagcatggctgtggagagcacgggtaatgccaaagcagaggctgagtcccgtgcagaggcagcgaggatcgaaggagaaggctctgtgctgcaggccaagctcaaggcacaggcgctagccattgagacggaggctgagttggagcgagtaaagaaagtacgagagatggaactgatctatgcccgggcccagttggagctggaggtgagcaaggcgcagcagcttgccaatgtggaggcaaagaagttcaaggagatgacagaggcactgggccccggcaccatcagggacctggctgtggccgggccagagatgcaggtgaaacttctccagtccctgggcctgaaatccactctcatcaccgatggctcgtctcccatgaacctcttcagcacagcttcgggttgctggggctggggtctgatggtcagccgccagcacagaagtgatccggcagcccggggaagacttgctctcccaggctctccgaagcagccatgctgtgccttaggtcaacactgactgcactgacaatggataaaataaattgacaactgta

SEQ ID NO: 3300 - DNA, 1885 bp, Rattus norvegicus
  Genbank Accession No. U10697
cgtgtccatgcaagatgtgcctcagcttcctgttcctggtgtccctagcaacctgtgtggtttatggaaacccctcttcaccacccgtggtggacaccacgaaaggcaaagtcctggggaagtacgtcagcttagaaggagtcacacagtctgtagctgtcttcctgggagtcccttttgccaagccccctcctggatctctgaggtttgctccaccacagcctgcagagccctggagcttcgtgaagaacaccaccacctatccacctatgtgctctcaagatgcagcaaaagggcagaggatgaatgatctcctaaccaacagaaaggagaaaatccatctcgagttttctgaagattgtctctacctgaatatttacactcctgcagactttacaaagaatagcaggctgccagtcatggtgtggatccatggaggtggaatgacactgggcggggcatcaacctatgatggccgggtcctctctgcctatgaaaacgtggtggtagtggccattcagtatcgcctgggcatctggggattcttcagcacaggggatgaacacagcaggggaaactggggtcatttggaccaagtggctgcgctgcactgggtccaggacaacattgccaactttgggggtgacccagcgtctgtgaccatctttggagagtcagcaggaggtttcagtgtctctgttcttgtgttgtccccactgaccaagaacctcttccacagggccatttctgagagtggggtggtcttccttactggattgttaaccaaggatgttagaccagccgctaagcaaattgctgatatggctggatgtgaaaccaccacatctgccatcattgttcactgcctgcgtcaaaagacagaagaggagctcttagagatcatgaagaaaatgaatctgattaaactcagttcacaaaggataacaaaagagagctaccactttttgtcaactgtggttgacaatgtagtgctgccgaaggacccaaaagagatcctggctgagaagaacttcaataacgtgccctacattgtgggaatcaacaagcaagaatgtggctggcttctgccaacaatgatgggatttgtaccagctgatgtagaattggacaagaagatggccattacgctcctggagaaatttgcttccctatatggtataccagaggatattattccagttgccattgagaagtacagaaaaggtagtgatgactccatcaagatcagagatggaatccttgcctttattggggatgtgtcatttttctatccatcagtgatggtgtcccgtgaccacagagatgctggagctcccacctacatgtatgagtatcaatactacccgagcttctcatcaccccaaagacccaagcatgtagtaggagaccatgcagatgatctctactctgtctttggtgccccaattttaagagatggtgcctcagaagaggagatcaagctcagcaagatggtgatgaaattttgggccaactttgctcggaatgggaaccctaatgcgcgagggctacctcattggccacagtatgaccagaaagaagaatatctgcagattggtgccaccacccagcaatcgcagagactgaaagcagaggaagtggctttttggacacagttactggctaagagagaacctcagccccaccacaacgagctgtgaatgcaagtctctgtcagcttcagaacaagcaagccaagatattgttcttccagtaaagatgtttgtaaatgaaagatggatctggaggatcctgaagaattttgtaatagagacagggagaacccaggaaagagaaatatttgtacttggcatcaatttagagaataaatgacattttcaggtca

SEQ ID NO: 3301 - DNA, 1723 bp, Rattus norvegicus
  Genbank Accession No. U11685
taatgtccagggctccaggaagagatgtccttgtggctggaggccgcagtgcctgatgtttctcctgactctgcaacggagttgtggaagacagaacctcaagatgcaggagaccagggaggcaacacttgcatccttagggaggaagccaggatgccccaatcaactgggggtgctttaaggatagggttggagtcatccgagcctacagccctgctccccagggcagagaccctcccagagcctacagaacttcgtccacagaagcggaaaaaggggccagcccccaaaatgctggggaacgagctatgcagtgtatgtggggacaaggcctctgcgttccattacaatgtgctgagctgcgagggctgcaagggattcttccgccgcagtgtcatcaagggagcacgctacatttgccatagcggtggccactgccccatggacacctacatgcggcggaaatgccaggagtgtcgccttcgcaaatgccgccacgcaggcatgagggaggagtgtgtcttatcagaagaacagatccgcttgaagaaactgaagcgtcaagaagaggagcaggctcaagccacatcggtgtccccaagggtttcctcaccgccccaggtcctgccacagctcagcccagaacaactgggcatgattgagaagttggtggctgcccagcaacagtgtaacaggcgctccttctctgaccgacttcgagtcacgccttggcccattgcacccgaccctcagagccgggaagcccgccaacagcgctttgcccactttactgagctggccatcgtgtccgtgcaggagattgttgactttgccaaacagctccctggcttcctacagctgagcagggaggaccagatcgccttgctgaagacctctgcgatcgaggtgatgcttctggagacatcgcggaggtacaaccctgggagtgagagcatcaccttcctcaaggatttcagttacaaccgggaagactttgccaaagcagggctgcaggtggagttcattaaccccatctttgagttctccagatccatgaatgaactgcaactcaatgatgctgaatttgctctgctcatagccatcagcatcttctctgcagaccggcccaacgtgcaggaccagctccaagtagagagactgcaacacacatatgtggaggccctgcatgcctatgtctccatcaaccacccccacgaccgactgatgttcccacggatgctaatgaagctggtgagcctccggactttgagcagcgtccattcagagcaagtgtttgcacttcgcctgcaggacaaaaaacttccccctctgctctccgagatctgggatgtccacgaatgactgtttctccgtgtcctctgtgttggccacgcagctgaagcttactgactgcttcctagaggtggagcagactgaggagggcaaacattcctgggcgctgggtgaaagagacccttgcatggcactaaagagagtcaaagggttgggtgttttgtggctgctgggcagttggggacctactaacgttgtatgccatctgaaggccttgttgacccaaccaaataaactagccaggagagccactttgtgcagggttcttcaggccctgcccaaaaaaaaaaaaaaaaaacgactaacgttgtatgccatctgaaggccttgttgacccaaccaaataaactagccaggagagccactttgt

SEQ ID NO: 3302 - DNA, 2870 bp, Rattus norvegicus
  Genbank Accession No. U11760
gaattccggcgtttgcagccgtcgtttgattagtcgcctctcgcggattaggagctagcgtctcccgcccgcctgccgccccggtgccgctgggaggaagcgagagggaggctgcctgtgggtttgtcactgctgttgctcctccacctgagtgagtcaagcccgggcctagtcggtcgcctaccattctcgtagccgttaccctcaggccgccacagccgccgaccgggagaggcgcgcgccatggcctctggagccgattcaaaaggtgatgatttatcaacagccattctcaaacagaagaaccgtcccaatcggttaattgttgatgaagccatcaatgaagataacagtgtggtgtccttgtcccagcccaagatggatgaactacagttgttcagaggtgacacggtgttgctaaaaggaaagaagagaagggaagctgtatgcattgttctttctgatgacacgtgttctgatgagaagattcgaatgaatagagttgttcggaataacctccgagttcgcctaggagatgtcatcagcatccagccatgccctgatgtaaagtatggcaaacgtatccatgtgctacccattgatgacacagtggaaggcatcactggcaatctttttgaggtataccttaagccgtacttcctggaagcatatcggcccatccgtaaaggagatattttccttgtccggggtgggatgcgtgctgtggagttcaaagtagtagagacagatcccagcccttactgtattgttgctccagacacagtgatccactgtgagggggagccaatcaagcgagaggatgaggaggagtccttgaatgaagtaggctatgatgacatcggtggttgcaggaagcagctagctcagataaaggagatggtggagctgccactgagacatcctgcactctttaaggcaattggtgtgaagcctcctcggggaatcttgctatatggacctcctgggacagggaaaaccttgattgcccgagctgtggcaaatgaaactggagccttcttctttctgatcaatggtcctgaaatcatgagcaaattggctggtgagtctgagagcaaccttcgtaaagcctttgaggaagctgaaaagaatgctcctgccatcatcttcatcgacgagcttgatgccattgcacccaaaagagagaaaactcacggggaagtggagcgtcgcatcgtgtctcagttgttgacccttatggatggcctaaagcagagagcacatgtgatagttatggcagcaaccaatagacccaacagcattgacccagccctacggcgatttggtcgctttgacagagaggtagatattggaatccctgatgctacaggacgtttggaaattcttcagatccataccaagaacatgaaactggcagatgatgtggacttggaacaggtagccaatgagactcatggtcatgtgggtgctgacttggcagccctgtgttcagaggctgctctacaggccatccggaaaaaaatggacctcattgacctagaagatgagaccattgacgctgaggtcatgaattccctggcagttactatggatgacttccggtgggccttaagtcaaagcaacccatcagcacttcgggaaactgtggtagaagtgccacaagtaacctgggaagacattggaggcctggaggatgtcaaacgggagcttcaggagttggttcagtatcctgtggagcatccagacaaattcctcaaatttggcatgactccttccaaaggtgttcttttctatggaccgcctggctgtgggaaaaccttactggccaaagccattgctaatgaatgccaggctaacttcatctccatcaagggtcctgagctgcttaccatgtggtttggggaatctgaggccaatgtcagggaaatatttgacaaggcacgacaagctgccccctgtgtactcttctttgatgagttagattcaattgccaaggctcgtggtggtaatattggagatggtggtggagctgcagaccgagtcatcaatcagatcctgacagaaatggatggcatgtccacaaaaaagaatgtgtttatcattggagctaccaaccggcctgacatcattgatcctgctatcctaagacctggccgtcttgatcagctcatttatatcccacttcctgatgagaagtcccgtgttgccatcctaaaagccaatctgcgaaaatccccagttgccaaggatgtggatttggagttcttggctaagatgactaatggcttttctggagctgacctgacagaaatttgccaacgtgcttgtaaactagccattcgtgaatctatcgagagtgagattaggcgagaacgagagaggcagacaaatccatcagctatggaagtagaagaggatgatccagtgcctgagatccgcagagatcactttgaggaagccatgcgttttgcccgacgttctgtcagtgataatgacattcggaagtatgaaatgtttgcccagacactgcagcaaagtcgaggttttggcagcttcagattcccttcagggaaccagggtggagctggcccaagtcagggcagtggaggtggcacaggtggcaatgtgtacacagaagacaatgacgatgacctctatggctaagtgatgtgccagcatgcagcgagctggcctggctggaccttgttccctgggggtgggggcgctcgcccaatgggaaccaggggtgtgcccatggcctgttccattcctcagtccgaacagttcagccccagtcagactctggacgggggttttctgttgcaaaaaaattacaaaagcgataaaataaaagtgattttcatttggga

SEQ ID NO: 3303 - DNA, 832 bp, Rattus norvegicus
  Genbank Accession No. U12402
cgggcgctgggcgcggcggtccatcatgggtggctttttctcaagtatattttccagtctctttggaaccagggaaatgaggattttaattttgggattagatggtgctggaaaaacgacaattttgtacagattgcaggttggagaagttgttactaccattcccactattggatttaatgtagagacggtgacatacaaaaatctcaagttccaagtttgggacttaggcggacagacaagtatcaggccatactggagatgttattattcaaacacagatgcagtcatctatgtcgttgacagttgtgaccgagaccgaattggcatttccaagtcagagttagttgccatgttggaggaagaggagctgaggaaagccattttagtggtgtttgcaaataaacaggacatggagcaggccatgacgccctcagaaatggccaatgcgcttgggttacccgccctgaaggaccggaagtggcagatctttaaaacgtcagcaaccaaaggcaccggcctcgacgaggcaatggaatggttagttgaaacactgaaaagcagacagtgagtccattcacatcagcgcctgtgaaccaaacgctccgtcacagactcactgaaccagtcagatgtacttctcgtgactggtggaagggactgtgtgattctagcatatacagacctgacttcactatttgtaataaatataaaaagcaagtatctggtgagagggttagcttgatcgaatcacccaaatggtttatgtaatgtaaaatatttcttccttgttttcttgtgttaaggtatatattctatttgtatggaattc

SEQ ID NO: 3304 - DNA, 901 bp, Rattus norvegicus
  Genbank Accession No. U13177
tccgatgccgtttcaggtctggaatcagcagggtcctctgagccttggcagtgctgatctgctcgtttgcaaaggcgcctgtgtctcagagccggtgtgagaagaagagagaatccttcccgccgccgggagtaatcaagagttttggccggacctttgagtacacatcgggatagtgagaagcccggcgaaaagcacagactatggcgctgaaacggattaataaggaacttagtgatttggcccgtgaccctccagcacaatgttctgcaggtccagttggagatgacatgtttcattggcaagccacaattatgggacctaatgacagcccatatcaaggtggtgtattctttttgacaattcattttcctacagactaccccttcaaaccacctaaggttgcatttacaacaagaatttatcatccaaatattaacagtaatggcagcatttgtcttgatattctaagatcacagtggtctcctgctttaactatttctaaagttcttttatccatttgttcactgctatgtgatccaaacccagatgaccccctagtgccagagattgcacggatctataaaacagacagagacaagtacaacagaatatctcgggaatggactcagaagtatgccatgtgatgctaccttaaagtcagaataacctgcattatagctggaataaactttaaattacttttgagttttataatctttattgagcttctgttacagaaggggtgtgacatttgcccttatggtgagttagtctggatgcgtgttctcagcccgaatgagaagtaaaatcttaacagagcacagaatagaaaggaccttggggatcacttagcccagcccattattttcatggaggaaatgaaaccaaagaaaggaga

SEQ ID NO: 3305 - DNA, 664 bp, Rattus norvegicus
  Genbank Accession No. U13253
ggcacgagtctccttgctgcttttgtgctctcccgctcgccatggccagccttaaggacctggaagggaagtggcgtctggtggaaagccacgggtttgaggactacatgaaggaactaggagtagggctggctcttaggaagatgggtgccatggccaaaccagactgcatcattaccctcgacaacaacaacctcaccgtcaaaactgagagcacagtgaagacgaccgtgttttcttgcaccttgggagagaagtttgatgaaaccacagctgatggcaggaaaactgagacggtctgcaccttcacagacggtgccctggtccagcaccagaagtgggaagggaaagaaagcacgataacgagaaaactgaaggacgggaagatggtggtggagtgcgtcatgaacaatgccatctgtactcgggtctatgagaaggtacaatgaggactggctaactcgtcatcctggacagcagtcagctggctgagggaatagctcaattcaatgagcaggtcgtacagaaccacactgcttcacttctttggttttatttttcatgacttttcatcatagacactttacccgaaacccatgtcagaccgttggtttacccaggatcattcctttggttagtaaataaatgcgtttgtgctaattca

SEQ ID NO: 3306 - DNA, 429 bp, Rattus norvegicus
  Genbank Accession No. U13895
aagaggatgagaaggacgacaagcccatccgagctctggatgaaggggatatcgccttgttgaaaacttatggccagagtacttattcgaggcagatcaagcaggttgaagatgacattcagcaacttcttaaaaaaattaatgagctcactggtatcaaagagtccgacactgggctggcccctccagcactctgggatttggctgcagacaaacagacacttcagagtgaacagcctctacaggttgcaagatgtaccaagataatcaacgccgattcagaggacccgaaatacatcatcaacgtgaagcagtttgccaagttcgtggtggatctcagtgatcaggtggcacctactgacattgaggaagggatgagagtcggcgtggacagaaataaataccaaattcacattccattgcctccta

SEQ ID NO: 3307 - DNA, 3760 bp, Rattus norvegicus
  Genbank Accession No. U14192
tgagcgacgagatgaatttcctccgcggggtgatggggggtcagagtgccggaccccagcacacagaagctgagacgattcagaagctctgtgaccgcgtagcttcatctactttactggacgaccgaagaaatgctgtccgtgcccttaagtcactgtctaagaaataccgcttggaagtgggaatccaagccatggagcatcttatccacgtcttacagacagatcgttcggattctgaaataatagcgtatgctttggacacactctataatataatatccaatgatgaagaggaagaagtagaagaaaattctacaagacagagtgaggatttgggaagccaatttacagaaattttcattaagcagccagaaaatgtcactctcctgttatctttgttggaggagtttgatttccacgtccgatggcctggtgtgagacttctgacttctcttttaaaacagctagggcctccagtgcagcaaatcatcctagtcagccccatgggtgtttcaaaattaatggacttgctggcagattccagggaaattatacgtaatgatggcgtcttactactgcaggcattaacaaggagcaacggagcgatccagaaaattgttgcttttgaaaatgctttcgagagactactggacattattacagaggaggggaacagcgatggaggtatagtagtggaagattgtttgattttgctccaaaatttgttaaaaaacaacaattccaatcaaaatttttttaaagaaggctcttatattcaacgtatgaaagcttggtttgaagttggagatgaaaatcctggttggtcagcacagaaagtgaccaatcttcatttaatgctccagcttgtgcgggtactggtgtctcccaccaaccctcccggtgctaccagtagctgccagaaggccatgttccagtgtgggttactacaacagctttgcactatcctgatggctaccggaattcctgctgatatcctgactgagaccataaatactgtatcagaagttattcgaggctgccaagtaaatcaagactactttgcttctgtgaatgcgccttcaaatcccccacgaccggcaatcgttgtgctgctcatgtccatggtcaacgagaggcagccatttgtactgcgctgcgccgtgctctactgtttccagtgcttcctctataaaaacgagaaaggacaaggagagattgtggccactctgctaccttccactattgacgcaacaggtaactcggtctcagctggccagctgctctgcggaggtttgttttccacagactccctctcaaactggtgtgctgccgtggccctcgcccatgcactgcaagggaacgccacccagaaggagcagctgctcagggttcagctggccaccagcatcggcaaccccccagtgtcgctcttgcagcagtgcaccaacattctgtcccagggaagcaagatacagacaagagtcgggttgttgatgttgctttgtacctggttaagcaactgtccgattgctgtaacacactttcttcacaactcagccaatgttccatttcttacaggacagattgcagaaaatctcggagaagaagagcagttggtccaaggcttatgtgcccttcttttgggcatttcaatttatttcaacgacaactcactagaaaactacacgaaagagaaactaaagcaactaatagagaagaggattggcaaagagaattacatagagaaacttggatttattagcaagcatgagttatattccagagcatctcagaaaccccagccaaactttccgagtccagaatacatgatatttgatcatgagtttacaaaactggtgaaagaacttgaaggtgttattaccaaggctatttataagtccagcgaagaagataagaaagaggaagaggtaaagaaaaccttagaacagcatgataatattgtgactcactataagaatatgatccgtgagcaagacctacaactggaggaactaaaacagcaagtgtccacactgaaatgtcagaacgagcagctgcaaacagcagtcacccagcaggcttctcagattcagcagcacaaggatcagtacaacctcctcaaagttcagctcgggaaagacaatcaccatcaaggttctcacagtgacggggctcaggtaaatggcattcagccagaggaaatcagtcggctgagggaagagatagaagaattaagaagtcatcaggtgctcttacagagccagctagctgaaaaggacactgtgattgaaaatttgagatcttcacaagtgtctggcatgagtgaacaggctttagcaacgtgttcacccagagatgccgagcaagttgcagagttaaaacaggaattgtcagcattaaagtcccagttatgttcacagtctctggagatcactagactccagacagagaacagtgagctgcaacagagagcagagaccttggcaaagtcagttcctgtagaaggagagagtgagcttgtgacagccgcaaaaactacggatgtagagggaaggctgtctgccctgctgcaggagaccaaagagttaaagaatgagattaaagcattgtctgaggagaggaccgccattcaaaagcagctggactcctccaacagcaccatcgccatcctacaaacggagaaagacaagctatacttggaagttacggattctaagaaagaacaagatgatcttttggtgctgttggcagatcaagatcagaaaatcctgtcactgaagagtaaactcaaggatcttggtcatccagttgaagaagaagatgaatctggagaccaagaagatgatgatgatgaacttgacgatggtgacagggaccaggatatctagctttaaaccctaggaacaatagagattatgtcattgtgttgaagaagtcttaagacagtgctttggcttgcctccacaaaaaataaagacagaaccaggtggaaagcattcactaataaaattattgatgtatgtttttaatattgccacccatgtgggaaactctgacttcatgtggaagttttatttatgttcttctgaactctcccaaaatttgcagagggcaccaggttccaaaaacacagcatttgaaggcacgtggtggcagtgcagttccttactggttcactggtcggtcgcttgctttcagacagagtctgggccttcagtactaacatttgattaatgtgtattgaacgggaatcactatttctaaatcagcgtttgcattctcggctgattaatccttgtaaagaaaggactgtacttaaagacagggcagccttgaatcaggggtcctgtgtgtcatcacccccttccccactgtgcctccctggtgagcaggatgggacagttcagagtgcttgccgtccagcagggccacctctgcctactgagcggaaagactgtcccggagtgtgaaagcactctgaggagctggaacagtgtattaacgtggctggttttctctctgttaaagctaaagaaggaaacagattatagtcagcagttcatacagctgggattagaattgtttgattatcacaaaacatgttcttagttttacaaaaacccaaactatgatttatgtaatttattggcatttttgctgaataggtgtaagtcagataatagatttttaaaaagcaaatgaagcaatgtgtcaaagtctaatgttttcataataaaaatagatattatgttcactt

SEQ ID NO: 3308 - DNA, 1959 bp, Rattus norvegicus
  Genbank Accession No. U14533
ggaattcggcacgagcagcaagcgctgttgctccgagctactcccaggcttctgaagttacttctgaagtgctgtggaggagcaatcaccggtgcggacacagagctcccgcctcccacagccatttccagggtaacgaagtaggagaccccctcctgcgaccccctcacgatcgccggtgcagtcatgagccccgcctccccctggtgcacggagaggggcggggcctggaacgaggctgcttcgtgacccactatgtcttcccccacaagttctctggacactcccttgcctgggaatggttctccccagcccagtacctcctccacttcacccactattaaggaggaggtacaggagactgatccacctccaggctctgaagggtccagctctgcctacatcgtggagccagaggatgaacctgagcgcaagcggaagaagggtccggccccgaagatgctgggccatgagctgtgccgcgtgtgcggggacaaggcctcgggcttccactacaatgtgctcagttgtgaaggctgcaaaggcttcttccggcgtagcgtggtccatggtggggccgggcgctatgcctgtcggggcagcggaacctgccagatggatgccttcatgcggcgcaagtgccagctctgcagactgcgcaagtgcaaggaggctggcatgcgggagcagtgcgtgctttctgaggagcagattcggaagaaaaagattcagaagcagcaacagcagcagccaccgcccccgactgagccagcatccggtagctcagcccggcctgcagcctcccctggcacttcggaagcaagtagccagggctccggggaaggagagggcatccagctgacagcggctcaggagctgatgatccaacagttagttgccgtgcagctgcagtgcaacaagcgatctttctccgaccagcctaaagtcacgccctggcccttgggtgcagaccctcagtcccgagacgctcgtcagcaacgctttgcccacttcactgagctagccatcatctcagtccaggagatcgtggacttcgccaagcaggtgccagggttcctgcagctgggccgggaggaccagatcgccctcctgaaggcatccaccatcgagatcatgttgctagagacagccagacgctacaaccacgagacagagtgcatcacgttcctgaaggacttcacctacagcaaggacgacttccaccgtgcaggcttgcaggtggagttcatcaatcccatctttgagttctctcgggctatgcgtcggctgggcctagacgatgcagagtatgccttgctcattgccatcaacatcttctcagcggaccggcctaatgtgcaggagcccagccgtgtggaggctctgcagcagccctatgtggaggccctcctctcctacacgaggatcaagcggccgcaggaccagctgcgcttcccacgaatgctcatgaagctggtgagcctgcgcaccctcagctccgtgcactcggagcaggttttcgcattgcgtctccaggacaagaagctgccgcctttgctgtccgagatctgggatgtgcatgagtaggggccgccacaagtgccccagccttggtggtgtctacttgcagatggacgcttcctttgcctttcctggggtgggaggacactgtcacagcccagtcccctgggctcgggctgagcgagtggcagttggcactagaaggtcccaccccacccgctgagtcttccaggagtggtgagggtcacaggccctagcctctgatctttaccagctgcccttcctcccgagcttacacctcagcctaccacaccatgcaccttgagtggagagaggttagggcaggtggctccccacagttgggagaccacaggccccctcttctgccccttttatttaataaaaaaaataaaataaaataaagctcgtgccgaattc

SEQ ID NO: 3309 - DNA, 2807 bp, Rattus norvegicus
  Genbank Accession No. U14746
ccgcgttaaagccggacggagtacttctattgctggcagacctgccccggagcgcgtaaacccgcacgctcgcgccgcccacgtccagctcgcgaatccggaggcgtccggttccaataatgccccggaaggcagctagtccagaggaggcagaaaggatgccgggctctgaagagatagaggctgggcggccgcggccggttttacgctctgtgaactcgcgcgaaccctctcaggtcatcttctgcaaccgcagcccgcgcgtcgtgctgcctttgtggctcaactttgatggtgagcctcagccctacccgaccttaccaccgggcaccggccgccgcatccacagctaccgaggtcacctttggctcttcagggatgcggggacccatgatggacttctggttaaccaaacggaactgtttgtgccatccctcaatgttgatggacagcctatttttgccaacatcacattgccagtgtataccctgaaagagcggtgccttcaggttgtacggagcctggtcaagcctgagaactacaggaggctggacatcgtcaggtcgctctatgaagacttggaagaccacccaaatgtgcggaaagacatacagcggctgacccaagagcacctcgagaatcaggccctgggagaggagcctgaaggagtccactgagattacttggtcctgaatttcggccttgatggtctgaaatcgatctacacataggacaggtcactttctttcggttttaaaatggttcattcttggagtaaaatatccatcatgtaaaagaaagttaactaacatcactgagctttgtagtgtttaagactaaacctgcaaagtgccaccgagtctgccctttctagagcattcatcagaagaagctgttttcagttttgcttcctagtaaggctggatgttcagcataaggatgttagtgtgagcgattcgcgaggagttgctctgtgtcctctaatctgaagaatacagcctcgtatgaacagagccccaccgctcacttggggaaggctgagaaggccctaatgctgggatggacatcctgtagaggcccagtgcctaatgtgtgtggagtcttcagtcagtgttggaggaacaaaccattgggtacttagtgggagagttggagggcctggctctctgtctgaggaaatcttaagtgtacacgtaaaggaacaacttagcagcttctgtttagaaagaactttctcttgagtttccatgtctcagcactttctttctactttgttagtttattttattttatttttgagacttgtgtagcccaggtcagcctcagtcactccggaggggatgctggtcttgaattccggatcctctgggagtgtgtcagcattgggagcacatgggtcgaccacagtctgctctgttcttgcttttcccattttgagacgggctcatactgtagccctgcctggcctcaagctagagtcagccctgtctccccacccagtctggctgcttagactgggtgggcttcccatattcactgccccagacagcagagacgagctgtccttgtgtttaggtctggttttgagagttccttctctgaggaagctgctggcaggagcagggtttctgttccttcccgtcagcccctagcattccagctgggcgccgcactctgctttggcaggcgctagttatgcttcgatgggagaggggagtgaagctccctcagccacacactccaaaccatgggtcccagagcagtctgcaatgagtagtagtttgtgggcagtcacagcttttcttacatattcaaatattgatgttcactacttctatcaaacattttgtagaacataattttttatttgtttttaattcctcagcagagaaaaatgagagaagcttgggcattgtgtgtggcacacaccagaaaggacagtcagctgagagggtgcagaaaggctcttgtgcgctggctctcagctgcatgtagtcctgtaacccagtgttctctctagtacacattttaattggttaaagcactttgtcctggccgagatcataaggtatatacagttttgtggcctgatttttcattgaacttcattgttttgttttcccctctttttcgtttttggttttgtttttggtttgttttttgctttttgttttatcaagatagagtttctctgtgtagcccaggctgtcctggaactccctttgtagaccaaacaactgattactggcctcaaacggagatctgtctgcctctgcctctccagtgctgggattgaagtatgcctaatcttcatctaacttagtaacttgtcttttccatgttactgcacacactgtctaaattccggtgtgctagcctctccctttgagggtgactgttgggagtatttgtctcagtcctgggctccttgagtgcagtctgatgctctaagatcagcaaaatcactgaacttaatactgacactcctgccgccctctcagcgtctctccttagtctgcagcattccgtgagtgaagcggcacaggccagtgtggagcctgtgtgtgggaagtcagcaggtgccgagctattgcaacattggttttattttttaagcctatctctgtctctaaaagatgtaatgtttgtcttatttaactggaagtttgaatactgttctctgtgccttaggacatgagtcacttgtccttgcacatcctgtaagtgtgttcctcagactttgtactctcctttgagttctctgaaaaagctgacctttagtacaataaacggtgctaagtgaagga

SEQ ID NO: 3310 - DNA, 408 bp, Rattus norvegicus
  Genbank Accession No. U15764
atgatgcaggaccgagaagatcagtccatcctttgcacgggtgagtctggagcaggcaagacagagaacaccaagaaagtcatccagtacctggcacatgtggcctcctcacacaagagcaagaaggaccagggggagctggagcgccaactgctgcaggccaaccctatcctagaggcctttggaaacgccaagacggtgaagaatgacaactcttcacgatttggtaaattcattcgtatcaactttgatgtcaacggctacatcgttggggccaacattgagacttatcttctggagaaatctcgtgctatccgccaagccaaggaggaacgaaccttccacattttttactacctgctgtctggggccggagagcacctgaagactgatctcctgttggagcca

SEQ ID NO: 3311 - DNA, 2383 bp, Rattus norvegicus
  Genbank Accession No. U17697
gctaataagtgtgtcctttgctgacggtaccgagaaaccccgccccgtctgtacgtcctggtggcgcgcgggccggctgtgggtgtgggaagggcccgggtcagtcgacacccggaaggccggggccgcctcccgacgcccacctactagcttctccagctccatctttcccgagaagcggcagggacctccggcctccagcttaccgggcggatcgaagcagcggtcgggatgtactgctgggcttgctgcagtcaggcggctcggtgctcgggcaggcgatggagcaggtgacaggaggcaacctgctttccacgctgctcatcgcctgcgccttcacgcttagccttgtctacctgttccgcctcgcagtgggccacatggtccagctgcccgctggagcgaaaagtccgccatatatttactctccaattccgttccttggccacgcgatagcatttgggaaaagtccaattgagttcctggaaaatgcatatgagaagtacggacctgtgtttagctttaccatggtgggcaagactttcacttaccttttggggagtgacgcagccgccctgctcttcaacagtaagaacgaagacctgaatgcggaagaggtctacggtcggctgacaacgcccgtgtttgggaagggagttgcatacgacgtgccaaatgcagttttcctggaacagaagaaaatactaaaaagcggccttaacatagcccacttcaagcagtatgtttctatcattgaaaaagaagcgaagaagtactttaaaagttggggagaaagcggagaaagaaatgtgtttgaagcgctgtctgagctcataattttaacagctagccattgcttacatggaaaggaaattagaagtcagctcaacgagaaggtggctcagctgtacgcagacctggatggaggctttagccatgccgcctggctgttgccaggctggctgcccctgccgagtttcaggcgcagggacagagcccatcgagagatcaagaatattttctacaaggccatccagaaacgtaggctgtcaaaagaaccagccgaggacattcttcaaactttactggattctacatacaaggatgggcgtcctctgacggacgacgagatcgcagggatgctcatcggactgctgctggccggacagcacacatcctccaccaccagtgcctggatgggcttctttctggccagagataaaccacttcaagacaaatgctacttagaacagaaaacggtgtgcggggaggatctgcctcccttaacttatgagcagttgaaggatctgaatttacttgatagatgcataaaagaaacactaagactgaggcctcctataatgaccatgatgagaatggccaagacccctcagactgtggctgggtacaccattcctccaggacatcaggtgtgtgtttctccaactgtcaatcaaagactgaaagactcctgggtagaacgcttggacttcaatcctgaccgctacctacaggacaacccagcgtcgggagagaagtttgcctatgtgccgtttggagccgggcgccatcgttgtattggagaaaattttgcctatgttcaaattaagacaatttggtccactatgcttcgtttatatgaatttgacctcatcaatggatattttcccagtgtgaattatacaacaatgattcataccccagaaaacccagtaatccgttacaaacgaagatcaaaatgaagaaaggaacaaggagccagtgtggagacgggactgcaagctgcagcttggcagagaatgaagctttgacacagctttcatactgtactgttttttaagtgtgtggttctgaaagccagtttgattttaatgttttattaactcggtgatttttgtcagacctaatggcatttgaaacagttataatagttctgataggatttcagggaagccaagtttatgttagaaatcgtttaggggagcctcggtattcagagatgatacagaatatagcatccaggtaactaacttcagaagcacacgttgccgtagggagattccggcttggaactagtttgggaagttttaagcctggtcagatgctacagaggcaatgggtcattggtgtggttgggccacttctgtgcgtaaagatgtgagagggtgaaggataagttttctgcgaacgtctagatggtgtgagtgccctttgtagtgttaactgagagcaccactccagcgagatggcagcaatcttggaccttatcttgataaccttatttcctaaaaataataaatactaaagagtacttatgttattggttccagaaaaatccaaaatcaaatccttgtggaatttttaattttaattaaactcgtgc

SEQ ID NO: 3312 - DNA, 660 bp, Rattus norvegicus
  Genbank Accession No. U19485
ttcccggtgtatgactatgacccttcctctctgcaagaagctctcagtgcctcagtggctaaggtgaactcgcaatccctgagtccttacctgtttcgggcgacgcggagctccctgaagagagttaatgtcctggatgaagacacactggtcatgaacttagagttcaccgttcaggaaactacatgcctaagagagtctggtgatccctccacctgcgccttccaaaggggctactctgtgccaacagctgcttgcaggagcacagtgcagatgtccaagggacaggtgaaggatgtgtgggctcactgccgctggcgttccacatccgagtccaacagcagtgaggagatgatttttggggacatggcaagatcccaccgacgaagaaatgattatctacttggctttctttatgatgaacccaaaggagagcagttctatgaccggtcgattgagatcacgaggaggggacatcctcctgcccatagaaggttcctgaacctccaacgcagagccagagtcaattctggctttgagtgacatcctggagattccatgaaagaaagagaagcagaagctgaaatgaaggacatggagaattgtgtctttttcctttgataagctccactttgcaataaagatcttccccttcctgta

SEQ ID NO: 3313 - DNA, 2310 bp, Rattus norvegicus
  Genbank Accession No. U19614
tagaatcgaaccgcggaaagtccatcgtccctatcgaccaacagctacgtaaacaactatggcgggagagaggtggcgggccgaggggctgggagaaggatgggccatctacgtcacacccagagcccccatccgggagggaaggcggaggctcgccactcaaaatggcgacgggagtgacgcgcctgcgtacgaaactcatccgtcgcgccacggacgacgggaagtgaggttttcagaagagccgccagaagtgtacggcgacttcgagccccgggcggccaaagaaaggtctccgggggaaagacgaaccccgccagaaaagttccggtcggattctgcgaaagaggaagtgagagaaagcgcttacaatcttcggtctcgacaacggaggcagcggggaccccaggaagccgaggagatgaagacgcggaggtctactcgtctggagcagcactcacagcaggcgcagcagcagctgtcaccggctacgagcgggcgaggattacgggacgctcagtccttaagtgaggaccgcggagaggatgaaccttcttcccaacctgttacaagccaaacagtctcaaagaaaactgtcaggacaccagagacttcagtgatgagtgaagatcctatcagtaacttatgcagacccccattaagaagcccaagacctgacgcttccattgtccaacacatcaacccctttgaggaagatgaagccgcagtagcagccggtcaccatccagactcactgtgggggttaccacacagtcggggggacttcacagctcatgagaatcaaccctcactgctgcccacaggatgtcaaaaaaaccctcaagagtgggttgaacaagctgtgagaatgaggactagaatggcatataacaacattcagaaatcagactttggaaaccaatctccatcaacctccaggcaacaagcagctgtacaacccccagatgagtcttctgtcaagataaaatggtggctgctgatacttgttgctgctctggccatgggaatatattggttctttcatactcctgtagtagaaatcactgcagctcaggatgctgcggaagtgctcaagtgtctgagtgaacagatcgccgatgcctactcttccttccgcagtgtccgtgccatccggatcgacggagcaggcaaagctgctcaagacagtgacctcgttaagcacgaagtcgatcaggaactgacagatggatttagaaatggccagaatgcagctgtggtccaccgcttcgaatccctgcctgcaggctcaaccttgatcttctataaatactgtgaccatgaaaacgcagccttcaaagatgtggccctcgtcttgacggtactgttggaggagcagacgctggaagccagtctaggcctaaaggaaattgaggagaaagtgagggatttccttaaagtcaagttcaccagctctgacacggccaactcctacaaccacatggacccagacaagctcaatggactctggagccgcatctcccacctcgtgctgcccgtgcagcctgagaatgctctgaaagcaggcagctgcttatgagggaaagaagcggaaatcctgtctcgagtttgaaccattttcagactttgtaaccagagacggattttggagcagtttttgaaaactggtttctttttaaaggaagtaaagttcatacataaaggtggaataactaaatcatttatgcagcctacttctctgtgatttgggagaatcgtttttctatttccacctagaaccatgttaaagatatttagcatagtgcacagtatatgcagtccccgagtgtctgctaccttgattctggccgaatcattcttgctgtgtgaccagcgagaagggctaggttcctctctcaagcaatcagctttctattgaattttggatttgtgtttgtgaccttattaatgtctgacaaccccctaattgtagctatggatttccctgttacttcttctctcataccattgaaatgtgtggtccttagtttctacctataaaaataaaactgggtgtgcagtttagccagcccctcccccactggtttgtagagagggagacaagggtgtgggaggtagaaagagaagagaaattgtttaatagggaagggaaggaaggaaggtaaaaagatgttgcaagctgggcatggtaagccagcctgttatcccagtattgtcccagtagtcaggaggagcagaggttcaaggtcagcctcatctatagagtgagttttctgccacctggactacatgagacactgtcttaaaaac

SEQ ID NO: 3314 - DNA, 2996 bp, Rattus norvegicus
  Genbank Accession No. U19893
gtggggcgggctgaaagcagctgaagcggcggccgagtcgtaggctccgacataggggcggcagctgagcggtagcggaccggctggcgggctacgaaaagacgagggatggtggactatcacgccgcgaaccaggcgtaccagtacggcccaagcagcggcggcaatggacacgggcggcggcggaggcatgggcgactacatgcgcccaggaggagactgggaccgggacctgctgttggacccggcctgggagaagcagcagcgcaagaccttcacagcctggtgcaactcccatctgcggaaggctggcactcagatcgagaacatcgatgaggacttccgggatggcttaaacttcatgcttctgctggaggtcatttcaggggagcggttgcctaagccagagcgggggaagatgcgagtgcacaagatcaacaatgtaaacaaagccctggacttcatcgccagcaagggagtcaagctggtgtccattggggcagaagagatcgtggatggcaatgcaaagatgaccctgggaatgatctggaccatcatcctcaggttcgccatccaagacatctctgtggaagagacctctgccaaggaaggactcctcctctggtgccagagaaagacagccccgtataaaaacgtcaacgtccagaacttccatatcagctggaaggatggtctggccttcaacgcgctcatccaccggcacagacctgagctgattgagtatgacaaactgaggaaggatgatccagtcaccaacctaaacaatgcatttgaagtggctgagaaataccttgatatccccaagatgttggatgctgaagacatcgtgaacacaggccggcccgacgagaaggccataatgacatatgtgtccagcttttaccatgccttttcaggagcgcagaaggcgagactggtgccaaccggcatcttgaaggtgctggttgtgaaccaggaaaatgcgcacctgatggaagattacgagcggctggcagtggatcttctagagtggatccggcgcaccatcccctggctggaagaccgtgtgcctcagaagaccatccaggagatgcagcagaagctggaggacttccgagactataggcgtgtgcacaagccccccaaggtacaggagaagtgtcagctggagatcaacttcaacaccctgcagaccaagctgcgggtgagcaaccggcctgccttcatgccctccgagggcaggatggtctcggacatcaacaatgggtggcaacatctggagcaggctgagaagggctatgaagaatggctcttgaatgaaatcccgaggctggaacgactgatcaacctggcagagaaatcccggcagaaggcttccatccatgaaggctggaccgatgggaaggaggccattctgcagcaccgggactatgagacagccaccctgtcagacatcaaagctctgatcccaaaacatgaggcctttgagagtgacctggcggcgcaccaggaccgcgtggagcagatcgcggctattgcccaggagctcaacgaactggactactatgactcccacaacgtcaacacacggtgccagaagatctgtgaccagtgggataacctgggctctctgacccacagtcgcagggaagccttggagaaaacagagaaacagctggagaccatcgaccagctacacttggagtatgctaagcgggccgcgcccttcaacaactggatggagagtgccatggaggacctgcaggacatgttcatcgtccacaccatcgaggagatcgagggcctgatctcagcccacgaccagttcaagtccaccctgccagatgccgacagggagcgtgaggccatcctggccatccacaaagaggcccaaaggatcgctgagagcaatcacatcaagctgtcgggcagcaacccctacaccagcgttacaccccagatcatcaactccaaatgggagaaggtgcagcagctggtgccgaagcgggaccacgcactcctggaagagcagagcaagcagcaatccaatgagcaccttcgccgacagtttgccagccaagccaatatggtggggccctggatccagaccaagatggaggagattgggcgcatctccatcgagatgaacgggactctggaagaccagctgagtcacttgaagcagtacgagcgcagcattgtggactacaagcccaacctggacttgctggagcagcagcaccagctcatccaggaggccctcatcttcgacaacaagcacaccaactacacaatggagcacctccgtgtgggctgggagcagctgctcaccaccattgcccgcaccatcaacgaggtagagaatcagatcctcacccgagatgccaagggcatcagccaggagcaaatgcaggagttcagagcctccttcaaccactttgacaaggaccatggcggggcactggggcctgaggagttcaagggctgcctcatcagcctgggctacgacgtggagaatgaccggcagggtgatgctgagttcaaccggatcatgagtgtggtcgaccccaaccatagtggcctcgtgaccttccaagccttcattgacttcatgtcaaaggagaccacagacacagacaccgccgatcaggtcatcggctccttcaaggtcctggccggggacaagaacttcatcactgctgaggaacttcggagagagctgccccctgaccaggctgagtattgcatcgcccgcatggccgcctaccagggccctgatgctgctccaggcgcccttgactacaagtccttctctacagccctctatggggagagcgacctgtgagccctcagccaccctgaacagactcccttggcctccggagggctgaggagccctgccccaccctgactcagtatctatgctaagagctctttgtggtctctagggtcagaggcagggaggggctaggcaggcctcttttctcagtctggta

SEQ ID NO: 3315 - DNA, 599 bp, Rattus norvegicus
  Genbank Accession No. U20194
ggaaaggggagatgctgtgcagtacatcccagccatcatcaagtctaaggctgagcccctgtatgaacttgtgacagccacagactttgcgtactccagcacagtgaaacagaacatgaagaaggccctagaagaattccagaaggaggtcagctcctgccgctgtgctccgtgcaggaacaatggagtccccatcctgaaagaatcccgctgtgagtgcatctgtcctgtcggtcttcaaggtgtagcctgtgaggttaccaatcggaaagatatccccatagatgggaagtggagttgctggtctgactggtctccatgctctggaggacgcaaaacaagacaaaggcagtgcaacaacccggcacctcagagaggaggcagcccctgctcaggtcctgcttcagaaacactcaactgttaaagggagggaacacagccggcaggtgatcatcagggctctaaccctctcacacttagccaggctttagcacaccagctcccacccagggctaccacaacaaaaagcaatgccactctgccctttaaaggtttagtttcttcagtgcatgttaattccagtaaacagtgggtggagc

SEQ ID NO: 3316 - DNA, 3628 bp, Rattus norvegicus
  Genbank Accession No. U20796
cgctccaactgtgatgccaacggcaaccccaagaacacggatgtctctagcattgacggtgttctcaagagcgaccgcacagactgtcctgtgaaaacaggcaaacctggtgcccctggcatgaccaagagtcacagcggaatgacaaaatttagtggcatggttctgctatgtaaagtctgtggggatgtggcctcaggattccactatggagttcatgcttgtgaaggctgtaagggcttcttcaggaggagcattcagcagaacatccagtacaagaagtgcctgaagaacgagaattgctccatcatgaggatgaacaggaaccgctgccagcagtgccgcttcaagaagtgtctgtccgtgggaatgtcgcgggacgctgttcgatttgggcggattcccaagcgtgaaaaacagagaatgctaattgagatgcaaagtgcaatgaagaccatgatgagcacccagttcggtggccacctgcagagtgacaccttagcagagccgcatgagcagtcagtaccaccggctcaggagcagctgcggcccaagccccagctggagcaagaaaacatcaaaagcacccctcctccttctgattttgcaaaggaggaagtgattggcatggtgaccagagcccacaaggatacctttctgtataatcaggaacatcgagaaaactcatctgagagcatgccaccccatagaggagaacggattcccaggaatgtggagcaatataatttaaatcatgaccatcgtggcggtgggcttcacagccacttcccctgtagtgagagccagcagcatctcagtggacagtacaaagggaggaacatgatgcactacccaaacgggcataccgtttgtatttcgaatggacactgtgtgaacttctccagtgcttaccctcaaagagtctgtgataggattccagtaggtggatgttctcagactgagagcaggaatagctacctgtgcagcactggagggaggatgcatctggtttgtcctatgagcaagtctccatatgtggatcctcagaaatctggacatgaaatctgggaagaattttcaatgagttttaccccagcagtaaaagaggtggtagaatttgcaaaacgtattcctggcttccgagatctgtctcagcatgatcaggtcaacctgttaaaagctgggacttttgaggttttaatggtgcgatttgcttcgttatttgatgcaaaggagcggactgtcaccttcctgagtggtaagaagtacagtgtggatgacctgcactccatgggagcaggcgatctgctcagctctatgtttgagttcagcgagaagctgaatggcctccagctcagcgacgaggaaatgagcttgttcacagctgttgttctggtgtctgcagatcgatctggaattgaaaatgtcaactcagtggaggctctgcaggaaacactcatccgtgcactaaggaccttaataatgaaaaaccatccaaatgaggcctccatttttacaaaattacttctaaagttgccagatcttcgatctttaaacaacatgcactctgaggaactcttggcctttaaagttcatccttaaggcctttgaacatgaactgatgctaatgtacattttatgctgagatgtttatttatatgtgtataccatattgtgaaaatagaaaaggacttagcgccaggtcctggactgtctgtagtcagtcaccagtagctgttcagatgagaactcattgtcttgttagacattggcccaccctccctgtagaccaaccagctgtgttgcacttagactggagaagttacactgaattataatcacactgaatgttagactttttcatctgccaaagccaaaataccatgttgatctccccggggtataaatctagcgcacattggagatatagggaggacttaaacattacccctgtgtgacaggattcgggtgccccacaagattgatatgtggtaaaggagactgagagacaagaggtgtgctctggcactgacaaagaacatggtcctgggagtcccctgggttgtgggaaatgataattgatagtgtccccaatgtcctgcctcacagagatactgaaaaaatgtccataaagcgtctttacctcttgggagataggcactatgtaaataaggtgaagtttttattataattgctcataataatattcttgtcttatctctaagcatttctgggaaactttgagagtccacaccaatttattcagggttccagctcaagtggggttccctactgataaacacatattccaggtttatggacacgtcagatagtatgtgtacatagtgtgtatgtgaatataattatatataaaatcttacttcacaatattttaaactgtgaagaactttatcatacaataaacttaaacaagaggtgtcaaggacccaaattaggtgcattttacctgttgctgctgatgtataaccattgctttatgatgtttagatggtagaatactgaagttaattctcatatttttgtttaagcaacatttaatgtaaaagtgtaatgagcagtcaaatccaggtcagaaaaaacatggattttagaatacatctttgatacaatctgcagttgaaggtaatagatgtttcagtgtttcagatttctaccttgcgctattaatagaggtggtgttgctgcttcttacctgctgcaggtggatggcagatttggattctgtgtggaggatgttttgtttggggaaaacctttgtgacctattggcatgtctgtgcccaagtccacttttctttctttcccttaaataacactacagggattttgtcaatttagatttaatataatttgaaaaacctttaataagtgacctacctacaggcttagagatcgtggtaggagaggtagccaaagttaaagattcgtgaacaacacccctgttcccccctgagctgtaattcattgtattttgggggcaaaattattttctgtgtaatgctagattatgtgaaattgtaaagacattaagaacatgctttactatttaaagcatgcctattacttttatgacatgtaagcagaatgccttattttgtagttctaacttgttgctacaggatttgaacttctgtggtacagttaagagagcttgaaaaagataaacccctgttgtcgaagaagaaagctgatggtgcgtctgttatgcagtagggaccataactgctgtttacattcagtgggtatggctttcgtgggatacacagctagggtttgtgaattctttacatgatagcattatcattttatatttttttcaaggataaaccaatgcatagttttcttctatgggggatagagagctttgtgaagtaatactgaaaacctcaaaggttatgttgattcttcatttttgcctttttcataagtgtctttataacatgtatctttaaagcagtttgcgtctttggaaatatgtaaccagagctgttagtgttgcttgtgatgcttgagttagggtcagtatatacatgtacacacctagatagaagcatgtagatttgtattttgtctcgtaaaattttatttcaataaattcttcctgaagt

SEQ ID NO: 3317 - DNA, 2155 bp, Rattus norvegicus
  Genbank Accession No. U21662
ccagttcctagggctacaggccaaggcgacggcgccgcccgcccgccccttccgtgcagaggccgccagctcctttccgcgcccggcctcccggccctggagaccatgaggttccgcatctacaaacggaaggtgctaatcctgacgctcgtggtggccgcctgcggcttcgtcctctggagtagcaatgggcgacaaaggaagaacgacgcccttgccccgccgctgctggactcggagcccctacggggtgcgggccatttcgccgcgtccgtaggcatccgcagggtttctaacgactcggccgctcctctggttcccgcggtcccgcggccggaggtggacaacctaacgctgcggtaccggtccctagtgtaccagttgaactttgatcagatgctgaggaatgtcgataaagacggcacctggagtccgggggagctggtgctggtggtccaagtgcataacaggccggaatacctcaggctgctgatagactcgcttcgaaaagcccagggtattcgcgaagtcctagtcatctttagccatgacttctggtcggcagagatcaacagtctgatctctagtgtggacttctgtccggttctgcaagtgttctttccgttcagcattcagctgtacccgagtgagtttccgggtagtgatcccagagattgccccagagacctgaagaagaatgcagctctcaagttggggtgcatcaatgccgaatacccagactccttcggccattacagagaggccaaattctcgcaaaccaaacatcactggtggtggaagctgcattttgtatgggaaagagtcaaagttcttcaagattacactggccttatacttttcctggaagaggaccactacttagccccagacttttaccatgtcttcaaaaagatgtggaaattgaagcagcaggagtgtcctgggtgtgacgtcctctctctagggacctacaccaccattcggagtttctatggtattgctgacaaagtagatgtgaaaacttggaaatcgacagagcacaatatggggctagccttgacccgagatgcatatcagaagcttatcgagtgcacggacactttctgtacttacgatgattataactgggactggactcttcaatatttgactctagcttgtcttcctaaagtctggaaagtcttagttcctcaagctcctaggatttttcatgctggagactgtggtatgcatcacaagaaaacatgtaggccatccacccagagtgcccaaattgagtcattattaaataataataaacagtacctgtttccagaaactctagttatcggtgagaagtttcctatggcagccatttccccacctaggaaaaatggagggtggggagatattagggaccatgaactctgtaaaagttatagaagactgcagtgaggaaaaaattcacaattgcaaaagcaacagtgacagtcttctattttttatatttgtctcaatgggatatacaattgaataaacgatataggaactggtttctgctttaatacataaacttcttgtaaaaggtgtccaaatacatagtaatccttttcagttatgactgattaaaatttcaaactgaaattttcattttgagacttgggttttaaaattcagtctgtatctgcttaaaagtaatgattagattattggtaaaaagaaagggggaaatttgatttaaatcacatctgttaatctttttatctaaaactttgtatacttttccactttcaaaagttattttaagtacagcaagatttatttaaaactgtcaacagtataaaaagtattacaataaatcattagagtattgctgggacagacccagtttcactattgacacagtgattaggaattgtttgactggtttaataactcagaaattaagtttgttaagcaccctgttggaagagtcattttcagtattactgatccctgtgctattgtgttaagatttgcctgtgctttcaaccttcatattacatgattcttttggaatgtatttgattaataagaaagtttaaacaatgttttcacctcaatgtagaaatacagtggttttgacttttttctttttagtgctgccaaaataaaatactcatttttgccggaattc

SEQ ID NO: 3318 - DNA, 428 bp, Rattus norvegicus
  Genbank Accession No. U21719
caccctaacctaaaccttttgaattttgaattaatgggtaccctatagaaaaaatgacctgcggaaaaccaaacagtgaagggaaagaaggaaagaattccaattgacacaatttaaataaaatatggcttttcaaataaaggaagagaagtttcttttgggcacacaatctaaacaatatttatgtataattcagctcttatttggcttaaatgggcttagtgggaaatgttatcatttttactattttctacagagaaaatattttccagtttatcaagtaactctggactttggaattacctgtttttatgttccagctgtctatatagttgtttctctgaaattgtacataaaatgtttttacattaaaatgaattactgtataaagtactgcattatgcataataaagatactaatgctttat

SEQ ID NO: 3319 - DNA, 463 bp, Rattus norvegicus
  Genbank Accession No. U21721
cccacctccggctgccggcgacaccggtctttgcagtctgggaccccgtgcgatctttagcccggtgcacgatgcccccgaaaaagggaggagatggacttaaaccgcctccgatcattggaaggtttggaacctcactgaaaattggtactgttggattgccaaatgttgggaagtctaccttcttcaatgtgttaaccaatagtcaggcctcagcagaaaacttccctttctgcactattgaccctaacgagagcagagtgcctgtgccagacgagaggtttgacttccttttgccagtgtcacaagccagcaagcaagattcctgcttttccttaatgttagtgggattattgctgggccttgtgaaaggagctcacaaatgggcaggggtttgggggaattgccttccttcttcaaatttaagggccgtgatggggattttcaccttaacgcgttcttt

SEQ ID NO: 3320 - DNA, 759 bp, Rattus norvegicus
  Genbank Accession No. U24174
ggcacgagcagtgcccgagttaaggggaattggaggcaggcgccgatccacagcgatatcgagacactcagagccacaggcaccatgtccgatcctggtgatgtccgacctgttccacacaggagcaaagtatgccgtcgtctgttcggtcccgtggacagtgagcagttgagccgcgattgcgatgcgctcatggcgagctgtctccaggaggcccgagaacggtggaactttgacttcgccactgagacgccactggagggcaactacgtctgggagcgtgttcggagcccagggctgcccaagatctacctgagccctgggtcccgccgccgtgatgacctgggaggggacaagaggcccagtacctcctcggccctgctgcaggggccagggccagctccggaggaccacgtggccttgtcgctgtcttgcactctggtgtctcacgcccctgagaggcctgaagactccccgggcgggaccgggacatctcagggccgaaaacggaggcagaccagcctaacagatttctatcactccaagcgccgattggtcttctgcaagagaaagccctgaagtgcccacgggaggctcgccttcttctgctgtgggtcaggaggcctcttccccatcttctgccttagccttcattcagtgtgtcttaattattatttgtgttttaatttaaacttctcctgtatatactctgcctgccccctcccctcgtgcaattcgatatacaagcttatcgatacc

SEQ ID NO: 3321 - DNA, 1821 bp, Rattus norvegicus
  Genbank Accession No. U24282
ggtcggagaaggtgaagggcccccgggggcttcggggcccgcggccaccatgctgcgctccctgctgcttcactctctgaggctctgcgcccagaccgcctcgtgcctcgtgctgttcccgcgcttcctaggcacggccttcatgctctggcttttagatttcttgtgcatccgcaagcatttcctgcgccgtcgtcatcctgaccaccccgagcccgaagtagagctcaacagtgaaggtgaggagatgccccctgacgacccacccatctgcgtatccgacgacaaccggctgtgcaccctggcctctctcaaggccgtgtggcatggccagaagttggatttcttcaagcaggcccatgagggtggcccagcacctaactcggaggtcgtccggcctgatggcttccagagccagcgcatcctcgactacgcacaagggacccgcccgttggtgctcaattttggcagctgtacctgaccaccgttcatggcgcggatgagcgccttccagcgcctggtcaccaagtaccagcgcgacgttgacttccttatcatctacatcgaggaagcccacccatccgatggctgggtcaccacagattcaccctacgtcatcccacagcaccgcagcttggaggaccgtgtcagcgcagcaagagtacttcagcaaggcgcacctggctgtgctctggttctggacacgatggccaactccagcagttccgcatatggtgcctattttgagcgcctctacgtcatccagagcggcaccatcatgtaccagggaggccgtggccccgacggttaccaggtgtctgagttgcgcacttggttggagcgctatgacgagcagttgcatggtactaggccacgtcgactctaaaaaaccaagggacaagtgactgaattggtgggctgggtcttctgggccttcgaagctcatgtgcgaatgctccaaaagaagtcaaggttttcaggggtcccgtgacacagatgagcacagccacagaactcaggctgagtctggctaacttgagactctgctatagtgactcccttttggtactttttggcttgctttctggagcattgctgtggctcgaactggcaactttgtccctgctgaagtttacctgctggactttctgacacctgctccccagcgctatttcagcaaagcgcaataagtcgccagcatctcacagctcgggacttgttggccacgcccgcgcgccctgagcgcagctgggttccagcagcgcctccggctctagctagttgcctggcacccacctgtcgagagcagggagtcctgctgcttttgtgtttatttcttatccctgggttgggggaggggctcaagataaagggtgggcagggtaatttccccgcctagctttaggtgcgctggaaccctggctgctgatgacgaaccgcctctaactgggcttgaccacgggtcggctctgaattgcagaggggctcgaaacagcgcctaaagtaagagggggaaagtgctctgggttccacggggaaccgtcaaaaacagggtgaaagagggacatggtaaggggtgggcttcaggaccaaaggaagcggcttggggcactggcgaggttcgcaggtccccaagagggaggctaggactccttggagaagggattaattggttcgaagacaaggagatggggaagagcctgggagtcctaagcagaaagagcgggttgtggggtggggtgaaaaccagtcagtgaatgttgtgttggaaacgttccttgtgtataaacttttaagttacaataataaagacttgaagga

SEQ ID NO: 3322 - DNA, 2681 bp, Rattus norvegicus
  Genbank Accession No. U26033
gagtgcagagagccaagccgggtgcaggagttttcttactgtgactataccatggaaaatcaattggctaagtcaattgaagaacgaacattccagtaccaggactctcttccgcccttgcccgttccttcgcttgaagaatcactgaagaagtaccttgagtcagtgaagccatttgcaaatgaagacgaatacaagaaaactgaagaaatagttcaaaagtttcaagatggagttggcaagacattgcatcagaagttacttgaaagggctaaaggaaaaagaaactggctggaagagtggtggctcaatgtcgcctacttggatgtgcgtattccatcacaactgaacgtgaactttgtgggtccgtctccccactttgaacactactggcctgcaagggaaggcactcagttggaaagaggaagcatactactgtggcacaacttgaactactggcagctgctaagaagagaaaaattgcctgtacataaatctggaaatactcctctagacatgaaccaattccggatgctgttttctacctgcaaggttccgggaatcactagagattcgattatgaattattttaagactgagagcgaggggcattgtccgacccacattgccgtgctgtgtcgaggcagagcgtttgtcttcgatgtcctccatgacggttgtttgatcaccccaccagaacttctcagacaactgacatacatctaccagaaatgctggaatgaacctgttgggcccagtatagcggcattaaccagtgaggagcgaactcggtgggcgaaggcaagagaatatctgattggtcttgatccagagaacttgactttattagaaaaaattcaatccagtttatttgtgtattccatagaagacaccagtccacatgcaaccccagaaaatttttctcaggtctttgaaatgcttcttggtggagatccagcagtgcgctggggtgacaagtcctataatctgatttcctttgctaacggaatatttggctgtagctgtgatcatgctccttatgatgcaatgcttatggtgaacattgctcactatgttgatgagaagctcctagagacggaagggagatggaagggttcagaaaaagtccgggatataccgttgccagaggagctggctttcactgtggatgagaagatactgaatgacgtctaccaagccaaagcccaacacctcaaagcagcatctgatttacagatagcagcatctaccttcacatcttttggcaaaaagctcactaagaaggaggcccttcaccctgacacctttattcagctcgctcttcagctcgcctactacagacttcatggacgccccggttgctgctatgaaacagctatgacaagatacttttaccatggccgaacagagactgtgcgatcttgtacagtggaggccgtcaggtggtgccagtccatgcaggatccttctgccagtctccttgaacgtcagcaaaagatgttagacgcttttgcaaagcataacaagatgatgagagattgttcccatggaaaaggatttgaccgtcaccttttaggccttttgctcatagcaaaagaggaaggcctccctgttccagaactgtttgaggatccacttttctccagaagtggaggaggtgggaattttgtgctgtcaacaagtctggttggttacttacgaattcagggagtcgtggttcccatggtacataatggatacggctttttctaccacatcagagatgacaggtttgtggtgacatgttcatcctggaggtcatgtcttgagactgatgcagaaaagttagtggagatgatttttcatgctttccacgatatgatacatctgatgaacacggctcatctttagagactcagagacatacaggtcacagaaactgggtacggagaatgggatggtgatacgacatggaaggaatgttgacttaaaggaaacctgttaatgcagggattagagagggatgcactctagatttattctaccttaaagccttctgttgcaacagcaatgcaaactcagacatagtgaatagaactatgcaatgttttaagcctcaacaatgcacatctgtatattttaacaatacaaatcctactctaatgttaaaatatttttgttggcacatgtgtaggttgcaagtcctctgtgaacataattatagagtatttctcaagcactttaatactttctaatggccagagggtataaaacccatggttagatgctaatttccctgacatcagtgccttctacatccagcacaggagtacaagcctatgagatttcatgggaaaaccactattgttcaatattgatctaaaatagctcctttgaacagacaaaagtatcaagttgtattagaaaagaatattagcaaaactcattatgatatgttgtaattaattttgtgaatataaaatcaaaacacttccatttaaatctacttggtagagttagtggctttaaagggttaaatgtcgagtatgattctcagaactttataattatttcccactgttattcaaaatgttagcatatagacattctcccattgtaattcagtgtttatattctcaaagaataaagcatccagaatccttgtaatttctcatttattttcaataaaaatgattcctgat

SEQ ID NO: 3323 - DNA, 15420 bp, Rattus norvegicus
  Genbank Accession No. U28975
ttattggtccttggtaaaaaggcaactttgggaagtcaagtcctaccttgccaaagggttgaatgattgaagaactcaaaagtatgattgccttttgagggcatagccctcttgtaactgccaccaaaacaccaaagccgtgcgagcatggcttctttaagtgaatacctttgagagggggaaccagccctaggcactggatgcttacttccccctcatccctgcccagagaagaggaaaccaagccagggcaacaaaggacctaatgagtcaagggctgatttgtataaataaacagcggcctacctttcctcgggacttctgtgacttcctgtgggcaagaggtggcctttgacaggtggctattggtgagcaagtgactctggataggccttatgcagagccactcttcctgggacccggcccagtgatagttgaaccacctagtccacctaacccaggtttcctcccacgactcttttgagaactcttaaggctctctaaggtgatccttctgaaagattctgtccacatctgggattggtggtgtgagcttccccatgcggctcgcacctcctgttttcccttcctcctctccagctcacctgcccaccacatggccttagatgcttcctgtacaccccacccccacccccacccccgttggcaagaacctcattccagcacctctgatgcaccaagtccccttcagttagctcagctggcacttgctagctgaccactgtgccaggacctaggcccagaagagtaaaggaaactcagttccaagccctcaggtaaccactgactcagggctgataggcttctgacccaatgtatgtacctcgaggtgataaggacctagtaaagatttgtacaaaccagaaaggaagatgtgtgctcattctgctggagaagtgttgggagggccacggaaggagatggcattcaggcctcgtgataaaagactcgcaaagtgccattggatagccgtgttgtaaaggcaggaggtgtgactacatctggcgtgtcccgtatgaccagtgacacgccaaaagcccagccaccctcgaccccaagctgagtggcaggcactagggttggaggcaggcatcgggcttgccactgatccaagctgaacgcgccactccgcttcctggggaaaggttgcagtcactcacagatgatgagggacttggaccccatcccagttctgtgttcattttttttttttatcttttataggattgggcatctggagagtcaaaaatagacctttgcccattgggacaggaagcctggagaataagggacctggggggagggctgagaaggcagtgaggcaagggctgaaccccagggtcattcagaagggagctggatcaggaatggcctggcagagcgagtgggtacagagagaggacattgggttcttctagctggtggtgtgggctcatatcctaagagtgttacattagaatctaacctccgctctgaccacaatatctgcagaggcttcctctcacagataccaccggtttatggtggaattactgtgaacccctagctaacagagatcctggccggttctcacctgggaagtccacgctggacctcggtgtctatcatattcctgtccccattgcctgcctcctgcctgggaatggcttgggctgtgaaaccaaccccatgctcagaaaagttaagaagtgacttcctttccgccatgtggtgtctttagagatccttgttccacctctctctgtgctggcacctgattgtcttcagaggccccaccatgcccttctatgcatctgtctgtggcattagtgacttttctattgtctgtttttgtttttatatttgttttgtcaagggcttctctacttagccctggcagtcttggaattcactctgtagaccaggctcaccttgaactcccagagatctgcctgcctctgtgtctgaagtgctgggtttaaaggtgtgcgccaggggctggggatttggctcagtggtagagcgcttgcctagtaagcgcaaggccctgggttcggttctcagctccggaaaaaaaaaaaaaggaaaaaaaagtgcttggttaaaggtgtgcgccacccccacccggcttaggagaatttttctaataaacttcttagtctccagtgaaccccctcagccctacttacccactcctcccaaaacaaaacagaaccttttacattctactggttctggaaagcagagggcatgcctggtctcacctcactctgttttccccacagctcttgaggcctcttgtctgagaggcactgaacgcaggagtctgcaggtgtggtccagatctccagatcccccaacccactgccaccatggtaggaaaaggtgccaaagggatgctggtaagtacaggggccagactttagggaggagggggtactataaacaatgccctgggagacctcctgccagctgcctgccttgacacgggggcctcagaggtactacagggccagagttggcactactagggctcccaagtgccagggctgccccaggcccgggcaggcagccctcacccagcaggttagacagcactgggctccaagcctgcaactggacaggttctaccacagacccagcaaaggtctgcccaggagcagaggccatttagcccatcctggtcctaagaggtactctagagtagacactgggtgtcctgcccagaggacagtaagacacttatgattgtaccacacgcccactcaacgttgggcatgctcagaccccatccagttttccccacttgtctgtggccttctcatcgcaggatgtaacagaagtcctccaaagtttctcaggtaatttcattcctctgtgtcccctgccacagcctttcctttgctcttgaccttagagctcaagaaagggttaagtccctccacaccctcaccttcttgagatagagtttcactgtccccagactctctctgtggatgggagctgcctgcttctgcctcccaaatgctaggaataaagagaggttctgattctttctccagccctgttcaggacctcaccagtcccagattagacgcagagctagaagaaagttgcacgtcccatcccaagtgctaggttgtacgttttccccttggatcctgtttcaaggagaagctcttgaaaaaatggacagttactgaggtggaagccagggacaaaagatagcccctcccttagtggcccccaccccttctgtgccttctactgatttctgtattcagttaaaggctggttggcttgaggtctctactgagccctctccaaatgaattctgtctgtcaccaaagatttctgtctctcaagggctctctggtctggggaaacagattgaaagaggttcggatccttcccctagctctgttcaaagcctttagacaccaacccttgacccagcgcctagagcctgctctaaagtgacccatcctacctcctgttggtgggaagacatgtacctgggccagtgtgaaatcagggttctacacaccgaagggacatcaccacacctgcacactcaatagggtggactctgtctttttttttttttttttttttggttctttttttcggagctggggaccgaacccagggccttgtgcttcctaggtaagcgctctaccactgagctaaatccccagccctggactctgtcttaagacccaaagaggacccagacctttcctgctgagaagtctagatgttgaagatccggtgatgaggggacggccttgctcctccatgcatgagattgaacagtgaaaccctccgaacttccatggccttgctcctttctctggctcaacccatggacagcgtagacggcaggagagctggggttagggggtggggtatgcgcacgggcgcgacagagacacatcaatcacgaggtcctaccatccctgccctagctgagcttccgggaccaggcctgtctgtctgtgggagggaatgctgccttgggcctcccattcccagcactaggatgtgcctaaagatagctgaggcttgcttcctttagtgccctctgccctttggcttctacccattgctgcctttgaggctcatagcatctgtcccccatgggcaacccctgtggatgcgtttatccctgcctccgttcagttctgctgatgaccttgggctactctattcttgggtctgtttggagcagatgctgcctccgtttcatgtttgtctctaggatacagcctcagaggtataccgggcagccgtcccctcccaagccccattcttctctctaacccaagagctaagtcagcacctcttggatgctgtgttttcctaaggccaagggcatggactgagggagttccttcccagcaggctgttcctggggatgcccggagaggtgggaagagggatgtacgtgtaagctgatggcccttggatctttctggttctctgtagaagatctgctctatctgtggcctactgtgtagagagttgacagccagcattctactatggagccctcttttctgtcaccctttgctccaagtctgagtatgaggagctggacctctcaggtctcttctgtgttatccttggtacttctgcctggcctctggagcaggtgtcccacggaggagcaagtcacctcccagcacgtgcccaggcccacatgcttgcagcacgtgtccgtccccccactttcagcccagatggtctctgccaggccagctcagctgccttctcacggctcagtggctcctaggacagggccgcaagagaacccagctggccagggtgcctcgaagcaggggagcagctgggacgcttggggccacagggggtggatgaggcggtctttgcatgtagacctagagcctctgtacacgtgtggagcagggctaggtctccaaggacaggagctgaggaggacaggctaaaacaggcaacacaagcacccccaccgcctcaccatctcacgctaagtctccacgtcggccatcttagtcagtgagtgggccttacttcttcccatgtttgtaaacacactgattgcctctgacactgggaaacttcccagtcactctgaccccagggtccttggtgccagagtttctaactcccagaaggctctgcgagtgccacaggccacccgaggctgccccaccctgacctgttcccttatatttttggcatgaggatttgggtacctcccgtctgcagcatgcagcatctatgcagggcctggcgcacggtgggtactggctcaccaagcctagtcttggcatttagcaagtgctcaactagtacaggcttggcacacaatgggagatcaccaagcagagagggcttggcacacattgggcactcccttcccttggtaaagggctgacggggttaggtataagtctcagcatgtagccaatacctaactagtacagacttagtacatattgggtgtttccccttagcacaggcgccaccacccagtgggcactcatgagcatggtgctgggtatatggtggatatttgaccacatctggttctttcctagaactggattcggcacacacaggtgcgattcatgtagcgagagaccggtaaacaatagttcacgcaacatgagcgtgacacacagagctcttagtattggacccggcacgatagtaggcaccttcctgacagaatggggtgggtgggaggggggcgcacagtgggtgctttcctacctagtccacatctggcacatatacatttttcaggccttggacttagcaaacagctcatactactctgctattgcaggtcctagcgcagaatgagtgctttcctaacccagagactgcacacagtgagttttttctcagtacacccttggatcatagtgtatttcttccaacattacgcttcacactcagtgggcactctgctgacacaggccgtggctgtgctagcccactgtcctagcttagggattgacacatgcagaaattatattagctcagaaaccacacttgcagtagggaagtgcccttctggcccaaacggactaggcaacagcttccactgatcctgatgtgtagcccattttctcagctctacacagcctcaccccctctcatacagcttctgctagccctccctactccccacatgccatagtccagctcagcgggaccttctctctagagccatagaggacaacaaggtccctagactccttgcccctctggaagcatgcccactcttattaagaaaagtcagaggctggggctgggggagtcggcttccttaagtggggatggagcagctggattccactaatgaggcctcattacggccaggacccagctgggctgctgcctcctgtccccatggccagagccagggaaagccatccagccagggctgcctgttctgggcagccagcccagcgcagggcagccagagcccagagccaccctgggtggaagtgggcatttgggcatcatgggtgactgggccttcctggagccaatgcccaggcaggccttggccttcaatctgtgcctgcaggaagtcagggagtatctaggggccttagtccatgacacagaccatcgagcagctgtgtcagtggggtctgaagtcacttaggagactgacttatgcaaggcccccagaaagtgggcgcagactgtgctgagcacgtggggctcctgacaggccagtgctgtaggtatggaatgtcacgcagagcctggctcataggaagcacctagtgggtgtcgcctgtctattcgcatcaacactagctggctccagttatcctattttagagagggagaaactgaaagtagacagttgagcaagctgcctcgggttctatgtgctgatagactggacatctggggttcgaacctaggtctgcctcatgattggttttgcttgtttggtttggtttggtttttgagatagggtttctcagtcttcgatgtcctggaacctgttttgtagaccaggctggcctcgaactcagagattaacctgcccctgcctcccctcctgagtgttggaatggaatcaccaccgcatggctagcctgcctgattttaaagcctgtgctttttttcttttttttaagattttatttctttaaatcatgtgtctgctggggtcgggatatgtgcaggggtctgtggaggccagaagagggtgttgactcctgggagacacctgatgtgagtgcttggaaccaaagctgggtcctctctaagaggagtatgtactcgaaccactgagccatctctccagtccctggtcctgccattatgatttttcttcctcctaagcaacatttccccatgaggtcacgcttacagactcctgggagagctgtacttgcgctggaattcatccatgctcttgtttgttaagacccccactgtgtgccaggccttcgaggtcttagcaatcttcagagggttgtgtacctccttagtaccaggacgttgtacctaccttcccaagtctctggcttatggtgtctgggtgccagcgaggaactgaccaatgagtatggcctcaggggagagcgattacatgggttgcatgatggagctctcttagaactggctatggcacacaaaaggtgttttctaacacagaacctggcatacaggtcaggtgtggactaacgtccactgcagtcaggaggcactgctagaatttcccagcctattcttcagatgtcgggcagtgcagctcagcgctccactggtccctgttccacacccgcctccctttgtctggacttggcaatggccactgtctaagtcagtgctattttcctttagataatggcacagtcactaggccctcatcacagtcgtctgtgaagacaccccgtcatctttattggttgctcaccagaggggcaagcatgggaccccatatctcctagtctacaccactcactcactctaaacactgtttgctgtggactgcgccctccgccttcctgtcccggcaccgtcagcggatcctatagggaacaaagcccgtcactcatctgcagccaccaacccttctaggaacccactggtacccagcctgcagactcagctctagaggacagctcttggaaggaataagccatctcactgccctgtcatatgctcattctgcgtgtgcatgcgtgtgtgtgtgtgtgtgtgtgtgtgtgtgtgtgtgtgtgtgtgtgtgtgtgtgtgcatgtgtgtttctagttacttgctgaaaacaagggaacaccacagccccacgcctccttctccagctctggagcaccctcgctgggctgcatcaggactggccagagggggagtgccagggagggggtaggctgaacttggggaggagatgaggtgaaagtaattgacgctgcccagcccggcagtgggagaggcaggggatgtgtcgtcagtgtcagtgtcagtgtcgttctggagctggcagaggtgtgaatgagcggctgagacactcgtgctttgagtgctcttcccaggatggctgtggctcacggacctgtggccacctcttccccagaacaggtcagtcaccttccagaaggtcaaggctccctccctggttccaggcaggcttgatggctaggttggtggaggggcagggatagtggtctgtgccaggaggggcaggcagagcagtgagtgagacagacaccagccaaagtgacccagaaagctgggactgcaaaggagcgcaggaagaagttagttgtagtggtgggggtgagagggaggcgaatcggggtgttagggctcccccagcccaaagacctgctgagaatctgccctgagtatcaaagctacattgtcccagctcccggggagacgggccggagtgcccaggaattgtactaatcaatacagcctcattgtctgtgccaccgcagttactcctatggggagagagagagtcgggggacagggagtgtggtacatgggctcagtggtgagagctggggggaaggggacagacagaagtctcggctggaaggagagagaccctttggagcgtttgccaaggtccagggcaagtgcggcatggggtgggagctgtgtatctcagccctgggagttgagacttgagcaaagatgtaagccacactacagctaacgcagtgtgagggtgagggggctgggaaagccatcattctgccctggaggacatcctgacttgaccttctaaaggcaagagaaggaatgtcctctgaggccctgtgcgtggttttggagaagcattatgttaggctgttctcaaacttcaggtactgcctagagccaaggaaccaggggccacttcccagagtaccatcctgctgccaactgatgaggcagaggctgccacagctgcctctgtgcagtcttccaggctgccaggcttctccaggaatggaaggtgagggcatagctgggcctacccggccttcctccatcactctccgcaggacctggaacggagctgtgctcagggtgccggtcttatgtctgctgcctgcaaaattggcaggtcatgctgtgtcaatcaggtctctgtaatgagccagtaccaggtatatccctgtctcttttagctgccacatgcaggcctggcctctgcaggtgcctagaaaggggtcctgggaggggcctagcttgttctgtgcattccttgaagtagaatacactcagaaccctgcaggatgggccaggttttatcacttctgtccccactgtcgctccagactctggccgtctcagagcgaggtttccaaggccagagacgaggtctgttggttgagagtgtccaacttgatgtccggcagtgaagggtggaagcctgctatgctcatgtactgcttgagagccactgtgtgccctgagcatttgggagaacgagagcgggggtggggggggtgccttcggggtgccttcggggtctttcttgaggcagcactgactgtaagagctgctcagcctcctttccccactgggattccgagcaagttgcctgtgatctgatttggttccaagtcagtctgggatgtgaggtcttgcctgctctcctccattgagtttgtcttggacagacttcatcccatgagcaaaccctggggccagagagtcccaaacaagaagcctgctgggtcccagaggagcccgccttgcagcgcagctccagagttcttccatatctacggagggcaggcagagggaattcacaattcacaaaaatatccactgaatgctgacctcggagggtgggagtcccccgaccagagcagagtgtagtttgggttccgggggtctgggcttctgtgtccatatgaggaagaaacgagggggcctcctacctcatattggcaggagttacatcaagacctgggcctgcttgctatccctccatgatttctgggttttcacatgaaacttgttgttgttgttttaaagccagatgtagtggctcatacctggaatcttaacattcaggaggccaaggcaggttcaccgtgagtttgaggctaacctgggctacagagtgaaagctttgaaaacaaaaaagcagtctataaagctggtgggcactaatgggaggtgaggagacattcagaaatagttgaggctgtgagatagctcagcgcatacaaacactacacaggtctcacgtcctgagggttgatttcaggatcccaagacagaagaggagaaccagttcctgaaaagttctcctctgacctctacaagcacctctgcgcgcgcacgcacgcacacacacacacacacacacacacacacacacacttagtattaattaaatatttaaaaggtgttgttgtttgttttgttgtaaagaaatagctggattgcaggtaaggtagagccacagaacattggtagacctgagggactgcctgggctaaaaacctagcaggcccacgtagacgtcccctggttcttgagataggtgcactgaaggtatttattggttagaagggacttccccaggctgctagggagcaggttctagactacctaggtcctaacctcacacttcctccaagcctggagcagagtggaagatcctgattccaagagctcccccagcaaataagccaggcagaggtctatgcaaaggactcacatgagcaactggactcggctcagccagtcgggtgcagacagttgggtgttaacctaggaaggatcacagtcctgatgtgaggatggatacttcagccttcatggctggccccgagagtatgtacacggaggagtgtgtgtacacatgtgtacacatgtctatgcatgtgtggatgtacgtggcagtcaggtttccccactcagttgtgggaggaaagctctcagtccacgctgcccagcctgggggagcttaggtacctggtaaggtaccctttcccgaagaacactgtctttcaggcagtggtctttcgaagagctgccaggaggggcagcaaggcacagacagagtcagaagaacttgtgtgccagatcacaaggggaatccacctcagccgtctcattccccatgaaagaatgagcaggtgggagagaggaagggcgttgaggggcagccagggtgacatgtgatgggcaggacaagactggaacttagcccatccaagttcttaggcagcagcaggcagacagtctgggtcaaaccgtgagcacaaagaggttcgttctttcgtaggcatttcagagccaaaggaatggttaatattagtgacgaagcaggtcaagaaaaaggagggtcttaaaataggaaagatgattcaaggagggcaagaaattatatagcattgaaagtatggagctgggctaagcctgtggtaaagtgtttgctgagcagtctgaggttggacaggtacacacacacacacacacacacacacacacacacacacacaccagtgagggggtgagagtgagtgagacctttcctggattgattagctgggacacggagaaccctccagaggagagttagacaaagaatatatctggagcactcaagaagccccatagaaaggcgggcttcctctgtcgactgagaacttagaccatgtagctacctaagacgtacccagaatggaggccaggggcaacgatgagtgaggctcctcactcgggtaccaccatgccattgggatgaacaagagaaggggaccctgtcttcagacagccctaatttcagcaataacttcttgtcagtgcctagtgacaggccccagtctaactcctatcctggggcgtcacgttccctcattgcgtgctcagttgaatccgttagcacacggctcactggtgtataggctcagtggtatttgtcgtgccagttaaaccctggcttttgaagactggaggagcctatggcatatggctggggatttgacatgttccccccaatcatcctctgtcccctctgacagggaagaagtaggagttagggattcaaatatggtcctgctgtactttgttggagaggccaggagtctactccttgtggtcctagatcagaaaagaggctttgaactagcttggagagatgggtgtctttcaggggccttgccctttccttgttcttggtaccctcagttgtcccctttacaacgggaactactgtcctgtgacccgacccttggactctggagctgctacagttcttcattgtgctcctaagtaaacaagcccggggacagaataaaagtgttattgtaaggccgacagatagggagccctgtgtggctgatatttgtttggatgcagataaatcacccctagcaggccccatacccttcaaaacatggtcccctggccctgtggtatagatgcacctgccctaagatccctagaggtagtgatgtaggattctataggggtgtgtcgcagaaggcataccaaagcctcccagtgcagagtgtgcctccgtgccccataccagcaagccttgactggaccttaccaccctgggttctctttttggtctcatgtactttggggctttgagaactccatttgtgatccctgcctaacacgtatagaggatggtgtgtgcttttgtttgtttgttgatttggtttttcaagacagggtttctgggtgtgttgtatagcattggctctcctgaaacttgctgtatagaccaggctggcctcagatccacctgctctgccctccccaagtgctgggattaaaggcgtgtgtcaccacgcttggccatgtgagctcttggtccattaatgtcttcaagcactgtattgtttccaaccaagttgccactgcctagcacatagtaggggatttgtaagtcttgatatttggtgagtgaatgaatgaatgagtgagtgagttaatgaatgcagatgcctttagcttgccagtttgctctggatgctctggggaatgagtccccctccctaattcctggtactgtgccctgtagccccctttgaggcttgaagggcaatattttctgagctgaactggatacaggggacagtcctccccaccaacagtgctcatttaccaggcatgggtgctacccaggtcagcattccttacaggccttttcaaaaggcactgagccccagcgaagccattcagctttgtctgccaatattagggtctgagagtgtgtcagagtgacaggccacttttctgatcattggtgagtaactgctgaactttgagatgtcactttcacatgacagcgtcatgccagtctcttggccacgccgctccaaccctgatccaaatgtcttttggaggaactcctgttttgtttttttgttttttgttttttgtttttttttcctctcaaggtcgtggttcatctctgggaagctgttggtgtacaagtactttgcgtgtattttttgactggtgactcccagggtccttacgcttcctaacgatactctttggcccctcgagtctggcttacagtggttgattcccactcataacgggagagggctgggtgaggagtggcttgtggaagggacacacactaagggagtttcagaggtagttctacatctgaagaagagactcttcatggagttctcagtgggtcctggataacttaactcagtacttctcacacacaggcagagtacccaccagggattcatctgtaggccaccctgtcattcagtcccaccctttcctggaaccacctctgtttcctctgcagagcctgtcctcaaagtctggcatggtgcccacaactccggtctcctatcctatctcatagcacagcatcccctgctgtggctcaagtcagttccctctgatcgccagtatcctgcccagatctggcctagcccagctgcataaccccctcttccacccaggcctgctcaccatgtgcccccaggaagaagccttcactagggatcagtctagccactgactgcccatgggcagcgtgcttagcctggcgatgtggtaggcggcgggtggggggtagctgtccagacacaggcccctttgtgcccagcttgacttggctgcttggtatgaggctcagctgctcctgggtccttagcctgagaggaatggcaagggtttagaggggttagggggcccctgctcaggctccctcctcagtgtccccttcctgctgttaccagttcctcaggtgggctggtatacctggcatagagtgccgagggctgggcaccatttggcagctgtacctctcctctcttctgccaggccagccctcaactcccgccagcagagaggaagccccagggaatgtggcgggggtgacatggaggttcaaagaaaagccactgggggagactcagagggtcagacgtggggcaaaagtgcctttactgatggtagcttctttcctgtccccacagaatggtgctgtgcccagcgaggccaccaagaaggaccagaacctcacacggggcaactggggcaaccagatcgagtttgtactgacgagcgtgggctatgcgtggggcctgggcaatgtgtggcgtttcccatacctctgctatcgcaacgggggaggtacccagtgggcacagggcagggaccaccagtggggtaaagcccacccaccaggctcgggccaccatctccccagaacagacaccactccaggaagaagcggtctggccccccgttgttcatcccatcccttagcatattctgcctgagtgcagaccaccctcagatcttggcagccttttctctggtcctgatcggctagcctgctctttgaaagcgagaagtagagcaaaccacttgaatttcctgggttttctgtcttagcatcccaacttcagccacctccccctcagatagtacagagatagttgaggatcc

SEQ ID NO: 3324 - DNA, 4224 bp, Rattus norvegicus
  Genbank Accession No. U29339
agttgcagtttgcaacctccgctgcggccgcagctacctattcgctggctgttcaggtggctttcgcttcgatgtcctcctaatcttggggcccccgggccagactcgggagggctcccttcaccatccgctggaatcatgagggcgactgggactctgcaggtgctgtgcttccttctcagcctggcccggggttccgagatgggcaactctcaggcagtgtgtcctgggactctgaacggactgagtgtgaccggagatgcagacaaccagtaccagacgctgtacaaactgtatgaaaagtgtgaggtggtcatgggtaacctggagattgtgctcacaggacacaatgctgacctttccttcctgcaatggatccgagaagtgacaggctacgtcctcgtggccatgaatgaattctctgtgcttcccttgcctaacctccgagtggtccggggaacccaggtctacgatgggaagttcgccatctttgttatgttgaactacaacaccaactccagccatgctctgcgccagctcaagttcactcagctaacagagattctgtcagggggcgtttacattgaaaagaatgacaaactttgccacatggatacaattgactggagagacatcgtgagggttcgaggcgctgagatagtggtgaagaacaatggtgcgaactgtccaccctgtcatgaggtctgcaagggacggtgctggggtcctggaccggacgactgccagatattgaccaagacgatctgtgcccctcagtgtaacggtcgctgcttcgggcccaaccctaaccagtgctgtcacgatgagtgtgctgggggctgctctggacctcaggacacagattgctttgcctgccgacgcttcaatgacagtggggcctgtgtgccccggtgtccagagcctcttgtgtacaacaagctaacgtttcagcttgaacccaacccccataccaagtatcagtatggaggagtctgcgttgccagttgtccccataactttgtggtggaccagacgttttgtgtcagggcttgtcctcctgacaagatggaagtagataagcacggactgaagatgtgtgagccttgcggagggctgtgccccaaagcctgtgaggggacaggctctggaagccgctaccagactgtggactcaagcaacattgatgggttcgtgaactgtaccaagatcctgggcaatctggacttcctcatcaccggcctcaacgttgacccctggcataagatacccgcactggacccggaaaagctcaatgttttcagaacagtccgggagatcacaggttacctaaacatccagtcctggccccctcacatgcacaacttcagtgttttttccaatctgacaaccatcgggggcagaagcctctacaaccggggcttctccttgttgatcatgaagaacttgaatgtcacatccctgggtttccggtccctgaaggaaatcagtgctgggcgtgtctacataagtgccaatcagcagctttgctaccaccactctctgaactggaccagactgcttcgggggccctcggaagagagacttgacatcaagtacgaccggcctctgggagaatgcttggcagagggcaaagtgtgtgatccactgtgttcctctgggggatgctggggcccaggccctggtcagtgcttgtcttgtcgaaactacagccgggaaggtgtctgtgtgactcactgcaacttcctgcaaggggaaccccgggagtttgttcatgaggctcaatgcttctcctgccatccagaatgcctacccatggagggcaccagcacatgcaatggctcgggctctgacgcttgtgcacgatgtgctcattttcgtgacgggccccactgtgtgaacagctgcccccatggaatcctaggtgccaaaggtccaatctacaagtatccagatgctcagaatgagtgtcggccctgccacgagaactgcacccaagggtgtaatggaccagaactacaagactgtttaggccaagcagaggtgttgatgagcaaacctcatctggtaatagcggtgacggtgggactggccgtgatcctcatgattctgggaggctcttttctgtattggcgtggacgcaggattcagaacaaaagggctatgagacgctacttggagcggggtgagagcatcgagcctctggacccaagcgagaaggcaaacaaagtcttggctagaatcttcaaagagacagagctgaggaaacttaaagtgcttggctctggcgtctttggaactgtccacaaggggatttggattcctgagggtgaatccatcaagattccagtctgcattaaagtcatcgaggacaagagtgggcgccaaagttttcaagctgtgactgaccatatgctggccgttggcagcctggaccatgcccacattgtacggctgctaggactgtgcccagggtcatctctgcagcttgttactcagtacttgcccctgggctccctccttgatcatgtgaaacagcaccgtgagacattgggaccacagctgctgctcaactggggagtacaaattgccaagggcatgtattacctcgaggaacatagcatggtgcacagggaccttgcgctccggaacgtgatgctcaagtcaccaagtcaggtccaggtggcagattttggtgtggctgacttgctgccaccagatgacaagcagttgctacatagtgaggccaagactccaattaagtggatggcccttgagagtatccactttgggaaatacacacaccagagtgatgtctggagttatggtgtaacagtttgggagttgatgaccttcggggcagagccctatgcagggttacgactggctgaaataccagacctgctagagaagggagagcggttagcacagccccagatctgcaccattgacgtctacatggtcatggtcaagtgctggatgattgatgagaatattcgcccaacctttaaagaactagccaatgagtttaccaggatggcccgtgacccaccaaggtatctggtcatcaagagagcgagtgggcctggaacacctcctgcggcagaaccctctgttctgaccaccaaagagttgcaggaggcagagctggagccagaactggacctagacctagacttggaggcagaggaggagggcctggccacctccctgggttctgctctcagcttgcctacgggaacgctcacccggccacgtgggagccagagccttttaagtccctcatctgggtacatgcccatgaaccagagcagtctcggagaggcttgtctggattctgcggttttggggggtcgtgaacagttctcccgtcccatctctctgcacccaattccacgggggcgtccagcatcagagtcatcagagggccacgtgacaggctctgaggctgaactccaagagaaagtgtcagtgtgtaggagccgaagccggagtcggagcccgcggcctcgtggggacagtgcctaccattcgcagcgacacagcctgcttactcctgtgaccccgctctccccaccagggttagaggaggaggacggcaatggctacgtcatgccagatacacacctcagaggtgcgtcctcctcccgggaaggcaccctctcgtcggtaggtctcagttctgtgttgggtactgaggaggaagatgaagatgaggagtatgaatacatgaaccggaagagaaggggtagccctcctcggccccccaggcctggctccctggaagaactgggttacgagtacatggatgtgggttcagacctcagtgcttctctgggcagtacacagagctgcccgctccatcccatggccatcgtgccctctgctggcacaactccagatgaagactatgagtacatgaaccggaggcgtggtgcgggtggcgccggaggggactatgcagctatgggggcctgcccagcagctgagcaagggtacgaggagatgcgagctttccaggggcctggacatcacgccccccatgttcgttatgcccgcctcaaaactctgcgtagtttagaagccaccgactctgccttcgacaaccccgattactggcacagcaggcttttccccaaggctaatgcccagagaacgtaaacttctgctccgtgacgctctgcgggcgtgtggcggcagctagtgcctcttcgagggtacccaatg

SEQ ID NO: 3325 - DNA, 806 bp, Rattus norvegicus
  Genbank Accession No. U30186
gcttgaatctaatacgtcgatcataccatgttgaagatgagcgggtggcagcgacagagccaaaataacagccggaacctgaggagagagaaaccggtccaattacagtcatggcagctgagtctctgcctttcgcctttgagacagtgtccagctgggagctggaagcctggtatgaggatctgcaggaggtcctgtcctcagatgaaattgggggcacctatatctcatccccaggaaacgaagaggaagaatcaaaaaccttcactactcttgaccctgcatccctagcttggctgactgaggagccagggccagcagaggtcacaagcacctcccaaagccctcgctctccagattccagtcagagttctatggctcaggaagaagaagaggaagatcaaggaagaactaggaaacggaaacagagtggtcagtgcgcagcccgggctgggaaacagcgactgaaggagaaggagcaggagaatgagaggaaagtggcacagcttgctgaagagaacgagcggctcaacgaggaaatcgagcgcctgaccagggaggtagagaccacacggcgggctctgatcgaccgcatggtcagtctgcaccaagcatgaactgttggcatcacctcctgtctgtctctcccggagtgtacccagcaccatcacgccagtgccaagcatgtaatctccagtgcacatgctgaggaggggactgagggtagaccaaaggagaggggcttgtacactgtacattctttattcattccatacccagtaaagtgactttgtgtgaaaaaaaaa

SEQ ID NO: 3326 - DNA, 6060 bp, Rattus norvegicus
  Genbank Accession No. U31463
tcctggctataagtcaccatggcccagcaggctgcagacaagtacctctatgtggataaaaacttcatcaataacccgctggcccaggccgactgcggtgccaagaagctggtatgggtgccttccaccaagaatggctttgaaccagccagccttaaggaggaggtgggagaagaggccattgtggagctggtggagaatgggaagaaggtgaaggtgaacaaggatgatatccagaagatgaacccacccaagttctccaaggtggaggacatggcagagctcacgtgcctcaacgaagcctcggtgctgcacaacctcaaggagcgatactactcagggctcatctatacctattcaggcctgttctgtgtggtcattaatccttataagaacctgcctatctactcagaggagatcgtggacatgtacaagggcaagaagaggcacgagatgccgccccacatctatgccatcacagacactgcctacaggagcatgatgcaggaccgagaagatcagtccatcctttgcacgggtgagtctggagcaggcaagacagagaacaccaagaaagtcattcagtacctggcacatgtggcctcctcacacaagagcaagaaggaccagggggagctggagcgccaactgctgcaggccaaccctatcctagaggcctttggaaacgccaagacggtgaagaatgacaactcttcacgatttggtaaattcattcgtatcaactttgatgtcaacggctacatcgttggggccaacattgagacttatcttctggagaaatctcgtgctatccgccaagccaaggaggaaagaaccttccacattttttactacctgctgtctggggccggagagcacctgaagactgatctcctgttggagccatacaataaataccgcttcctgtccaacgggcatgtcaccatcccagggcagcaggacaaggacatgttccaggagacaatggaggccatgaggattatgggtatcccagaggatgagcagatgggcttgctgcgggtcatctctggcgtccttcagcttggcaacattgtcttcaagaaggaacggaacactgaccaggcgtccatgccagataacacagctgctcaaaaggtgtcccacctcctggggatcaatgtgaccgacttcaccagaggcatccttaccccgcgcatcaaggtgggcagagactatgtgcagaaggcacagactaaagagcaggctgactttgccatcgaggctttggccaaggctacctacgagcggatgttccgctggctggtgcttcgcattaacaaagctctggacaagaccaagaggcagggcgcctcatttatcgggatcctggacatcgctggcttcgagatctttgatctgaactccttcgagcaactttgcatcaactataccaacgagaagctgcagcagctgttcaaccacaccatgttcatcctggagcaggaggagtaccagcgagagggcatcgagtggaacttcatcgactttggccttgacctgcagccttgcatcgacctcattgagaagccggcgggtcccccaggcatcctggccctgttagatgaggaatgttggttccctaaagccactgacaagagcttcgtggagaaggtggtgcaggagcagggcacccaccccaagttccagaagcccaagcaactgaaggacaaggctgatttctgcatcatccactatgcaggcaaggtggactataaggccgatgagtggctgatgaagaacatggaccctctgaacgacaacattgccaccctgcttcaccagtcctcagacaagtttgtctctgagctgtggaaggatgtggatcgaatcattggcttggaccaggtggctggaatgtctgagacagcgctacccggtgccttcaagactcggaagggcatgttccgtactgtggggcagctgtacaaggagcagctggccaagctcatggccacactgaggaataccaaccccaactttgtctgctgcatcattcccaaccacgagaagaaggccggcaaactggacccacacctggtgctggaccagttacgctgcaatggcgtccttgaaggcatccgaatctgccgccagggctttcccaacagagtggtcttccaggagttccggcagaggtatgagatcctcacacctaactccattccgaagggcttcatggatgggaagcaggcgtgtgtgctcatgatcaaagccttggagcttgacagcaacctgtaccgcatcggccagagcaaagtgttcttccgttccggagtcctagctcacctggaggaagagcgggacctgaagatcactgatgtcatcattggcttccaggcctgctgcagaggctacctggccaggaaggcctttgccaagaggcagcagcagctgactgccatgaaggtcctacagaggaactgtgctgcatacctcagactccggaactggcagtggtggaggctcttcaccaaggtcaagcccctgctgaactcaataaggcatgaggatgagcttttagccaaggaggcggaactgacaaaagttcgagagaagcatctggctgcagagaacaggctgacagagatggagactatgcagtctcagctcatggcagagaagttgcagcttcaggagcagctgcaggcgaaaaccgagttgtgtgctgaggctgaggagctccgggcccgcctgacagcgaagaagcaggagttggaggagatctgccatgacctggaggccagggtagaggaggaggaggagcgctgccagtatctgcaggcagagaagaagaagatgcagcagaacatccaggaactcgaggagcagctggaggaggaggagagtgcccggcagaagctgcagcttgagaaggtgaccactgaggccaagctgaagaaactggaggaggaccagatcatcatggaggatcaaaactgcaaactggccaaggagaagaagctgctggaagacagagtagctgaatttactacagacctcatggaagaggaggagaagtccaagagcctggccaagctcaagaacaagcatgaggcgatgatcaccgacctggaagagcgccttcgtagggaggagaagcaaaggcaggagttggagaagacccgccgcaagctagagggagactccacagacctcagcgaccagattgctgagctccaggcgcagatcgcagagctcaagatgcagctggccaagaaggaggaggaattgcaggctgccttggccagagtggaagaagaagctgctcagaagaacatggccctgaagaagattcgagaactggaaactcagatctctgagctgcaggaagacctggagtcggagcgtgcctgcaggaacaaagctgagaagcagaaacgggatcttggagaagagctagaggctctgaagacagagctggaggacactctggactccaccgctgcccagcaggaactgaggtcaaagcgtgagcaggaagtgagcatcctgaagaagactcttgaggatgaggccaagacccatgaggcccagatccaggagatgaggcagaagcactcgcaggccgtggaggagctggccgagcaattggagcagactaagcgggtaaaagctacccttgagaaggctaagcagaccctggagaatgagcggggagagctggccaatgaggtgaaggccttgctgcagggcaagggcgactcggagcacaagcgcaagaaggtggaggcgcagctgcaagaactgcaggtcaagttcagcgagggagagcgtgtacggaccgagctggctgacaaggtctccaagctgcaggttgaactggacagcgtgaccggtctccttaaccagtcggacagcaagtccagcaagcttacaaaggacttctctgcgctggagtcccagctccaggacacacaggagctgctccaggaggagaaccggcagaagctgagcctcagcaccaagctcaagcagatggaggatgagaaaaactccttcagagagcagctggaggaggaagaggaggaggccaagcgcaacctggagaagcagatcgccaccctccatgcccaggtgactgatatgaagaagaagatggaggacggtgtagggtgcctggagacagcagaggaggcaaagcggaggcttcagaaggacctggaaggcctgagccagcggcttgaggagaaggtggctgcctatgataagctggagaagaccaagacccggcttcagcaggagctggatgacctgctggtggacctggaccaccagcggcagagcgtctccaacctggaaaagaagcagaagaagtttgaccagctcctagctgaggagaagaccatctcagccaagtatgctgaggagcgagaccgagctgaagctgaggcccgtgagaaggagacaaaggcactgtcactggcccgagcacttgaggaggccatggagcagaaggcagagctagaacggctcaacaagcagttccgcacggagatggaggacctcatgagctccaaggatgacgtgggcaagagtgtccatgagctggagaagtccaacagggcattggagcagcaggtcgaggagatgaagacccagctggaggagctggaggatgagcttcaggccactgaggatgccaagctccgtctggaggtgaacctgcaggccatgaaggcccagtttgagcgggatctgcagggccgggatgaacagagcgaggagaagaagaagcagctggtcagacaggtgcgggagatggaggcggagctggaggatgagaggaagcagcggtccattgccatggctgctcgcaagaaactagagatggatctgaaggacctggaggctcacatagacacagccaacaagaaccgggaggaggccatcaaacagctacggaagcttcaggcccagatgaaggactgcatgcgggacgtggacgacacgcgagcctcccgggaggagatcctggcccaggccaaggagaatgagaagaagctcaagagcatggaggccgagatgattcagctgcaggaggaactggcagccgccgagcgtgctaaacgccaggcccagcaggagcgggatgagctggccgatgagatcgccaacagcagtggcaaaggggccctagcattggaggagaagcggcgactagaggccctcattgccctgctggaggaagagctggaggaggagcagggcaacacagaactgatcaacgaccggctgaagaaggccaatctgcagatcgaccaaataaacaccgacctgaacctggagcgcagccacgcccagaagaacgagaatgcgcggcagcagctggaacgccagaacaaggagctcaaggccaagctgcaggagatggagagtgctgtcaagtccaaatacaaggcctccatcgctgccttggaggccaagattgcacagctggaggagcagctggacaacgagaccaaggagcgccaggcagcctccaagcaggtgcgccgggcggagaagaagctgaaggatgtgctgctgcaagtggaagacgagcggaggaacgcggagcagttcaaggaccaggccgacaaggcatccactcgcctgaagcagcttaagcggcagctagaggaggccgaggaggaggcccagcgggccaatgcctcccgccggaagctgcagcgtgagctggaggatgccacagagactgccgatgctatgaaccgagaggtcagctccctgaagaacaaactgaggcgtggggacatgccatttgttgtgacccgccgaattgtccggaaaggcactggcgactgctcagacgaggaggtcgacggtaaagcagacggggctgatgccaaggcgaccgagtagggacttctgctacccaagacggatggacagacggctccacctcccttccccagccctccacacccctgccttgagactgctctgcccatgcccctcttcctcccaggccttcttgagggcattggcttcctctgctgcatccccttccagctccct

SEQ ID NO: 3327 - DNA, 2657 bp, Rattus norvegicus
  Genbank Accession No. U31866
gttttttttttttttttttttttttttttttttttttatgaagaataagcgatccgtttgggatttattgcatttaaagacggcagattattaaaacagtaggtatgataaatacagtaagaaaataactttaaatctcaaacaaaacagtgaacagaattcaagactaagcaatgtaaaggcaataaggtaacaaaattagtgctttactgggtacagggaaagtaactgaagtctatctcaaactcttcccggctacatttgagggcttaagttactttagcaagtatgtctttataacaattagaaatataactaaggatataaacccagtttatttaaaaattaaagttatttgcttagtggtacataaaaggcttcagaaaattcaagtttaacaaaaaaaaaaaaaaaaggaagtgtaatcaaagaaagtgcacttaaagccgtttgccagcaattaaagggctcttccaggctggaggtgtggctcagccctaaagcgcttgcccagcatgtgcaaggccctgggttcagttcccagcaccgcaaaagaaagaacaagtggcaattactccttctagtataggatgatctctcagtcacaaaagaacatagtaataaaatcagtcttcctgtaggcactgtgaacctttaattaaaaaaaaataacctaaaccagacccagccctctgaattttcatctacttcttccttttagtggcttttgtaaacttcgtaactaggagtgaatgctcttaagagaaacgattgcctttttaaattcacattaattccgtagtggagagcctcgatgtgcctgtgtctttttatcttagtagagaacaccaccgagtgtaaatttttccaacagtcatctgttgttctctcagtagactcagtagactgtcaactcagtaactgaatgtaaattgatgactagttttgcttagaaataaaagaaaaagaatgacagagttcactgcgcattctacatgtattaaacagataatacctaactccccacaggtagtgacattaatacatgtgcgccttctgacagtgctttagtgaagtgcccaaatctggataacccaagggaggcacacccaagactggctccaccttcgtattttccgtcagaagaggagagtagtcagtccctgttaaacagggtaggactgatcgcaaggtgcgcagatccgagagccacgtgacttcataaatgcccagggtacacagctcaggggaggggcactcagtttaaatctggtcggttccattctcacccaacttggagtagtcctttctccaactacataccgagaacgtctgtgccttagtagataactttcttaagtgccctgaaagatcctctggtaatactagcgttttgctgacgtgatcaaagtaaagcaagtagtccactttttaagaaaagattccaagttaatgagcacagttaaagcttctaggtgacacctttggcctcagactttcgagctgggttcctaacgtgacttcccttcgatgttcaagtctaacaggtttagttagaactgctttgcacactgggaagcacaaggcacacccaaatgacattctttaaaccagaactgggccgtcccataacagagccagcctttcagtgagtgctgggtgctgggtgctgggtgctgggtgctaagtgctctcttgagcaagagaaatgtaacgcaaaggagccgccccttggacctccagtgaaacagtctgtccaatgagatgatctcgagaggcgcgtcaccgctgggctgttggaggcaatgtaaacattttaggctgtggcacagctgtttcctaaggatttgtccagcattagccggaggggctgcgagtgatcacttctaagtattcagtgcagtgaaaggcgagtggaactctgacttcatagtcacaactcattactttaggaggaaagcatttctgttcggtagcgtagagggcctactgccatttgcattagtgagaataatcaacctgagaaccagacagaaaggtgcaaacacagctctcctttggcacaaggacattaagtggtgaaggcatcagactccagcatcaactggaacaacctgaaaggcaagaagtcctgccatactggagtagacagaaccgccggctggaacatccctatgggcctgctgttcagcaggatcaaccactgcaagttcggtgagcagagccgggaagggagattgggaggggccatgcagaaaaaaaggggccctaagaagggccataggtttggggtccataaaagtgaagcccctcaaaaatgaacctcaaggaaatagggaagaggactaggaggaaccaggggctaaggaatggagtcaggacggttgtctttattgcaaataatggcattagtggctatacattcgcttgtctctctcatgatggagatcagaggtgagcattctgtggctgataaggtcttgagggctccttccttctttctggaccatcatttccatcatagtacttccacattcaaaaagcaaccttgctgaggcagtcacaattcaggcaagaacgagagcaagtggaaatgtacaccaaccgtggtcagtgtttgaaaagagccttctgctgggttcggtccccagctctga

SEQ ID NO: 3328 - DNA, 1474 bp, Rattus norvegicus
  Genbank Accession No. U31880
tggctggcagttgaggcttctgcaagtccagggactgtagtggagatgccgggtgccgcggcgaagggctcggagttgtccgagaggatcgagagcttcgtggaaactctgaagcgaggtggcgggcggcgcacgtcggaggacatggctcgggagaccctggggctgctgcgccggctcatcacggaccaccactggaacaacgccggggacctaatggatttgatccgcagagagggtaggaggatgacagccgctcaccctcctgagaccaccgtgggaaacatggtgcggagagtcctcaaaatcatacgggaggagtatggcagactgcatgggcgcagtgatgagagcgatcagcaggagtccctgcacaaactcttgacatccggaggcctgagcgaggatttcagcttccattatgccccacttaagtccaacatcattgaggcgattaatgagctgctagtggaactggaaggcacaacggagaacattgcagcccaagctctggagcacatccactccaacgaggtgatcatgaccattggcttctctaggacagtcgaggctttccttagagaggcagcccagaagaggaagttccatgtcattgctgcagagtgtgctcctttctgccagggacatgaaatggccgtcaatttgtccgaagcaggtatcgagacaactgtcatgaccgatgctgccatttttgctgttatgtcaagagtcaacaaggtgatcattggtacgaagactatcctggccaatggttccctgagggctgtggcaggaactcacactctggcactggcagccaaacaccactccacgcctctcatcgtctgcgcacccatgttcaagctctctcctcagttccccagtgaagaagattcatttcacaagtttgtggctcctgaagaagtccttcctttcacagaaggagacattctggagaaggtcagtgtccactgtcctgtgtttgactacgtgccccctgacctcattaccctctttatctccaacattggtgggaatgcaccgtcctacgtctaccgcctgatgagcgagctctaccatcctgacgaccatgtcctctgacacggcctgtcctatgcggaaccagcttagacccggagtggagtggagacacagtgttgctgctgcagtggggactggagagtcagcctgaaccctcagtgcctgtcacctgccttcctactcatgcccagtgaggagtggtccaggactgctcctgccttctgggcttatctgagcagcaggccttgcttccctggcattttggggccactttgtgactaggctgtgtttgtttcaggaacttcaacctcctggctctgtggtgtgttacacatacataccataactacttttgctgggtcggtgtttgctcagaaatgccttccagaccttttcctaatctgtgtcaataaaagctactggaagctcaaaa

SEQ ID NO: 3329 - DNA, 1998 bp, Rattus norvegicus
  Genbank Accession No. U33500
ggtgctgctgctgcatgtctgactgagaagggagccgagcatctgaggagcaagacatcagaaggctggagtcccttccctgactaggccagagctaaaaggacaaggctcagggctagcctctgcctatctagttcttttctccctgaagcttacaccatcctgtgggagccgatgcccgtctcattttgactcagagtctgtccctctgcttgtcttctacaaaccatgtggctgtacctgctggcactggtgggcctgtggaacctcctgcgcttgttcagggagaggaaggtggtaagccatctccaagacaaatatgtcttcatcacgggctgtgactcaggctttgggaacctgctggccagacagctggacaggagaggcatgagggtgctggctgcatgtctgactgagaagggagccgagcagctgaggagcaagacatcggacaggctggagacagtgatccttgatgtcaccaagacagagagtattgtggcagccactcagtgggtgaaggagcgagttgggaacacaggactctggggcctggtcaacaatgctggcatctccggccacctgggtcccaatgagtggatgaacaaacagaacattgcaagtgtgctggatgtgaacctgttgggcatgatcgaggtgactctgagcacggtgcccttagtgaggaaggcgaggggccgtgtggtcaacgttgccagcatcgcaggccgactgtctttttgtggtggtggttactgcatctccaagtatggtgtagaggccttctcagactccctcaggagagagctctcctattttggggtcaaggtggctattgtagagcctggcttcttcaggactgatgtgaccaatggtgtcacattatcatcaaacttccagatgctgtgggaccagaccagctcagaagtcagggaagtctatggcgagaactacctggcatcttatctgaaaatgctaaatggattggaccagaggtgcaacaaagatctgtctctggtgactgactgcatggagcacgccctgacttcctgtcaccctcgcacccggtactcagctggttgggatgccaagttcttctacctccccatgagctatctgcccacctttcttgtggatgcccttttctactggacttctccaaagcctgagaaagctctctgaagtctttacctatgtacataactgaggagatgttggtacagtgttagggaggggatcctgaggaggaggtcggagtgctgaggagggagggaggtcattcctctggggtttagtccacactcttcattttgctaattttcctgtgctactactcaaggctgactcgactgacccaagaaatagccaaagaattctgcgaagaagttcaaatacaaaagtgctggcagttgcctagcctctgggcaccatgacctaccatggcgatccacacaaatggggagtttgagaccagcttgtaccaaacactgccctgggtccccctgtgcaggaagtgcacatgccctggctagtttgtaccctatgcagcatagaagtgtccctgctctgaagtcacctgtgaccctggtgtcaggtttgagaagaatcactaataattctaacactcatgcttgaaggccaggtcgcagcctgggtgggagagtcggttacttgtggtgagaatatagtagaggatagagacattaattttttttaaatttactttgaagtcatggctcttcttttcttttttggagtcttttcctttttagagcatagcatgaggtgacctcttgttccctgtgatttaaacaatggcattgctggttggtgaggtttggattgcaggggtaaggggaatgtcctgagaagggtgtgcataggccagcaggaatttccttgcccgtctcagcccttctagccactgaggtgggaataactgctgtccattcaaaacttaacaacaacccctaaggcataagagcatgcatgcaggcc

SEQ ID NO: 3330 - DNA, 2934 bp, Rattus norvegicus
  Genbank Accession No. U33847
tggcggcttttctagaacaagcagaggcaccgtgtgtctgtgcactgcttcgagcagcgtcctctggctctgtttcctacgctcatgattactcttgcagggcatgctgttcctccacgggagcccactgaggtctcacggcaacctgaaaccttccaactgtctggtagacagtcacatgcagctgaagctggcaggattcgggttgtgggagttcaagcacggcagcacctgcaggatctacaaccaggaggccacggaccattcagagctctactggacagccccagaactgttgcggcttcgggagcttcctggtccggcaccccgcagagacgtttacagctttgccattctcctgagggacctgatccaccagcaggcccacgggccctttgaggaccttgaggcagctccagaggaaatcatcagctgcattaaagactcccgggcaccgtttccacttcggccgtccctgttagaggataaaggtgacgaaaggattgtggccctggtgagggcatgttgggctgaatctccagagcagaggcctgccttcccttccatcaagaagacgttacgagaagccagtccaagaggcagggtgagcatcttggatagcatgatgggcaagctggaaatgtacgccagtcatctggaggaagtagtggaggagcggacctgccagctggtggcagagaagagaaaggtggagaaactcctgtccaccatgttgccaagcttcgttggagaacagctaatagctggaaagtccgtagaaccagaacattttgagtctgtcaccatctttttctctgacatcgtgggattcacaaaactatgttctctcagctcccccttgcaagtggtgaagctcctcaatgacctgtacagcttgtttgatcacacaatacagacccatgacgtatacaaggtggaaaccattggtgatgcctatatggtggccagtgggcttcctatccgaaatggagctcaacacgcggatgagattgccaccatgtctttgcatttactcagtgtcaccaccaacttccagattgggcacatgcctgaggagagactcaagctccggataggcctccacacaggtcctgtggtggctggtgtggtgggaatcaccatgcccaggtactgtctgtttggagacactgtgaacatggcctccagaatggaaagcagcagtttgcctctccggattcatgtttctcagagcactgccagagctcttctagtagcaggagggtaccatcttcagaagagaggcaccatttcagtcaagggcaagggagaacagacgaccttctggctgacaggcaaagatggcttcgctgtcccgctccccgagtttactgaggaagaagccaaagttccagagatattgtgaggttctttcaagatgtttgtggagccccactaatgtttgtgggtaccctcttggtggggaggggagatacatctgacattcctcttcctctgagcagttgtagtactcggcaatgaatcgatgtcccactagatggtgctgtttggtgtcccattctgttccaaactttgctcccagacccccagctagtgtgctgttggaagaggaggccagagggaactcatttccagtcatggccagtcacagaggcttttagcctcacaactaatggatttgcctaaaaccgatttcctcctgggagaatatggcctggtcaacagtccgccgtaccttacttattccttgttacacttctttctctgcaccttataagtccccagcctagatggctgcttgtgaatgcacagagcatttgtacaacatgctggccccgagaccttatgatctcttgaaataccaaggaatgaggaggtgggacccagtgaggccagttagattttctttgtggctggcgtgcactgtggagatgttcttgcgtatactgtattgagaaacaaactaccttttgttttattggggagcttccacttcaatatttacaaaaaaagcttggtacagttctggccattcttcacaaccaaggacagccttcccggtatcagcccatcttcagaaccactcttgagtgttcccttggtttcttccctgaggtattgactaatttctctgaccttcggatacttcctctccttggcatcgttctggtgagaggctctgcttgcctgcaaagtcttcagtgttaagggatgacatcttagatggcccgctaggaggagggaaggcagaaagcatttacatacagagtttttccccctccagcatggagacactgggtccagtccaccttcttgtacctcctaccttcctcccttgttgagcatcatggcttcttgtcctaaacactttgctccatcatgaaacaaaacaaaccataatcacgtaggcagctcttagaccagcccctttacatccatttgtccatctgtctgttcgtccacctgtccatccatctactcacccacccatccatctatctctctaacccccatttacctacgaatccattcaactatctatccacccatgtgccagtccgtttgtctacccattcaccatccatctgaggattttatgaccttaaggcgcatgtatttctgctgtgctaacgacacactggacgtgtgagagcttgaaactttcatctctatcttgcggtttagttggacagagacatttgaaaaagcaatgacacaacattaaggactagcagagctgccaacagaaatgaaacaaccaaaaatctaatgttgtgacagtaaaagggcgttaggaaattctattgggctccagagttggggttgaacaaggtaattgtttatgattgttccatctttgtattcgtatcgatgaggtacatttgcttctagcccatctgtttgcttaaattatattaaataatagactttgtt

SEQ ID NO: 3331 - DNA, 726 bp, Rattus norvegicus
  Genbank Accession No. U34963
gcccatctctattataaaaatgtctcagagcaaccgggagctggtggttgactttctctcctacaagctctcccagaaaggatacagctggagtcagtttagcgatgtcgaagagaacaggactgaagccccagaagaaactgaaccagaaagggagacccccagtgccatcaatggcaacccatcctggcacctggcggatagccccgcggtgaatggagccactggccacagcagcagtttggatgcgcgggaggtactccccatggcagcagtgaagcaagcgctgagagaggctggcgatgagtttgaactgcggtaccggagagcattcagtgatctaacatcccagcttcatataaccccagggacagtatatcagagctttgaacaggtagtgaatgaactctttcgggatggggtaaactggggtcgcattgtggcctcctcctcctttgggggggcactgtgcgtggaaagcgtagacaaggagatgcaggtattggtgagtcggattgcaagttggatggccacctacctgaatgaccacctagagccttggatccaggagaacggcggctgggacacttttgtggatctctacgggaacaatacagcacccgagagccggaaaggccaggagcgtttcaaccgctggttcctgacgggcatgactgtggctggtgtagttctgctgggctcactcttcagtcggaagtgaccaga

SEQ ID NO: 3332 - DNA, 1862 bp, Rattus norvegicus
  Genbank Accession No. U35776
cggggatctgagtgcctagtccagcttggcacctgggccggacccgaccccctcggggcagcaggatcccagtgtgcggcggtccagacccccccgccccgccccgcccccggcctgtgagccttgcgcccttcagcatagcggttgcgcggatctacgtggcctttcagcgctcaggtcccgagcactctcagacgcagactggttttgcagagcccatttggccgggaaagggcccctgcccttcacttcgaaagaagattctgtccagaggtgccgcaccatggccagcccaagaaccagaaaagttcttaaggaagtccgggcacaggacgagaataatgtttgctttgagtgtggtgcgttcaatcctcagtgggtcagcgtgacctatggcatctggatctgcctggaatgctctgggagacaccgtgggcttggggtgcatctcagcttcgtgcgctctgtgacaatggacaagtggaaggacattgaactggagaagatgaaagctggtgggaatgctaagttccgagagttcctggaggcacaggacgactatgagcctagctggtcactgcaggacaagtatagcagcagagctgcagcgctcttcagggataaggtggctactttggcagaaggtaaagaatggtctctggagtcatcgcctgcccagaactggaccccacctcagcccaagacgctgcagttcactgcccaccgacccgctggccagccacagaatgtaactacctctggggacaaggcctttgaggattggctgaatgatgatctgggttcctatcagggtgctcaggagaatcgctatgtggggtttgggaacacagtgccacctcagaagagagaagatgacttcctcaacagcgccatgtcatctctgtactcgggctggagcagttttaccactggggcgagcaagtttgcgtctgcagcaaaggagggtgctacaaaatttggatctcaagcaagtcaaaaggcttcggagttgggccacagcctgaatgagaatgttctcaagcctgcacaggagaaggtgaaagagggaaggatttttgatgatgtgtccagtggggtctctcagttggcatccaaggtccagggagttggcagtaagggatggcgtgatgtcacgaccttcttttctgggaaagctgaagacacttcagacagacccttagagggccacagctaccagaacagcagtggagacaactctcagaacagcaccatagaccagagcttctgggagaccttcgggagtgctgagccccccaaggccaagtccccaagcagtgacagctggacctgcgcagatgcctcaacgggaaggaggagctcggacagctgggacatttggggctcaggttctgcatccaacaacaagaacagcaatagcgatggttgggagagctgggagggagccagtggggagggaagggcaaaggctaccaagaaggcagctccatctacagccgccgacgagggctgggacaaccagaactggtaggagccttgctgcaccctaacccagccctgctgggagaccgctgtgtttgcactttacccttgttcctccttcatttgacctcagtgtgaagacagtggctcaggcaggacttgagttggtgctgcctgcctggtgtggggtggctttctcttagacctcaggggacatgtcatccacctgcctcttgggtcctctgagcagccttcctggattctgggttcttgggacccaggcactgtctctgcagccctagcatagcctgggactgcagccctgtgcaatgtcagctaagccagacatctgctttcgttgaaatgtctttttaaacttg

SEQ ID NO: 3333 - DNA, 1139 bp, Rattus norvegicus
  Genbank Accession No. U36482
cctgctgtagcttgcccatctcccgctcccacaatccggcgtgatggctgccgccgttcctggcgccgtttcgctctccccactgctgtccgttctccttggcctgctgctcctctctgctcctcatggcgccagcggcctgcacacgaagggcgcccttcccttggacacagtcactttctacaaggtcattcccaaaagcaagttcgtcttggtgaagttcgacacccagtacccctatggagagaagcaagatgagtttaagcgtctggctgagaactcagcctccagcgatgatctcttggtggcagaggtggggatctcagactatggtgacaagctgaacatggagctgagtgagaagtacaagctggacaaagagagctacccagtcttctacctcttccgggatggggactttgagaatcctgtcccatacagcggggcagttaaagttggagccatccagcgctggctcaaggggcagggagtctatctgggcatgcctggatgtctgcctgcgtacgatgccctggcgggccagttcatcgaggcctccagcagagaggcccgccaggccatcctgaaacaggggcaggatggcctctcaggtgtgaaggagacagacaagaagtgggccagtcagtacctgaagatcatggggaagatcttggaccaaggtgaagacttcccggcctccgagctggcccggatcagtaagctcattgagaacaagatgagtgagggtaagaaggaagagctgcagaggagcctcaacatcctcaccgccttccgcaagaaaggcgccgagaaggaggagctgtgagggcaccaggctgctagggtttgctgagggcggggagggagagccgcctgctgactgtggggccctgtgggtggagggggcagtggagcaaagcagtcctgagccagagacctgtgccccgagtgcctggacactgaggctgctgagaccataccctggacatccttggtgcagtttgtggggagcctgtgtgccaagacaagatggctgtgtccccacaggagctggtactatagaggaaggtccttgacaggtatagttctgatcaaataaaagtctgttttgggttaaaaaaaaaaaaaaaaaaaaaaaa

SEQ ID NO: 3334 - DNA, 2519 bp, Rattus norvegicus
  Genbank Accession No. U36771
cagccttggccgatgtaaacacacgaatgaggactgggttgactttggcttcaaacctaccttcttcagatccgcaacgctgaaatggaaggagagcctcatgagccggaagaggcccttcgtgggaaggtgttgctattcatgcacgcctcagagctgggaaaggttcttcaaccccagtatcccacctctgggtttgcggaatgttatttatatcaatgaaactcacacaaggcaccgaggatggctggcaagacggctttcttacatcctttttgttcaagagcgcgatgtccacaagggcatgtttgccaccagtatcactgacaatgtactgaatagcagcagagtccaagaggcaattgctgaagtggctgcagaattgaacccggatggatctgcccagcagcagtccaaagccatccagaaagtgaaaaggaaagccaggaagatcctccaggaaatggttgctacagtctcccccgggatgatcaggctgactggctgggtgttactaaagctcttcaacagcttcttctggaacattcagattcacaagggtcaacttgagatggtgaaagctgcaactgagacgaatctgccgctcttgtttctgccggtgcacagatcccacatcgactacctgttgctcaccttcatcctcttctgccacaacatcaaagctccatacatcgcctcgggcaacaacctcaacatccccatcttcagtaccttgattcacaagcttgggggctttttcataagacggaggcttgacgaaactccagatggacgcaaagacattctgtacagagcgttgctccatgggcatgtagttgaactcctccgacagcagcagttcctggagatcttcctggaaggcacccgctcccgcagtggcaagacctcctgtgcccgggccggcgtcctgtcagtggtagtggatactctgtcatccaacaccatccctgacatcctggtcatccctgtgggcatctcgtatgatcggataatcgaaggtcactacaatggtgaacagttgggcaagcccaagaagaatgaaagtctctggagtgtggcaagaggcgttatcagaatgctgcggaaaaactacggctatgtccgagtggactttgcacagccattttctttgaaggaatatttagaaggccaaagtcagaaacctgtatctgctcccctctctttggagcaagcactgttaccagcaatccttccttcaagacctgatgctgctgctgccgaacatgaagacatgtccagtaatgagtcgagaaacgcggcagacgaagccttccgaaggaggctgatcgcaaacctggcggagcacaatctcctcaccgccagcaagtcctgcgctatcatgtccacccacattgtggcctgcctgctcctctacagacactggcagggaatccacctctccacgctggtggaagacttctttgtgatgaaggaggaagtcctagctcgggattttgacctgggcttctccgggaattcagaagacgtagtcatgcatgctattcagcttctgggcaactgtgtcacaatcacccacactagcaggaaggatgaattctttattactcccagcacaactgtcccgtccgtctttgaactcaacttctacagcaatggggtacttcatgtctttatcatggaagccatcatagcttgcagcatttatgcagtccagaataagaggggttccggaggtctgccggagcctggcaacctgatcagccaggagcagctggtgcggaaggccgccagcctgtgctaccttctctctaatgaaggtaccatttctctgccctgccagacattttaccaggtttgtcacgagacagtaggaaagttcatccagtacggaattctcacagtggcagagcaagatgaccaggaagatgtcagtcctggccttgcagagcagcagtggaacaagaagcttccggagcctctgaactggagaagtgacgaagaagatgaggacagtgactttggtgaggagcagcgtgattgctacctgaaggtgagccaggccaaggagcaccagcaattcatcacctttctgcagaggcttctggggcccctgctagaagcctacagctctgctgccatctttgtccacaccttccgcgcgccagttcccgagtctgagtacctgcagaagctgcacaggtaccttctcaccaggacggagaggaacgtcgcggtgtacgctgagagtgccacatactgtcttgtgaagaatgctgtgaaaatgtttaaggacatcggggttttcaaagagaccaagcagaagcgagcgtctgtcttagaactgagcaccactttcctacctcagggcagccggcagaagctcctggaatacattctgagcttcgtggtgctgtagggttccctcagcacctatctccgtgaggagctgatgagtcctttgcagactccagtctgacccagagtggcaagtttcctggacatgggccagcctgccg

SEQ ID NO: 3335 - DNA, 1687 bp, Rattus norvegicus
  Genbank Accession No. U37252
cccagagactgccgagccgggtccgtgtgccgccacccactccggacacagaatatccagttatggataaaaatgagctggtgcagaaggccaagctggccgagcaggcagagcgatacgatgacatggcagcctgcatgaagtctgtcactgagcaaggagccgagctgtctaacgaggagaggaaccttctctctgttgcttataaaaacgttgtaggagcccgtaggtcatcttggagggtcgtctcgagtattgagcagaagacggaaggtgctgagaaaaagcagcagatggctcgagaatacagagagaagatcgagatggagctgagggacatctgcaacgacgtactgtctcttttggaaaagttcttgatccccaatgcttcgcagccagaaagcaaagtcttctatttgaaaatgaagggtgactactaccgctacttggctgaggttgctgctggtgatgacaagaaaggaattgtggaccagtcacagcaagcataccaagaagcatttgaaatcagcaaaaaggagatgcagccgacacaccccatcagactgggtctggccctcaacttctctgtgttctactatgagatcctgaactccccagagaaagcctgctctcttgcaaaaacagcttttgatgaagccattgctgaacttgatacattaagtgaagagtcgtacaaagacagcacgctaataatgcagttactgagagacaacttgacattgtggacatcggatacccaaggagacgaagcagaagcgggagaaggaggggaaaattaaccggccttccaacctttgtctgcctcattctaaaatttacacagtagaccatttgtcatccatgctgtcccacagatagtttttttgtttacgatttatgacaggtttatgttacttctatttgaatttctatatttcccatgtggttttatgttttaatattaggggagtagagccagttaactttagggagttactcgttttcatcttgaggtggccaatatgggatgtggaatttttacatgagttacacatgtttggcatagttagtacttttggtccattgtggcttcagaagggccagtgttcaaactgcttccatgtctaagcaaagaaaactgcctacatattggtgtgtgctggcggggaataaacaggataatgggtccagtcatgagtgtagtctgtgtgggtactgtaaggcttggagcacttgtgaggctgggacacgaacaccctgtggatgcacgctaagaccgtgtgtctgcgtgcacacccttgaccacagctccagaagttgtctgtagacaaagttgtgacccaatttactctgataagggcagaaacggttcacattccattatttgtaaagttacctgctgtttgctttcattatttttgctacacattttatttgtatttaaatgttttaggcaatctaagaacaaatgtaaaagtaaagatgcagtacaaacgagttgcttggtgttcccggctccatgcggatcaagcacagcggtaaacaaaatcccatgtatttaactttttttttttaagttttttgttttgttttgtttttgcttttgtgattttttttctctttttgatacttgcctaacatgcatgtgctgtaaaaatagttaacagggaaataacttgagatgacg

SEQ ID NO: 3336 - DNA, 2402 bp, Rattus norvegicus
  Genbank Accession No. U38180
acgccggctgctggttgaactaggtacgggcctgtgggacgcagagctggggatccattgtgagtgcctagggagccacaaggtgcggtcctgttccttccggcatcctgaagatgaaagcggactgaattctatctgcagtcctggcgcaactgcagagctccggcaggttgagcgtgccaagagcctgcgaagtggagtgtcatctttgcttaccaggtccatgaggacctggccaacatggtgcccactggccaggtcggagaaaagcaagcctgtgaagagcccaggcaggaccgagaacttaagtcctggcgatggctcgtgttctacctctgcttctttggcttcatggcacagttgcgacctggggagagcttcatcacaccctacctcctggaacgtaacttcaccaaggagcaggtgaccaacgagatcattccgatgctgccctactcccacctggccgtgctggtccccatcttcctgctcaccgactacctacgatacaagccagtcctggtcctacagtgcctgagcttcgtgtgcgtgtggctgctgctgctcctggggacctccgtcgtgcacatgcagctcatggaagtcttctacagcatcaccatggcggcgcgcatcgcctactcctcctacatattctccctggtgcagccctcccgctaccagcgcatggccagctactcgcgggccgcagtcctactgggcgtcttcatcagctccgtgctgggccaggtgctggtcaccctaggaggcatctccacctatatgctcaactgtatctccctgggcttcatcctcttcagcctgagcctctccctcttcctaaagcgtcctaagcggagcctctttttcaaccggagcgcacttgtgcaaggagccttgccctgtgagctggatcagatgcacccgggacctggccgtccagagcccaggaaactggagcgcatgctgggcacttgcagggactccttcctggtacgcatgctaagcgaactggtgaagaacgtccggcaaccacagctgcgtctctggtgcctctggtgggtcttcaactcggcaggctactacctgatcacctactatgtccatgtcctgtggaaaatcactgacagcagactcaactacaacggtgccgtagatgccgcctccacacttctgagcgccatcacggccttcaccgcgggcttcgtgaacatccgctgggctctgtggtcaaagctggtcatcgcgagtgtcatagccatccaggctggcctggttttctgtatgttccagatcccggacatctgggtctgctatgtgaccttcgtgcttttccgtggggcctaccagttccttgtgcccattgccacttttcagattgcatcttccctgtctaaagagctctgtgcattggtcttcgggatcaacactttccttgccactgcgcttaagacctcgatcacactcgtggtctctgacaagcggggtctgggcctccaagtccatcaacagttccgcatctacttcatgtacttcctgacgctgtccatcatctgccttgcctgggctgggctggacggcttgaggtactaccggcgtggtcgccaccagccgctggcccaggcccaggctctgagtcccttggaggattctgtgcaggcgataagcctacaggatggagacctaaggagaccgcagccctcggcaccacagctgctcccagaggatggcagcgtagaagacggcagggcagacttgagagtcgaagccaaggcctgacctgtcttcaccttcctggcttcatcccagttcagccgccggattcctgactcagtggcagcccctcctgtgtgcactccagcctgaatcagcccttctggggtcccagtgcctgagacatgtgggggcccccctgttgcctttcaggagccttcaggttaggccacagaactctctccttaggggccaccttttttaacagtggggcgacagacagcttgtccttccggtagcctctgaggaccctaagcccagcctacttcatgctttagcaatggctggagcctgctacagacactcaggaccgctccctggcttttgtgaaccacaatgtcaggccactacgagcctgggttgcctactgcttgccaagaagaacctgtgtaggggtcagctgtgcccaccaggctggtctgccctttgctctgggatgctcaggacaaatcacgtctgcccccagggctagtgaggtagcccagacaccggacaaggtccgctgagcctgcagggtactggttacctgtcctaggctcctggtgaagctgccatacctccactctcggaggtgcttgtttgtatggttgtctgattttttaaaacttgacattaaaatggagaactac

SEQ ID NO: 3337 - DNA, 1470 bp, Rattus norvegicus
  Genbank Accession No. U38253
gcggctacggcgtgcggggagctgaggtaaagccggggctagtacggtaccaggcggtgcacgagctggctaagccagatttgtaaaaatggagtttcaagccgtagttatggccgtcggtgggggatctcggatgacagacttgacttccagcattcccaagcctctgcttccagttggaaacaaacctttaatttggtacccgctgaacctgcttgagcgagttggatttgaagaagtcatcgtggttacaaccaaagatgtccaaaaggctctgtgtgcagagttcaagatgaaattgaagccagatattgtgtgcattcctgatgaggcagacatggggactgcagattctctacgccacatatatccaaaacttaagactgatgtgctggtcctgggctgcgatctgataacagatgttgccttacacgaggttgtggacctgttcagagcttacgatgcatcacttgccatgttaatgaggaaaggacaagagagcacagaaccagttccaggtcagaaggggaaaaaaaaaacagtggagcagcgtgacttcattggagtggacagcacaggaaaaaggctgctctttatggctaatgaagcagacttggatgaagagctggtcattaagggatccatcctgcagaagcaccctaggatacatttccagacaggccttgtggatgctcatctctactgcttgaagaaatatgttgtggatttcttaatggaaaataagtcaatcacttctatccgaagcgaactgattccgtacctagtaagaaaacagttttcctcagcctcctcacagcaaaggcaggaagacaaagaagaggatctaaagaaaaaggagcccaagtctttagatatttacagttttataaaaaaagacaacactctgactttggctccctatgatgcctgctggaatgcttttcgaagagacaagtgggaagatttgtctagatcacaggttcgctgctatgtccacatcatgaaggaaggactttgctctcgagtaagcacactgggactctacatggaagccaacagacaggtacccaaattgctgtctgttctttgtcctgaggaatcaatgatccatccatcagcccagattgccaacaaacacctgattggagccgacagccttatcgggtcagatacacaagttggagagaagtcatctattaagcgatctgtcattggctcatcctgtgtcatcagagacagagtaactgttaccaactgccttctcatgaactctgtcaccgtgggagaagggagcagcatccatggcagcgtcatcttcaacaacgccgtggtcgaggcgggcgcggagatcagggactgtttaattggaagtggtcagaggattgaagccaaagctaaacgcatgaacgaggtgatcgtgggaaatgaccagctcatggagatctgaatcctgaacaagtctgaccccac

SEQ ID NO: 3338 - DNA, 1588 bp, Rattus norvegicus
  Genbank Accession No. U38970
atggcaccgcgcacgctgctcctgctgctggcggccgccctggccccgacccagacccgcgccggctcacactcgttgcggtatttctacaccgccgtgtcccggcccggcctcggggagccccggttcatctctgtcggctacgtggacgacacggagttcgtgcgctacgacagcgacgcggagaatccaagatacgagccgcgggcgcggtggatggagcgggaggggccggagtattgggagcagcagacacggatcgccaaggaaaacgagcaggtgaaccgagtggacctgaggaccctgcgcggctactacaaccagagcgagggcggctctcacaccatccaggagatgtttggctgtgacgtggggtcggacgggagcctcctccgcgggtatgagcagcacgcctacgacggccgcgattacatcgccctgaacgaagacctgaaaacgtggacggcggcggactttgcggcacagatcacccggagcaagtgggagcgggctcgttatgcagagagactcagggcctacctggagggcacgtgcgtggagtggctccgcagatacctggagcacgggaaggagacgctgctgcgctcagatcccccaaaagcacatgtgacccctcaccccagacctgaaggtgatgtcaccctgaggtgctgggccctgggcttctaccctgctgacatctccctgagctggcagttgaatggggaggacctgacccaggacatggagcttgtggagaccaggcctgcaggggatggaaccttccagaagtgggcatctgtggtggtgcctcttgggaaggagcagaattacacatgccgtgtggagcatgaggggctgcctgagccgctttcccagagatgggagccttctctatccaccgactccaacatggaaacctatgtcatttatgtcgtccttggagctgtggccatcattgcagctgtgatcattgcagctgtggtgactgttgtgaggaggaggaggagaaacacaggtgggaaaggaggagtctacacccctgctccaggcagggacagctcccagagctccgatgtgtctctcccagattgtaaagcatgaagacagctgcctggagtggactgagtgacagacgatgtgttcaggtctctcctgtgacatccagagtcctcagttctctttagacaccagtgtctcatgttccctgtgattctatggcttcagtgtgaagaactgtggagcccagcctgccctgcacacctggaccctgtccctgcactgcctgtgttcccttccacagccaaccttgctggtccagcctgggggtggggggtggggacatctgcatcctgtcactccttgctgccctgagcttcagcccctcactcccacactgagaataagaatctgagtgtgaacttgattgttcacatccttgacacaagtgtggatggctttttaaattactggatggaatacttagaggtttttgttttggggttttgctttgttttgttttgtttttgaaaaaaataaatggcagatgaagaagcttccaggaaaaaaaaaaaaaaaaaaaaaaaaa

SEQ ID NO: 3339 - DNA, 347 bp, Rattus norvegicus
  Genbank Accession No. U42719
cagacccgcaactttctggtccgggcttcttgccgccttcgtttggagcctagcaaagagtacttaatcatggggatggacggagtcaccagtgacctcaagggagacccccagtacttgctggactcaaacagttggatcgaggagatgccatctgagcacctgtgcaggagcacccgtcagcgggcagcctgtaccagctcaatgacttcctgcaggagtacagaagccaggggtgccaggtgtgagggcgtcggactctggatccctgagctcagccccagggtcagggcctctcacgaagcagggcctgcttaacagggtaaataaataaaacttttgacagt

SEQ ID NO: 3340 - DNA, 1744 bp, Rattus norvegicus
  Genbank Accession No. U44129
agaatccaagatggcggtgtccaggcggcggggtccccaggctggagcgcagtcgttcttctgcgccctgctgctgtctttcagccaattcgtcgggagcgacggcatgggaggagatgctgcggctcccggcgccgcaggcacccaggccgagttgccacaccgccgtttcgagtacaaatacagctttaaggggccgcatctggtgcagagcgatgggaccgtgcccttttgggcccacgcggggaatgctattccaagtgcagatcagatccgaatagcaccgtccttaaagagccaaagaggttccgtgtggaccaaaacaaaagcagccttcgagaactgggaagtggaagtgacattccgagtgaccggaagaggtcgaattggagctgatggcttagcaatttggtatacagaaaaccaaggcttggacggccctgtgtttggatcagctgatatgtggaatggtgttggaatattttttgattcttttgacaatgacggaaagaaaaacaatcctgctatagtagttgtaggcaacaatggacaaatcaattatgaccaccaaaatgatggtgccactcaagccttagcgagttgtcagagggacttccgtaataaaccctatcctgtccgggcaaagattacctattaccagaaaacactgacggtcatgatcaataatggctttacaccagataaaaatgattatgaattctgtgccaaagtggaaaatatggttatccccacgcaagggcattttgggatatctgctgcaacaggaggtcttgcagatgaccacgatgttctctctttcctgactttccaactaaccgagcccggaaaagagccacctacgccagaaaaagacatttcagaaaaagaaaaggaaaagtatcaagaggagtttgaacacttccagcaagaattagacaagaagaaggaggaattccagaagggccaccctgacctccaggggcagccagcggatgacatctttgagagcataggggatcgggagctgagacaagtgtttgaaggacaaaatcgcattcatctggagatcaagcaacttaaccggcagctggatatgattctcgatgaacagaggagatacgtgtcttctctgacagaggagatttccaggagaggagcagggaccccaggacagcctgggcaggtctcccaacaggaactggacactgttgtgaggacccagctggagattttgagacaagtgaatgagatgaagaactccatgcgtgagaccatgcggctggttagtggcgtccagcacccaggctcggccggcgtctacgagacaacccagcacttcatggacatcaaggagcacctgcacatcgtgaagagagatatcgacagcctcgcgcagcgcagcatgtcatctaatgaaaaaccaaaatgcccagatctaccagcattcccgtcgtgtctgtccacagtccactttgtgatatttatagtggtgcagacggtgttgttcattggctacatcatgtacaggactcagcaagaagcagctgccaaaaaattcttctgaccttgattttcctatgtgtacgtcatgtatctgggctagactttcgctggcttcaagacaatttacctcttattaaagtaatggtctcgtttgctttgggatccagaacaacactgtttagtatatatgctactaaattgttgtaagcctttgtaagtttcctctcagatgtcatttggg

SEQ ID NO: 3341 - DNA, 1588 bp, Rattus norvegicus
  Genbank Accession No. U44845
ccaggcaagacagtgagactccagaagctccgagcccagtttgccaaggccctctgctagaggcctgccatggcatctctgaggccctttttcatactagccctgctggcattggtttctctggctgaccaagagtcatgcaagggccgctgcactcagggtttcatggccagcaagaagtgtcaatgtgatgagctttgcacctactatcagagctgctgtgttgactacatggagcagtgcaagccccaagtgacccggggggatgtgtttaccatgccagaagatgagtattggagctatgactacccggaggaaaccaagaacagtaccaatgctggcgtgcaatccgagaacacctctctacactttaacctaaagcctcgagccgaagagactataaagccaacaactcctgatcctcaggaacagtcaaacacccaagaacctgaagtggggcaacagggagtggccccaaggcctgacaccactgatgaaggaacctctgagtttccagaagaagagctgtgtagtggaaagccctttgatgccttcacagacctcaagaatggttccctttttgccttccgaggtgagtattgctatgagctagatgaaacagcagtgaggcctgggtaccccaaactcatccaagatgtctggggcatcgagggccccatcgacgctgccttcactcgcatcaactgtcagggaaagacctacttgttcaagggtagtcagtactggcgctttgaggatggtgtcctggaccctgattatccccgaaacatctctgaaggcttcagtggcataccagacaacgttgacgcagccttagcccttcctgcccacagttacagtggccgggaaagggtctacttcttcaagggaaaacagtactgggagtatgaatttcagcagcagcccagccaggaggaatgtgaaggaagctctctgtcagccgtgtttgagcactttgccttgcttcagcgggacagctgggagaacatttttgaactcctcttctggggcagatcctctgatggcgccaaaggaccccaattcatcagcagggattggcatggtgtaccagggaaagtggacgctgctatggccggccgcatctacatcactggctccacattccgctctgtccaggccaaaaaacagaagtctgggcgtcgaagtcgaaaacgctaccgttcacgccgagggcgtggccatagccgcagccgcagccgcagcatgagctctcgtcgcccatcgcgttcagtctggttctctttgctctccagcgaagagagtgggctaggaacctacaattacgattatgatatgaactggctgatacctgccacctgcgagcccattcagagcgtctatttcttctctggagacaagtactaccgagttaaccttagaacacggcgagtggactctgtgaatcctccctacccacgctccattgctcagtattggctgggctgcccaacctctgagaagtaggaatcagcacccacacagctgagcttcagaaacctcgtcctccagctttttctcccagcccaataaagtgttggccccaaaa

SEQ ID NO: 3342 - DNA, 2006 bp, Rattus norvegicus
  Genbank Accession No. U53184
gcgcgcgcggccagcgagacctcccggctccactggcggcgcgggcggcggtaaaatgtcggctccaggaccttaccaagcagctgcaggcccttctgtaatgcctactgcacccccaacctatgaagaaacagtgggtgtcaacagttactacccaacgcccccagcacctcagccgggaccagccacagggctcattacgggcccggatgggaagggcatgaatccaccttcgtactacacccagcccgtgcctgtccccaacgccaacgcaattgcagtgcagacggtttatgtgcagcagcccatctccttctacgaccgccccatccagatgtgctgtccttcctgcaacaagatgatcgtgacccagttgtcctacaatgcaggagccctcacctggctctcctgtggcagtctgtgtctgctgggatgcgtcgctggctgctgcttcattccgttttgcgtggacgccctgcaggatgtggaccattactgccccaactgcaaagcgctcctgggcacctacaaacgtttgtaggactcggccagccacaggggaggtagacaagtgctcccggaagtcacccaacccttgcccagcgcagccagaagacgtcccttccttgatctcttcatgagctcgtcttcgtgtcttttagggggtggggaaagtcggaaaagtaacaaacccccaaacccagaaactgctgctggagttgtgccctgcacatgcaaagacgtggaccttgggtgttgctttaagggtttaccgcctgatctcgttaccccactaactgtgattgttactccatttgcatctcgtctgctgatttgccactgcctgccccctcttcctcaagaagaggccttcctggtgccaggctcaaaacccgaagctacagtttgccttatttttcactgtttggcttgatctgtaccatctctcccagccctaatgacagagaccttgccttaaagactttgcggttctgtaattgcagacttctccagcactcagaatcactttcaattccatagagttgttcctctccacacacacccctcccccggtgcacagaagggctgccgacacccaccagactcatacagagaaggtcacaagtactaaatgaaaggctcccagcccaccttgtctcagcccctgtcctgtgaagggactccttcctcacacagtttctgtgacttccttttgttcttaaacacatggaagttacttggcagggagacatttctagaataatttttgtgatcacgatacacccttcattctccgtttgctggtatgtttttagttggtttggttttagttttccacatacagtctagctcgtggccagccttgagctccgaggagatcctccatcttctcctctcaaatacccagggcccagacatttgcctctgcacctgctgggctttttctctcatttttccttaaccagaaaaacaaacgggtaatttcatcgactgcctatgtaggtttggtgtggttttgaaaaccttgtttccatggggccctttgggggagtcagggggcccctgcacgagcccatgcttcaatgccgagagattggctgctggaaccccctgaagcatgatttcatgttttagagatgagcttctgtggtacggtcatcatggtctccaacatcaacagacaaggtagaaggatgtcaacgacaaagataagttcagggctctttctagggtcaccactctgtcctgtgtaacactgacacagtctggccagcctttcaggaggtcctggctccctcctaaacccatgtaggwcttgctgcaagtaacagtgtatgaagtcaacctgacctggaacagaagtctgcatattggttaagatacagcctatgtatcttcatacaacgatccagaagtactagacatcatttttgcagtgaattatgggtaccatacatgactttgatgatatctgcttttaaacaaataaaatctttgatcactca

SEQ ID NO: 3343 - DNA, 1330 bp, Rattus norvegicus
  Genbank Accession No. U53859
gaattcgttcttgaagggcggcggtggcggtgggggaggcgggggtctgggcgggggcctgggcaatgtgctcggaggcctgatcagcggagctgctggaggcggcggcggtggaggcggcggtggcggcatgggactgggaggaggtggcggaggcggtggaacagccatgcgtatcctgggcggagtcattagcgccatcagcgaggctgctgcgcagtacaacccggagcccccgcccccacgtagccattactctaatattgaggccaacgagagtgaagaggaacgtcagttcaggaaactttttgtccagctggctggagacgacatggaggtcagcgctacagaactcatgaatatcctcaacaaggtcgtgacccgacacccagatctgaaaactgatgggttcggcattgacacttgtcggagcatggtggctgttatggatagtgacaccacaggcaagctgggctttgaggagttcaagtacctctggaacaacattaaaaagtggcagggtatatacaaacgctttgatactgaccgatcagggaccattggtagcaatgaactcccaggggcctttgaggcagcaggattccacctgaatcagcatatctacagcatgatcatccgccgctactcggacgagaccgggaacatggatttcgataacttcatcagctgcttggtcaggctggatgccatgttccgtgctttcagatctcttgacaaaaatggcactggacagatccaagtgaacatccaggagtggttgcagctgactatgtattcctgagtggaagtcacagacctgccgcctcactgctcactgtggagccttgaacctgatcctgtctgcagccacgtttttacggtcatgtcctgctacccagaggccttccttttccctatgctggtacccagcttcccagtcggcagccagagctcaacgtgccccagcttgctgcaccctgagttcccctggctctgagacaagctagcttgctctgccgaagtgtcacccctacccccagtcacacccagtccgcaccctctgtgacctccatcctgtctgtgtgccaagcctagcactcctattgcttccatgtcccaagggccctgtctcagttctgggaggatcacgcctgtccctacacaccttgttacacactcacacagttacctcccaggcagccaaataaactccaggccatccagtgccacacaccctagtgcctatgcctgcactgttttccccctgcacagctgtcgggcccaagaggaaataaactctccattcgctgcttaaaaaaaaaaaaaaaaa

SEQ ID NO: 3344 - DNA, 1610 bp, Rattus norvegicus
  Genbank Accession No. U53922
ggccgggcggaactttccagaacgctcggtgggtggtagaggagcagcgtctggccgagctgcgctgtgctacgctcctctttccgctctccggcgccggcccgctcaccggctgtaaaaaatggtgaaagaaactacttactatgatgttctgggggtcaaacccaatgccacccaggaagaattgaaaaaggcatatagaaaattggccttgaagtaccaccctgataaaaatccaaatgaaggagaaaagtttaaacagatttctcaagcttatgaagttcttgctgattccaagaaaagggaactatatgataaagggggcgagcaggcgattaaggagggcggagcaggtggaggttttggctcgcccatggatatctttgatatgttctttggaggaggaggaaggatgcaaagagaaaggagaggtaaaaatgtcgtgcatcagctctcagtgaccttagaagacttatataatggtgcaacaaggaaactggctctgcaaaaaaatgtgatttgtgacaaatgtgaaggccgaggtggtaagaaaggagcagtagagtgctgtcccaactgccgggggactggcatgcagatcaggattcatcagattggaccaggaatggttcagcaaattcagtcagtgtgcatggagtgccagggtcatggagaacgcatcagtcctaaagacagatgtaaaagctgcaatggaagaaagatagttcgagagaagaaaattttagaagttcatattgataaaggcatgaaagatggtcagaagataacattccacggtgaaggagaccaagaaccaggactggagccaggagatattatcattgtgttagatcagaaggaccatgctgtttttacaaggcgaggagaagaccttttcatgtgtatggacatacagctggttgaagcattgtgtggcttccaaaagccaatatctactcttgacaaccgaaccatagtcatcacctctcatccaggtcagattgtcaagcatggggatataaaatgtgtgctaaatgaaggtatgccaatataccgtcggccatatgaaaagggacgtctaatcattgagtttaaggtaaactttcctgaaaatggctttctctctcctgataaactctctttgctggaaaaactccttcctgaaaggaaggaagtagaagagactgatgaaatggatcaggtagaactggtggactttgatccaaatcaggaaagacggcgtcattataatggagaagcgtatgaggatgatgagcatcaccccagaggtggcgttcagtgtcagacctcttaatgggccagtcactctttgaccttgtgtatgcagtagtgaatgtgggaaggactgtaatcataatatgctcactacttggctgttgtttttgttttaatattcaactatagtagtgttttaaaagttaaatgaagaataaacacaaatataaaagctctgactttgccctgtatgtatgatgactttaatgttcaagatgaaaatgaatacttgtaaaaaactagtttaaaaaatgccctagcatctgttaggccatatcttgtgtaactgataatagcgtgtacattagactgac

SEQ ID NO: 3345 - DNA, 1092 bp, Rattus norvegicus
  Genbank Accession No. U54632
aggggaagtcccgagacaaaggagcgccgccgcctctgccgccgcgacggtccgggccgcggtcgcccagggactttgaatatgtcggggattgccctcagccgacttgcgcaggagaggaaagcctggaggaaggaccacccttttggctttgtggctgtcccaacaaagaaccctgatggcacgatgaacctgatgaactgggagtgtgctatccctggaaagaaggggactccgtgggaaggaggcttgttcaagctacggatgcttttcaaagatgactatccgtcctcaccaccaaaatgtaaatttgagccaccactgtttcatccaaacgtgtatccttctggcacagtgtgcctgtccatcctggaggaagacaaggactggcggccagctattacgatcaaacagatcttattaggaatacaagaacttctaaatgaaccaaatattcaagacccagctcaagcagaggcctatacaatttactgccaaaacagagtggaatatgagaaaagggttcgagcacaagcgaagaagtttgccccctcataagcagcggcccgggctccatgacgaggaagggattggcttggcaagaacttgtttacaaccttttgcagatctaagtcgctccgtacagttactagtagcctgggagggttgagcgggcgccattttccatttccgccactggcatattcagtcttttgtatttttgattattgagtaaaacttgcttttattttaatattgatgtcagtatttcaactgctgtaaaatgataaacttttgtacttggtaagccctaggagctagtttcttctcgtccgctcggatcgaggcatgttccccactgttcagagctctggcctccagctggctgtatgacagaaccacactgtccctccttccttccctaccctcgtccttctcagaaacctgggctgttgcttatgagcctcagatccaaagttggccagcatctccattctgcaccacttcctttgtgtttatatggcgttttgtctgtgttgctgtttagagtaaataaactgtttatataaaaaaaaaaaaaaaaaaaaaaaa

SEQ ID NO: 3346 - DNA, 1511 bp, Rattus norvegicus
  Genbank Accession No. U55765
gatgaagggaagtggcccctggcctccacagctgaccacatgagggtggtttctagcctctttcttcctgtgctccttgcagaggtgtggctggtgagcagtttcaatctcagctcccatacaccagaggctcccattcgcctggtgtctcaggattacgagaatcaaacttgggaagagtacgaatgggctgatcccagggatgataatgaatactggctaagggccagccagcaactctccaatgagacttcaagctttgggttcagcctgcttcgaaagatctccatgaggcacgatggcaatgtgatcttctcaccatttggcctgtctgtggctatggtgaacttgatgctgggggccaagggagagaccaaagtgcaggtagaaaatgggctcaacctacaggccctgagccaggcaggacccctgatccttccagccctcttcaagagagtcaaagagaccttttccagcaacaagaaattgggcctcacccagggtagctttgccttcatccacaaggactttgaaattaaaaagacctatttcaatctatccacaatgtattttgatacagagtacgtgcctacaaattttcgaaattcttcacaagccagagggctcatgaaccattacattaacaaagagactgaggggaaaatccccaagctttttgatgagattaatcctgaaacaaagttaattctggtggactacatcttgttcaaaggcaagtggctgactccatttgaccccatcttcactgaggctgacactttccacctggacaaatacaaggcagttaaggtgcccatgatgtaccgggaagggaactttgcctctacctttgataagaagttccgttgtcacatcctcaaactgccctaccaaggaaatgccaccatgctagtggtccttatggagaaatcgggtgaccacttggccctggaggactacttgaccacagacctcgtggagatgtggctccaggatatgaaaaccagaaaaatggaggtcttctttcccaagttcaagctgaaccagaggtatgagatgcatgagctgctcaagcaggtgggaattaggaggatcttctccacctcagctgacctcagcgaactctcagccgtggcacgaaatcttcaggtgtccaaggtcgtacaacagtcagtgcttgaggtggatgaaaggggaactgaggtggtgtcagggacggtgtcagagatcaccgcttactgcatgcctcctgtcatcaaagtggaccggccttttcacttcatcatctacgaggagatgtcccggatgctcctatttcttggcagggtggtgaacccgacagttctgtgactcgggcatgtaggacctcggccaccacaggtgctgagccagaggtgtctgaatcacaagacgctgttggtagacggtaaaggatgcattctctgtacccagccagtttgctatggctgttgtctgattaacactgaaattaaaatgactcatactttaaa

SEQ ID NO: 3347 - DNA, 1688 bp, Rattus norvegicus
  Genbank Accession No. U56839
gaattcctgcctcagtcccagtagctggtccaggcctgtgcacatgcgagtgaagaactggaacggacgctgagcatccaagagcacctgctgcagcacctgctgtcacaccaagagcaggagctgatcgggtccagggcaatggcagcaggcctggactcctggaatagtaccatcaatggcacctgggagggggacgaactgggttacaaatgtcgcttcaacgaggacttcaagtatgtgctgctgcccgtgtcctatggcgtggtgtgcgtgctcgggctgtgcctgaacgtcgtggccctctacatcttcctgtgccgcctcaagacctggaacgcctccaccacctacatgtttcacctggcagtttctgactctctctacgcagcctccctgccgctgctggtttattactacgcccagggtgaccactggccatttagcacagtgctctgcaagctggtgcgtttccttttctacactaacctctactgcagcatcctcttcctcacctgcatcagcgtgcaccggtgcctgggggtcctgcgccctctgcactccctgagctggggccatgcccgctatgcccgccgagtggctgcggttgtgtgggtgctagtgctggcctgccaggcacccgtgctctactttgtcaccaccagcgtgagagggacccgaatcacctgccacgacacctcggcccgagagctctttagccattttgtggcttacagctctgtcatgctgggtctgctttttgctgtgcccttttccatcatcctggtctgttacgtgctcatggcccgacggctgctcaaaccggcttatgggaccacaggtctgcctcgggccaagcgcaagtctgtgcgcaccatcgccttagtactggccgtcttcgccctctgcttcctgcctttccacgtcacccgcaccctctattactccttccgatcacttgacctcagttgccacaccctcaacgccatcaacatggcgtataagatcacccggccactggccagcgccaacagttgccttgaccctgtgctctacttcctggcagggcagagactggtccgctttgcccgagatgccaagcccgccacagagcctacacccagcccacaggctcgtcgtaagctggggctgcacaggcctaacagaactgacactgtgaggaaagatttgtcgatcagcagtgatgactcaagaaggacagagtccacaccagctggaagtgagactaaggacattcgtctatagcagctcagtcaggtgtcagttcatgtaggggagagctgtaggggaccaaagcttgttcaaaggggctgatatcctctgatatgatatcaacggctctcatttggcagggactcaggatactcatcctgtggtcccaagagtgacaggaccccaaagtccccaatcatttgtatgtgtgagttggggaatcgtatctaaggcaacgccacctgactcccatgcaaacagctgccattcctgccaaggtacctaggccgagcttcagcctcttaaatccaagggagaagcaggcccagggagaacacagcagagtccagactagctacctggattagaagtagaatcgaggggttggggatttagctcagcggtagagcgccctgggttcagtccccagctccggaaaaaaaaagaaaaaaaaa

SEQ ID NO: 3348 - DNA, 1038 bp, Rattus norvegicus
  Genbank Accession No. U57042
ccagaagcgctgagtgaaaatgtgctgtttggaatggggaatcctcttcttgacatctctgctgtggtagacaaagatttccttgataagtattctctgaaaccaaacgaccagatattggccgaagacaagcacaaggaattgtttgatgaacttgtaaaaaaattcaaagttgaatatcatgccggtgggtccacgcagaattcaatgaaagtggctcagtggatgattcaggagccacacagagcagcaacgttcttcggatgcattgggatagataagttcggggagatcctgaagagcaaagccgcaaatgcacacgtggacgcccattactatgagcagaacgagcagcccacaggaacgtgcgctgcatgcatctccggtggcaaccggtctcttgttgctaacctccgtgccgccaattgttataagaaagaaaagcaccttgatctggagaacaactggatgttggtagagaaggccagagtttactacatagctggcttctttctcaccgtctccccagagtcagtgttgaaaatggctcgctatgctgccgagaacaacaggaccttcactctgaacctgtccgcaccgttcattagccagttcttcaaggaagccttgatggccgtcatgccttatgttgacatcctctttggaaatgagacggaggctgccacttttgctagagagcaaggctttgaaactaaagacattaaagaaatagcccgaaagacgcaggctcttccaaaggtgaactcgaagaggcagaggaccgtgatcttcacccaagggagagatgacactatagtggctacaggaaatgatgtcactgcttttcctgtcttggatcaaaaccaggaagagatcgttgacaccaatggagctggagatgcatttgtaggagggtttctgtctcagctggtctccaacaagcctctgactgaatgcatccgggccgggcactatgcagcgagcgtcatcattaggcgaactggctgtacttttcctgagaagccagacttccactga

SEQ ID NO: 3349 - DNA, 353 bp, Rattus norvegicus
  Genbank Accession No. U57050
ggagactaactatagtaacaaattggcccaacaggcctgtagatgccaagcaggaactgggtttagattccaagtagtaatttaaagaaaaaaagtttgaataaaggacaatgccagcttctgccactttcgctttcccaggatcccacctgctcagctgtagatgactatcctggcacacactgaaatgtcgtgagggaacccacgctgagacccgctcgatccacacatcattgcctacgctgacataaggaacccgtgtcctgagtctttgattgagaagattctgactgttcagtgttctctttcacaaaattggttttcaaataaatatattaaaatctccacattgc

SEQ ID NO: 3350 - DNA, 432 bp, Rattus norvegicus
  Genbank Accession No. U59184
gagatgcagaggatgattgctgatgtggatacagactccccccgagaggtcttcttccgtgtggcagctgacatgtttgcagacggcaacttcaactggggccgggtggttgcccttttctactttgctagcaaactggtgctcaaggccctgtacactaaagtgcccgagctgatcagaaccatcatgggctggacactggacttcctccgggagcggctgcttgtctggatccaagaccagggtggctgggatggcctcctttcctacttcgggacccccacatggcagacagtgaccatctttgtggctggagtcctcactgcctcactcaccatctggaagaagatgggctgaggcttcctgctgccttggactgtgtcttttcttcataaattatgacatttttcctgggatgaatgggtaacgaga

SEQ ID NO: 3351 - DNA, 6075 bp, Rattus norvegicus
  Genbank Accession No. U60416
  misc_feature (1)..(6075): n = a or c or g or t
agcgggtcggtccacccgagaaaggggngcggaggaactgggaccgacccgggaagactgcgccagaggtgcacagagatcgcgcggggagcgaggagccgggcctcggcgctcagcccggatccacgtcccgcgaagcaccggctccggccggccgcggggtcatgacgtacagcgagctctacagccggtacacgagggtctggatccccgacccagatgaggtgtggcgctcggctgaactaaccaaggactacaaagatggggatgagagcctacaactcagactggaagatgacacaattctggattacccaatcgatgtccaaaataaccaggtgccattcttgcggaatccagatatcttagtaggagaaaacgacctcactgcactcagccatctccacgagcccgcagttctgcataacttaaaggtccgtttcctggagtctaaccacatctacacttactgtggaattgtgcttgttgccattaatccctatgagcagctgccaatctacgggcaggatgtcatctatgcctacagtggccaaaatatgggcgacatggatccccacatctttgctgtagcagaagaagcctacaagcagatggccagagatgaaaagaaccaatccatcatagtcagcggagagtctggagcagggaagaccgtgtcagccaagtatgccatgcgctattttgccacagttgggggctcagccagtgataccaacatcgaagagaaggtcctggcttccagtcccatcatggaggccatcgggaatgccaagacaactcgcaacgacaatagcagccgatttgggaagtacattgagatcggctttgataaaaagtaccacatcatcggggccaacatgaggacctatttgctggagaagtccagggtggtctttcaggcggatgatgagaggaactaccacatcttttaccagctctgtgctgcggccagccttcctgagtttaaggagctcgcactaacatgtgcagaggactttttctacaccgcccatggaggaaacacgaccatcgagggtgtagatgatgcagaggactttgagaagacaagacaagccctcacactccttggagttcgggagtcccatcaaatcagcatctttaagataattgcttctatcttgcaccttggaagtgtggagatccaggccgagcgggatggggactcctgcagtatatcgccccaggacgaacacctgagcaacttctgccgcctgctaggaatagagcacagtcagatggagcactggctgtgtcatcggaagctggtcaccacctccgagacctacgtcaagaccatgtccctgcagcaagtggtcaacgcacgcaatgccttggccaagcacatctatgcccagctgttctcctggattgtggagcacatcaacaaggccctgcaaacctcccttaaacaacactccttcatcggggtcctggatatttatgggtttgagaccttcgagattaatagcttcgagcagttttgtatcaactatgccaacgaaaagctccagcaacagttcaactcgcatgtgttcaagctggagcaagaagagtatatgaaggagcagatcccgtggaccttgattgacttctatgataaccaaccgtgcatagacctcatagaagccaagctgggtatcctggacctgttggatgaggagtgtaaggtccccaaaggaactgatcagaactgggctcagaaactctatgaacggcactccaacagtcaacacttccagaaaccacgcatgtccaacacggccttcattgtcatccactttgcagacaaggtggaatacctttcagatggttttctggagaaaaacagggacacggtatatgaagaacagatcaacatcctgaaagcgagcaagtttccgctagtggctgatttgttccgtgatgacgaggactctgttcctgccaccaacacagctaagagtcggtcatcttcaaagatcaatgttcgttcttccagacccctcatgaaggcccccaacaaggagcacaagaaatccgtgggctaccagttccgcacttccctaaacctgcttatggagactctgaatgccacaacgccccactacgttcgatgcatcaagcccaacgacgaaaagctccccttccacttcgacccaaagagagctgtgcagcagctcagagcctgcggcgtgttggagaccattcggatcagcgcggcaggctacccgtccaggtggacctaccatgacttcttcaaccggtatcgggtgttgatgaagaagagagagcttgccaacaccaccgacaagaagaatatctgcaagtctgtcctggagagtctcatcaaggatccagacaagttccagtttggccgcaccaagatcttcttccgggcaggtcaggtggcctacctggagaagcttcgggcagacaagttccgggaggccaccatcatgatccaaaagacggtcaggggctggctgcagagagtgaagtaccggaggctgagagcagctacgctaaccctgcagagattctgccgaggatacttagcccgcagactgactgagcacttgaggagaacccgggcggccatagtgttccagaagcagtaccgcatgctgaaggcccgccgagcctactgcagggtccgcagggctgcggtcatcatccagtcctacacgaggggccatgtgtgtacgcagaagctaccgccagtcctcacggagcacaaagccaccatcatccagaagtacgcccggggctggatggcacggagacattttcagcggcagcgggatgcagccattgtcatccagtgtgccttccggaggctcaaggccaggcaggcactgaaggccctcaagatcgaggcccgttctgcagagcatctgaaacgcctcaacgtgggcatggagaacaaagttgtccagctgcagcggaagattgatgaccagaacaaagagttcaagactctgtcagagcagttgtctgcagttacctccacccatgccatggaggtggagaagctgaagaaggagctggcgcgttaccagcagaaccaggaggctgaccccagccttcagctgcaggaggaggtacagagcctgcgcaccgaactacagaaggctcattcagagcgcagggtcctagaggatgctcacaacagggagaatggtgaactgagaaagcgagtcgcagacctggaacatgaaaatgcactcttgaaggatgagaaagaacaccttaaccaccaaatcctgcgccagtcaaaagctgaatcttcacagagctctgtggaggaaaacctgctgattaagaaggaactggaggaggaacggtcccggtaccagaacctcgtgaaggagtactcccagctggagcagagatatgagaaccttcgggacgagcagcaaactccaggccacaggaagaacccatcaaatcaaagtagcttagaatctgactccaattacccctccatttccacctcagaaatcggagacaccgaggatgccctacagcaggtggaggagattggtatagagaaggcagccatggacatgactgtcttcttgaagctgcagaagagagtgcgggaacttgagcaggagaggaagaagctgcaggtgcagctagaaaaggaacaacaggacagcaagaaagtgcaggtagaacaacaaaacaatggcctagatgtggaccaggatgcagatatagcctacaatagtctgaagagacaagagctcgagtcagagaacaagaagctgaagaatgatctgaatgagcgctggaaggctgtagccgaccaagccatgcaggataactccactcatagctcccccgacagctacagcctcctactgaaccagctcaagctggccaacgaggagctggaggtccgcaaagaggaggtgctgatcctcaggacccagatcatgaatgctgaccagcgcagactgtccggcaagaacatggagccgaacatcaatgccagaacaagttggcccaacagcgagaagcacgtggaccaggaagatgccattgaggcctatcacggggtctgccagacaaacagccagactgaggattggggatatttgaatgaagatggagaactcggcttggcttaccaaggcctaaagcaagtcgccaggttgctggaggcccagctgcaggcccagaacctgaagcatgaggaggaggtggagcatctcaaggcccaggtggaggccatgaaggaggagatggacaaacagcagcagaccttctgccagactctgctgctctccccagaggcccaggtagaatttggtgtccagcaggagatatcccggctgaccaatgagaacctggactttaaggagttggtggaaaagctggagaagaatgagaagaagctgaaaaagcagctgaagatttacatgaagaaggtccaggacttagaagctgcccaggcattggcacagagtgacaggaggcaccatgaactcacaagacaggtcacggtccaacgaaaagagaaggacttccaaggcatgctggagtaccacaaagaggacgaggcactccttatccggaacctggtgacagacctgaagccccagatgctgtcgggcaccgtgccctgtctgcctgcatacatactctacatgtgcatcaggcacgcggactacaccaacgatgacctcaaggtgcactcgttgctgagctccaccatcaatggcattaagaaagtcctcaagaagcacaatgaggactttgagatgacgtcattctggttatccaacacctgccgcctccttcactgtttgaagcagtacagtggggatgagggtttcatgacacagaacacggcgaagcagaatgagcactgtctcaagaactttgacctcactgaataccgtcaggtgctaagtgacctttccattcagatctatcagcaactcattaaaattgctgagggcctgctacagcctatgatagtttctgccatgctggaaaatgagagtatccaggggctgtcaggggtgaggccaactggctaccggaagcgctcgtccagcatggtggacggagaaaattcgtattgcctggaggccatcatccgccagatgaatttctttcatacagtcctgtgtgaccagggcctggaccccgagattatcctgcaggtgttcaaacagcttttctacatgatcaatgcggtgactcttaacaacctactcctgcggaaagatgcctgctcctggagcaccggcatgcaactcaggtacaacataagtcaactcgaagagtggcttcggggaaaaaaccttcagcagagtggagcggttcagaccatggagcccttgatccaggcagcccaactccttcagctgaagaagaagacccaggaggatgctgaggccatctgctctctgtgtacctccctcagcacccagcagattgtcaaaattttaaacctctacactcccttgaatggatttgaagaacgggtgacagtgtcctttatacgaacaatccaggctcagctacaagagaggagtgacccccagcagctactgctggactccaaacacatgtttcctgttctgtttccatttaatccatctgctctgaccatggactcaatccacatcccggcctgtctcaatctggagttcctcaatgaagtctgaggatgcgttgtttccaaggcaagcgagaaggaagtgcgtgctgtcggctgaaggagtgctaggtctgttaaatatgcccagcgtagatcaaaccatgttagagacctgtggggagcactgaactaaacagcggggtgcactctggtcgttagcttttgtacagactgctcagaaaacacctgaagtgaggacgattgttgcagtgggactttcaggttaaaccaagacacgtcagaacggacggccgctgtgtagctccagtcaccatacaaagatgccagttctacagagtggaagtgcctagctttgagctgtgtatataacttaagaatgttcaaactaagattatattaaaaacacatgacataaa

SEQ ID NO: 3352 - DNA, 2196 bp, Rattus norvegicus
  Genbank Accession No. U63923
aattcggcacgagcaaacggagaggccgcgggaggcgcgaagccggcagaaggcgagggagagcggagggcggccatggtccagccctgaagccaaacaaaaaaggcctacttcgaaagctgtcaacaatgaatgactctaaagatgcccctaagtcctatgacttcgacctgatcatcattggaggaggctcgggaggcctggcggcagctaaggaggcagccaaatttgacaagaaggtgatggtcttggacttcgtcacaccaactcctctcggaacgaatgggggtctcgggggaacgtgtgtgaacgtgggctgcatacctaaaaaactgatgcaccaggcggctctgttaggacaagctctgaaagactcacgcaactatggctggaaactcgaggacacagttaagcatgactgggagaaaatgacagaatctgtgcagaatcatatcggctcgctgaactggggctaccgagtagctctccgggagaagaaggtcgtctatgagaatgcttacgggaaattcattggtcctcacaaaattatggcaacaaataacaaaggtaaagaaaaagtttactcagcagagcggttcctcattgccaccggtgaaaggccacgctacctgggcatccctggagacaaagagtactgcatcagcagtgacgatcttttctccttgccttactgcccggggaagaccctagtggttggcgcgtcctatgtcgccttggaatgtgcaggattcctggctggtatcggcctcgacgtcactgtaatggtgcggtccattctccttagaggatttgaccaggacatggccaacaaaattggtgaacacatggaagagcatggtatcaagtttatcaggcagttcgtgccgacgaaaattgaacagattgaagcagggacaccaggccgactcaaggtgaccgctaaatccacaaacagtgaggagaccatagaagacgaatttaacacagtgttgcttgcagtaggaagagattcttgtacaagaactattggcttagagaccgtgggcgtgaagatcaatgaaaagaccgggaagatacctgtcacggatgaggagcagaccaatgtgccttacatctacgccattggtgacattctggaggggaagctggagctgacccccgtggccatccaggcggggagattgctggctcagaggctgtatggcggctccactgtcaaatgtgactatgacaatgtcccaacgactgtgtttactcctttggagtatggctgctgtggcctctctgaagaaaaagctgtagagaaatttggggaagaaaatattgaagtttatcacagtttcttctggccattggaatggacagttccatcccgggataacaacaaatgttatgcaaaagtcatctgtaaccttaaagacaacgaacgtgtcgtgggcttccacgtactgggtccaaatgctggagaggtgacgcagggctttgcagccgcactcaagtgcgggctgaccaagcagcagctggacagcaccattggcatccacccggtctgtgcagagatatttacaacgctgtcggtgactaagcgttctgggggagacatcctccagtctggctgctgaggttaagccccagtgtggatgctgttgccaagactacagaccattgcttgcttccttgtccacacccaggtgaagttcaggaaggctcttgggttcttggcaccaattcaaggtgctatcctaaggccaccaggtccctgggatcttgtgggtaggaggtggcaggtagaagaaggctgcagcatcgcactggggtcaccatgacggactcagactgacattcggcagagcatcacggtgcgtccatgaagtcactagcctcaagcccaagtggtgggcagtgacagaaagctgtcgatctgttgggttcaacctttccctgtagactgttttagtctcgccttcaagctatgtaatgtcaattctgttttttcttttctccatggggttaatgatactagaggtagggaatgttagcaatcagtttttgtcatggctggactatccacagcacggtcgttactgtgtggaagggggtcagatggcttatgagagccaaaccagtttatcctgagaaagacgaattaccctgtggctaaaatacactgtttttactaaaaaaaaaaaaaaaaaa

SEQ ID NO: 3353 - DNA, 339 bp, Rattus norvegicus
  Genbank Accession No. U64705
cggagaaaatgcatgccagggacttcacagtttctgctctggtaagagttgttggatttagtaatgctaattatagccattaagcaggattttactacaatatggctgctcagtgctgtgttgtcgttccccctgctcagaacaattgtttcttaactatacctgtctgctgtctacctgtagcagccagggacgcttggtctcatacatgatagaaagaaattaaatgaatgcctgacctgaatagggattgctgaattgagttgttgtatttgcagcatggtgacatggaccagaaggaaagagatgtcatcatgagggaattccgatcagggtcaa

SEQ ID NO: 3354 - DNA, 990 bp, Rattus norvegicus
  Genbank Accession No. U66322
atggtacaagctaagacctggaccctaaagaagcactttgaaggcttccctacggacagtaactttgagttgaggacgactgagctcccacccttaaataatggagaggtcctgctggaagccctgttcctctccgtggacccttacatgagagttgcagcaaaaaaactgaaggagggcgacagcatgatgggtgaacaagtggccagagttgtggaaagtaaaaactcagccttcccaacgggaacgattgttgtggctttattaggttggacatcacattccatttctgatgggaatggactgagaaagctacctgcagagtggcctgacaagctaccactgtctttggctttggggacagttggcatgccaggcctcactgcctactttggcctgcttgacatctgtggcttgaagggtggagaaacagtgctggtcaatgcggcagccggggctgtgggctctgttgtggggcagatagctaagctcaagggctgcaaagttgttggtacagccgggtctgatgaaaaggttgcctatcttaagaagcttggattcgatgtggcctttaactacaagacagtaaagtcattggaagaagctttgaggacagcctctccagatggttatgattgctactttgataatgtcggtggagagttttcaaacactgttatactgcagatgaagacgtttggaagaattgccatctgtggcgccatctctcaatacaaccgcactggcccatgtcccccaggcccatctccagaggtcattatctatcagcaactccgcatggaggggttcatcgttactcggtggcaaggagaagtccgccagaaggctctgacagacttgatgaattgggtttcagagggtaagatccggtatcatgaatacatcactgaaggatttgagaagatgcccgcagcgttcatgggaatgttgaaaggagacaatctggggaagactatagtgaaagcgtga

(The sequence listing continues in the following parts.)

1. A method of determining whether a compound induces at least one toxic effect on a tissue or cell, comprising:
(a) preparing an expression profile of a tissue or cell sample exposed to said compound; and
(b) comparing the gene expression profile to a database comprising at least part of the data or information of Tables 5A-5MMMMM to determine whether the compound induces at least one toxic effect on the tissue or cell.

2. A method of claim 1, wherein the gene expression profile prepared from the tissue or cell sample comprises the level of expression for at least one gene.

3. A method of claim 2, wherein the level of expression is compared to a Tox Mean and/or Non-tox Mean value in Tables 5A-5MMMMM.

4. A method of claim 3, wherein the level of expression is normalized prior to comparison.

5. A method of claim 1, wherein the expression profile is a gene expression profile.

6. A method of claim 1, wherein the expression profile is a protein expression profile.

7. A method of claim 1, wherein the database comprises substantially all of the data or information in Tables 5A-5MMMMM.

8. A method of predicting at least one toxic effect of a compound, comprising:
(a) detecting the level of expression in a tissue or cell sample exposed to the compound of two or more genes from Tables 5A-5MMMMM; wherein differential expression of the genes in Tables 5A-5MMMMM is indicative of at least one toxic effect.

9. A method of predicting the progression of a toxic effect of a compound, comprising:
(a) detecting the level of expression in a tissue or cell sample exposed to the compound of two or more genes from Tables 5A-5MMMMM; wherein differential expression of the genes in Tables 5A-5MMMMM is indicative of toxicity progression.

10. A method of predicting the hepatotoxicity of a compound, comprising:
(a) detecting the level of expression in a tissue or cell sample exposed to the compound of two or more genes from Tables 5A-5MMMMM; wherein differential expression of the genes in Tables 5A-5MMMMM is indicative of hepatotoxicity.

11. A method of identifying an agent that modulates the onset or progression of a toxic response, comprising:
(a) exposing a cell to the agent and a known toxin; and
(b) detecting the expression level of two or more genes from Tables 5A-5MMMMM; wherein differential expression of the genes in Tables 5A-5MMMMM is indicative of toxicity.

12. A method of predicting the cellular pathways that a compound modulates in a cell, comprising:
(a) detecting the level of expression in a tissue or cell sample exposed to the compound of two or more genes from Tables 5A-5MMMMM; wherein differential expression of the genes in Tables 5A-5MMMMM is associated the modulation of at least one cellular pathway.

13. The method of claim 8, wherein the expression levels of at least 10 genes are detected.

14. The method of claim 8, wherein the expression levels of at least 50 genes are detected.

15. The method of claim 8, wherein the expression levels of at least 100 genes are detected.

16. The method of claim 8, wherein the expression levels of at least 500 genes are detected.

17. A method of claim 8, wherein substantially all of the genes in Tables 5A-5MMMMM are detected.

18. A method of claim 8, wherein all of the genes in at least one of Tables 5A-5MMMMM are detected.

19. A method of claim 8, wherein the compound exposure is in vitro.

20. A method of claim 19, wherein the cell sample comprises rat hepatocytes.

21. A method of claim 8, detecting the level of expression comprises detecting the level of protein encoded by the 2 or more genes.

22. A method of claim 8, wherein detecting the level of expression comprises detecting the level of protein activity associated with the 2 or more genes.

23. A method of claim 8, wherein the level of expression is detected by a nucleic acid amplification, nuclease protection or hybridization assay.

24. The method of claim 6, wherein the detected level of expression is compared to that found in cells exposed to a known toxin.

25. The method of claim 24, wherein the toxin is selected from the group consisting of amiodarone, alpha-naphthylisothiocyante (ANIT), acetaminophen (APAP), AY-25329, bromobenzene, captopril, carbamazepine, carbon tetrachloride, chloroform, chlorpromazine, CI-1000, clofibrate, CPA, dexamethasone, diclofenac, diethylnitrosamine, diflunisal, dimethylnitrosamine (DMN), 17α-ethinylestradiol, gemfibrozil (Lopid®), hydrazine, imipramine (Janimine), indomethacin, lipopolysaccharide, lovastatin (Mevacor®), methotrexate, phenacetin, phenobarbital, tacrine, tamoxifen, tetracycline, thioacetamide, valproate, and Wy-14643.

26. The method of claim 25, wherein the level of expression is compared to that found in Tables 5A-5MMMMM.

27. The method of claim 26, wherein the cells are primary hepatocytes.

28. The method of claim 27, wherein the cells are rat primary hepatocytes.

29. A method of claim 6 or 7, wherein the effect is selected from the group consisting of genotoxic and non-genotoxic carcinogenesis, cholestasis, direct-acting toxicity, hepatitis, liver enlargement, inflammation, necrosis, necrosis with steatosis, peroxisome proliferation, steatosis, and steatosis with hepatitis.

30. A method of claim 8, wherein the hepatotoxicity is associated with at least one liver disease pathology selected from the group consisting of genotoxic and non-genotoxic carcinogenesis, cholestasis, direct-acting toxicity, hepatitis, liver enlargement, inflammation, necrosis, necrosis with steatosis, peroxisome proliferation, steatosis, and steatosis with hepatitis.

31. A method of claim 10, wherein the cellular pathway is modulated by a toxin selected from the group consisting of amiodarone, alpha-naphthylisothiocyante (ANIT), acetaminophen (APAP), AY-25329, bromobenzene, captopril, carbamazepine, carbon tetrachloride, chloroform, chlorpromazine, CI-1000, clofibrate, CPA, dexamethasone, diclofenac, diethylnitrosamine, diflunisal, dimethylnitrosamine (DMN), 17α-ethinylestradiol, gemfibrozil (Lopid®), hydrazine, imipramine (Janimine), indomethacin, lipopolysaccharide, lovastatin (Mevacor®), methotrexate, phenacetin, phenobarbital, tacrine, tamoxifen, tetracycline, thioacetamide, valproate, and Wy-14643.

32. A set of at least two probes, wherein each of the probes comprises a sequence that specifically hybridizes to a gene in Tables 5A-5MMMMM.

33. A set of probes according to claim 32, wherein the set comprises probes that hybridize to at least 3 genes.

34. A set of probes according to claim 32, wherein the set comprises probes that hybridize to at least 10 genes.

35. A set of probes according to claim 32, wherein the set comprises probes that hybridize to at least 100 genes.

36. A set of probes according to claim 32, wherein the set comprises probes that hybridize to at least 500 genes.

37. A set of probes according to claim 32, wherein the probes are attached to at least one solid support.

38. A set of probes according to claim 37, wherein the at least one solid support is selected from the group consisting of a membrane, a glass support, a set of beads and a silicon support.

39. A solid support comprising at least two probes, wherein each of the probes comprises a sequence that specifically hybridizes to a gene in Tables 5A-5MMMMM.

40. A solid support of claim 39, wherein the solid support is an array comprising at least 10 different oligonucleotides in discrete locations per square centimeter.

41. A solid support of claim 39, wherein the array comprises at least about 100 different oligonucleotides in discrete locations per square centimeter.

42. A solid support of claim 39, wherein the array comprises at least about 1000 different oligonucleotides in discrete locations per square centimeter.

43. A solid support of claim 39, wherein the array comprises at least about 10,000 different oligonucleotides in discrete locations per square centimeter.

44. A computer system comprising:
(a) a database containing information identifying the expression level in a tissue or cell sample exposed to a hepatotoxin of a set of genes comprising at least two genes in Tables 1-5MMMMM; and
(b) a user interface to view the information.

45. The computer system of claim 44, wherein the cell samples are rat primary hepatocytes.

46. A computer system of claim 44, wherein the database further comprises sequence information for the genes.

47. A computer system of claim 44, wherein the database further comprises information identifying the expression level for the set of genes in the tissue or cell sample before exposure to a hepatotoxin.

48. A computer system of claim 44, wherein the database further comprises information identifying the expression level of the set of genes in a tissue or cell sample exposed to at least a second hepatotoxin.

49. A computer system of claim 44, further comprising records including the expression level of a protein, protein activity or descriptive information from an external database, which information correlates said genes to records in the external database.

50. A computer system of claim 49, wherein the external database is GenBank.

51. A method of using a computer system of claim 44 to present information identifying the expression level in a tissue or cell of at least one gene in Tables 5A-5MMMMM, comprising:
(a) comparing the expression level of at least one gene in Tables 5A-5MMMMM in a tissue or cell exposed to a test agent to the level of expression of the gene in the database.

52. A method of claim 51, wherein the expression levels of at least 2 genes are compared.

53. A method of claim 51, wherein the expression levels of at least 10 genes are compared.

54. A method of claim 51, wherein the expression levels of at least 100 genes are compared.

55. A method of claim 51, further comprising the step of displaying the level of expression of at least one gene in the tissue or cell sample compared to the expression level when exposed to a toxin.

56. A kit comprising at least one solid support of claim 39 packaged with gene expression information for said genes.

57. A kit of claim 56, wherein the gene expression information comprises gene expression levels in a tissue or cell sample exposed to a hepatotoxin.

58. A kit of claim 57, wherein the gene expression information is in an electronic format.

59. A method of identifying an agent that modulates at least one activity of a protein encoded by a gene in Tables 5A-5MMMMM comprising:
(a) exposing the protein to the agent; and
(b) assaying at least one activity of said protein.

60. A method of claim 59, wherein the agent is exposed to a cell expressing the protein.

61. A method of claim 60, wherein the cell is exposed to a known toxin.

62. A method of claim 61, wherein the toxin modulates the expression of the protein.
